United States Patent Application Publication US 2007/0214517 A1 - sequence listing, part 76

SEQ ID NO: 99116 - DNA, 1132 bp, Arabidopsis thaliana
  misc_feature (1)..(1132): Ceres Seq. ID no. 13602214
  misc_feature: MA Experiment ID: 108434 Result: Up-regulated in Transcription
  misc_feature: MA Experiment 108434 PARAMETER Experiment Name: At_Root_Tips_cDNA_P Parameter: Tissue Value: Root Tips
  misc_feature: MA Experiment ID: 108461 Result: Up-regulated in Transcription
  misc_feature: MA Experiment 108461 PARAMETER Experiment Name: At_Germinating_Seeds_cDNA_P Parameter: Age (day) Value: 1 vs. 0
  misc_feature: MA Experiment 108461 PARAMETER Experiment Name: At_Germinating_Seeds_cDNA_P Parameter: Tissue Value: Germinating Seeds
  misc_feature: MA Experiment ID: 108464 Result: Down-regulated in Transcription
  misc_feature: MA Experiment 108464 PARAMETER Experiment Name: At_Germinating_Seeds_cDNA_P Parameter: Age (day) Value: 4 vs. 0
  misc_feature: MA Experiment 108464 PARAMETER Experiment Name: At_Germinating_Seeds_cDNA_P Parameter: Tissue Value: Germinating Seeds
  misc_feature: MA Experiment ID: 108488 Result: Down-regulated in Transcription
  misc_feature: MA Experiment ID: 108576 Result: Up-regulated in Transcription
  misc_feature: MA Experiment 108576 PARAMETER Experiment Name: At_42deg_Heat_cDNA_P Parameter: Temperature (deg C) Value: 42 vs. 22
  misc_feature: MA Experiment 108576 PARAMETER Experiment Name: At_42deg_Heat_cDNA_P Parameter: Timepoint (hr) Value: 1
  misc_feature: MA Experiment 108576 PARAMETER Experiment Name: At_42deg_Heat_cDNA_P Parameter: Tissue Value: Aerial
  misc_feature: MA Experiment ID: 20000069 Result: Up-regulated in Transcription
  misc_feature: MA Experiment 20000069 PARAMETER Experiment Name: At_100uM_ABA_Mutants_cDNA_P Parameter: Plant Line Value: CS23
  misc_feature: MA Experiment 20000069 PARAMETER Experiment Name: At_100uM_ABA_Mutants_cDNA_P Parameter: Timepoint (hr) Value: 6
  misc_feature: MA Experiment 20000069 PARAMETER Experiment Name: At_100uM_ABA_Mutants_cDNA_P Parameter: Tissue Value: Aerial
  misc_feature: MA Experiment 20000069 PARAMETER Experiment Name: At_100uM_ABA_Mutants_cDNA_P Parameter: Treatment Value: 100uM ABA vs. No Treatment
  misc_feature: MA Experiment ID: 20000072 Result: Up-regulated in Transcription
  misc_feature: MA Experiment 20000072 PARAMETER Experiment Name: At_100uM_ABA_Mutants_cDNA_P Parameter: Plant Line Value: CS8105
  misc_feature: MA Experiment 20000072 PARAMETER Experiment Name: At_100uM_ABA_Mutants_cDNA_P Parameter: Timepoint (hr) Value: 6
  misc_feature: MA Experiment 20000072 PARAMETER Experiment Name: At_100uM_ABA_Mutants_cDNA_P Parameter: Tissue Value: Aerial
  misc_feature: MA Experiment 20000072 PARAMETER Experiment Name: At_100uM_ABA_Mutants_cDNA_P Parameter: Treatment Value: 100uM ABA vs. No Treatment
  misc_feature: MA Experiment ID: 20000087 Result: Up-regulated in Transcription
  misc_feature: MA Experiment 20000087 PARAMETER Experiment Name: At_100uM_ABA_Mutants_cDNA_P Parameter: Plant Line Value: WS
  misc_feature: MA Experiment 20000087 PARAMETER Experiment Name: At_100uM_ABA_Mutants_cDNA_P Parameter: Timepoint (hr) Value: 6
  misc_feature: MA Experiment 20000087 PARAMETER Experiment Name: At_100uM_ABA_Mutants_cDNA_P Parameter: Tissue Value: Aerial
  misc_feature: MA Experiment 20000087 PARAMETER Experiment Name: At_100uM_ABA_Mutants_cDNA_P Parameter: Treatment Value: 100uM ABA vs. No Treatment
  misc_feature: MA Experiment ID: 20000112 Result: Up-regulated in Transcription
  misc_feature: MA Experiment 20000112 PARAMETER Experiment Name: At_42deg_Heat_cDNA_P Parameter: Temperature (deg C) Value: 42 vs. 22
  misc_feature: MA Experiment 20000112 PARAMETER Experiment Name: At_42deg_Heat_cDNA_P Parameter: Timepoint (hr) Value: 2
  misc_feature: MA Experiment 20000112 PARAMETER Experiment Name: At_42deg_Heat_cDNA_P Parameter: Tissue Value: Aerial
  misc_feature: MA Experiment ID: 20000113 Result: Up-regulated in Transcription
  misc_feature: MA Experiment 20000113 PARAMETER Experiment Name: At_42deg_Heat_cDNA_P Parameter: Temperature (deg C) Value: 42 vs. 22
  misc_feature: MA Experiment 20000113 PARAMETER Experiment Name: At_42deg_Heat_cDNA_P Parameter: Timepoint (hr) Value: 8
  misc_feature: MA Experiment 20000113 PARAMETER Experiment Name: At_42deg_Heat_cDNA_P Parameter: Tissue Value: Aerial
  misc_feature: MA Experiment ID: 20000144 Result: Up-regulated in Transcription
  misc_feature: MA Experiment 20000144 PARAMETER Experiment Name: At_42deg_Heat_cDNA_P Parameter: Temperature (deg C) Value: 42 vs. 22
  misc_feature: MA Experiment 20000144 PARAMETER Experiment Name: At_42deg_Heat_cDNA_P Parameter: Timepoint (hr) Value: 1
  misc_feature: MA Experiment 20000144 PARAMETER Experiment Name: At_42deg_Heat_cDNA_P Parameter: Tissue Value: Aerial
  misc_feature: MA Experiment ID: 20000171 Result: Up-regulated in Transcription
  misc_feature: MA Experiment 20000171 PARAMETER Experiment Name: At_42deg_Heat_P Parameter: Age (day) Value: 14
  misc_feature: MA Experiment 20000171 PARAMETER Experiment Name: At_42deg_Heat_P Parameter: Organism Value: A. thaliana
  misc_feature: MA Experiment 20000171 PARAMETER Experiment Name: At_42deg_Heat_P Parameter: Plant Line Value: WS
  misc_feature: MA Experiment 20000171 PARAMETER Experiment Name: At_42deg_Heat_P Parameter: Temperature (deg C) Value: 42 vs. 22
  misc_feature: MA Experiment 20000171 PARAMETER Experiment Name: At_42deg_Heat_P Parameter: Timepoint (hr) Value: 1
  misc_feature: MA Experiment 20000171 PARAMETER Experiment Name: At_42deg_Heat_P Parameter: Tissue Value: Aerial
  misc_feature: MA Experiment ID: 20000179 Result: Up-regulated in Transcription
  misc_feature: MA Experiment 20000179 PARAMETER Experiment Name: At_Germinating_Seeds_P Parameter: Age (hr) Value: 6 vs. 0
  misc_feature: MA Experiment 20000179 PARAMETER Experiment Name: At_Germinating_Seeds_P Parameter: Tissue Value: Germinating Seeds
atttttaatagactattaaaaaaacaatttcatttcatttgctctcttctccgagaaaatggcgtttggtttgatcggaagagttgttggaaccaaatcatcacgattatccacggcggcgcgattgattccggcgcgatggacatcaacaggatcagaagcacaatcgaaagcttcaaccggcggcggaggagcgagtctgaagacgtttcagatctatcgatggaatccagataatcctggaaagccagagcttcaagattacaaaatcgatctcaaggattgtggtccaatggttctagatgctttgattaagattaagaacgagatggatccatcgctcactttccgtcgctcttgccgtgaaggtatttgtggttcgtgtgctatgaacattgatggatgtaatggtcttgcttgtttaacgaagattgaatctggatctaaagagacgacgattacgccgttgccgcatatgtttgtgattaaggatttggttgtggatatgacgaatttttataatcagtataagagtattgagccgtggttgaagaggaagaatccagcatctgttcctgggaaagagattttacagagtaagaaagatagagctaagcttgatggaatgtatgaatgtattctctgtgcttgttgtagcacgtcttgccctagctattggtggaaccctgagtcttatcttggtccagctgctttgcttcatgccaacaggtggataagtgatagccgagatgagtacactaaggaaagacttgaagccattgacgatgagttcaaactgtatcgatgccacacaattctgaactgtgctcgtgcctgtccaaagggattgaacccagggaaacagatcacacacatcaagcagcttcagaaatctggttgaacaacaaatgaatcaggcagtacctaatggatttttgattctaataatctgcaagaaactccaattttggattcattcttgtattgctgtcacaactatcagaattagattattttgtggtatatcttgatgaattttttttgcctacaacaagcaataaaactctgctttttttatcatccactcattcagctttgccttaatacaaacatttggatttcgagttttgct

SEQ ID NO: 99117 - protein, 280 aa, Arabidopsis thaliana
  peptide (1)..(280): Ceres Seq. ID no. 13602215
  misc_feature (62)..(126): Pfam Name: 2Fe-2S iron-sulfur cluster binding domain Pfam Description: 2Fe-2S iron-sulfur cluster binding domain
  misc_feature (1)..(280): Homolog of NCBI NO: 15237464 NR Description: succinate dehydrogenase, iron-sulphur subunit,
  misc_feature (1)..(280): Homolog of NCBI NO: 21593098 NR Description: succinate dehydrogenase iron-protein subunit-like
  misc_feature (1)..(280): Homolog of NCBI NO: 12049600 NR Description: mitochondrial succinate dehydrogenase
  misc_feature (1)..(278): Homolog of NCBI NO: 15232149 NR Description: succinate dehydrogenase, iron-sulphur subunit,
  misc_feature (1)..(278): Homolog of NCBI NO: 12049598 NR Description: mitochondrial succinate dehydrogenase
  misc_feature (1)..(278): Homolog of NCBI NO: 21555840 NR Description: succinate dehydrogenase iron-protein subunit,
  misc_feature (16)..(277): Homolog of NCBI NO: 5688947 NR Description: succinate dehydrogenase iron-protein subunit
  misc_feature (16)..(277): Homolog of NCBI NO: 28611029 NR Description: succinate dehydrogenase [Triticum aestivum]
  misc_feature (1)..(277): Homolog of NCBI NO: 4803711 NR Description: iron sulfur subunit of succinate dehydrogenase
  misc_feature (49)..(276): Homolog of NCBI NO: 23508823 NR Description: iron-sulfur subunit of succinate dehydrogenase
MAFGLIGRVVGTKSSRLSTAARLIPARWTSTGSEAQSKASTGGGGASLKTFQIYRWNPDNPGKPELQDYKIDLKDCGPMVLDALIKIKNEMDPSLTFRRSCREGICGSCAMNIDGCNGLACLTKIESGSKETTITPLPHMFVIKDLVVDMTNFYNQYKSIEPWLKRKNPASVPGKEILQSKKDRAKLDGMYECILCACCSTSCPSYWWNPESYLGPAALLHANRWISDSRDEYTKERLEAIDDEFKLYRCHTILNCARACPKGLNPGKQITHIKQLQKSG

SEQ ID NO: 99118 - protein, 202 aa, Arabidopsis thaliana; identical to SEQ ID NO: 23324
  peptide (1)..(202): Ceres Seq. ID no. 13602216
  misc_feature (1)..(48): Pfam Name: 2Fe-2S iron-sulfur cluster binding domain Pfam Description: 2Fe-2S iron-sulfur cluster binding domain
  misc_feature (1)..(202): Homolog of NCBI NO: 15237464 NR Description: succinate dehydrogenase, iron-sulphur subunit,
  misc_feature (1)..(202): Homolog of NCBI NO: 21593098 NR Description: succinate dehydrogenase iron-protein subunit-like
  misc_feature (1)..(202): Homolog of NCBI NO: 12049600 NR Description: mitochondrial succinate dehydrogenase
  misc_feature (1)..(200): Homolog of NCBI NO: 15232149 NR Description: succinate dehydrogenase, iron-sulphur subunit,
  misc_feature (1)..(200): Homolog of NCBI NO: 12049598 NR Description: mitochondrial succinate dehydrogenase
  misc_feature (1)..(200): Homolog of NCBI NO: 21555840 NR Description: succinate dehydrogenase iron-protein subunit,
  misc_feature (1)..(199): Homolog of NCBI NO: 5688947 NR Description: succinate dehydrogenase iron-protein subunit
  misc_feature (1)..(199): Homolog of NCBI NO: 28611029 NR Description: succinate dehydrogenase [Triticum aestivum]
  misc_feature (1)..(199): Homolog of NCBI NO: 4803711 NR Description: iron sulfur subunit of succinate dehydrogenase
  misc_feature (1)..(198): Homolog of NCBI NO: 23508823 NR Description: iron-sulfur subunit of succinate dehydrogenase

SEQ ID NO: 99119 - protein, 190 aa, Arabidopsis thaliana
  peptide (1)..(190): Ceres Seq. ID no. 13602217
  misc_feature (1)..(190): Homolog of NCBI NO: 15237464 NR Description: succinate dehydrogenase, iron-sulphur subunit,
  misc_feature (1)..(190): Homolog of NCBI NO: 21593098 NR Description: succinate dehydrogenase iron-protein subunit-like
  misc_feature (1)..(190): Homolog of NCBI NO: 12049600 NR Description: mitochondrial succinate dehydrogenase
  misc_feature (1)..(188): Homolog of NCBI NO: 15232149 NR Description: succinate dehydrogenase, iron-sulphur subunit,
  misc_feature (1)..(188): Homolog of NCBI NO: 12049598 NR Description: mitochondrial succinate dehydrogenase
  misc_feature (1)..(188): Homolog of NCBI NO: 21555840 NR Description: succinate dehydrogenase iron-protein subunit,
  misc_feature (1)..(187): Homolog of NCBI NO: 5688947 NR Description: succinate dehydrogenase iron-protein subunit
  misc_feature (1)..(187): Homolog of NCBI NO: 28611029 NR Description: succinate dehydrogenase [Triticum aestivum]
  misc_feature (1)..(187): Homolog of NCBI NO: 4803711 NR Description: iron sulfur subunit of succinate dehydrogenase
  misc_feature (1)..(186): Homolog of NCBI NO: 23508823 NR Description: iron-sulfur subunit of succinate dehydrogenase
MDPSLTFRRSCREGICGSCAMNIDGCNGLACLTKIESGSKETTITPLPHMFVIKDLVVDMTNFYNQYKSIEPWLKRKNPASVPGKEILQSKKDRAKLDGMYECILCACCSTSCPSYWWNPESYLGPAALLHANRWISDSRDEYTKERLEAIDDEFKLYRCHTILNCARACPKGLNPGKQITHIKQLQKSG

SEQ ID NO: 99120 - DNA, 2547 bp, Arabidopsis thaliana
  misc_feature (1)..(2547): Ceres Seq. ID no. 13602236
  misc_feature: MA Experiment ID: 20000169 Result: Up-regulated in Transcription
  misc_feature: MA Experiment 20000169 PARAMETER Experiment Name: At_100uM_ABA_P Parameter: Age (day) Value: 14
  misc_feature: MA Experiment 20000169 PARAMETER Experiment Name: At_100uM_ABA_P Parameter: Organism Value: A. thaliana
  misc_feature: MA Experiment 20000169 PARAMETER Experiment Name: At_100uM_ABA_P Parameter: Plant Line Value: WS
  misc_feature: MA Experiment 20000169 PARAMETER Experiment Name: At_100uM_ABA_P Parameter: Timepoint (hr) Value: 6
  misc_feature: MA Experiment 20000169 PARAMETER Experiment Name: At_100uM_ABA_P Parameter: Tissue Value: Aerial
  misc_feature: MA Experiment 20000169 PARAMETER Experiment Name: At_100uM_ABA_P Parameter: Treatment Value: 100uM ABA vs. No Treatment
  misc_feature: MA Experiment ID: 20000267 Result: Up-regulated in Transcription
  misc_feature: MA Experiment 20000267 PARAMETER Experiment Name: At_Drought_P Parameter: Age (day) Value: 7
  misc_feature: MA Experiment 20000267 PARAMETER Experiment Name: At_Drought_P Parameter: Organism Value: A. thaliana
  misc_feature: MA Experiment 20000267 PARAMETER Experiment Name: At_Drought_P Parameter: Plant Line Value: WS
  misc_feature: MA Experiment 20000267 PARAMETER Experiment Name: At_Drought_P Parameter: Timepoint (hr) Value: 6
  misc_feature: MA Experiment 20000267 PARAMETER Experiment Name: At_Drought_P Parameter: Tissue Value: Whole Plant
  misc_feature: MA Experiment 20000267 PARAMETER Experiment Name: At_Drought_P Parameter: Treatment Value: Drought vs. No Drought
  misc_feature: MA Experiment ID: 20000436 Result: Up-regulated in Transcription
  misc_feature: MA Experiment 20000436 PARAMETER Experiment Name: At_Drought_P Parameter: Age (day) Value: 7
  misc_feature: MA Experiment 20000436 PARAMETER Experiment Name: At_Drought_P Parameter: Organism Value: A. thaliana
  misc_feature: MA Experiment 20000436 PARAMETER Experiment Name: At_Drought_P Parameter: Plant Line Value: WS
  misc_feature: MA Experiment 20000436 PARAMETER Experiment Name: At_Drought_P Parameter: Timepoint (hr) Value: 12
  misc_feature: MA Experiment 20000436 PARAMETER Experiment Name: At_Drought_P Parameter: Tissue Value: Whole Plant
  misc_feature: MA Experiment 20000436 PARAMETER Experiment Name: At_Drought_P Parameter: Treatment Value: Drought vs. No Drought
  misc_feature: MA Experiment ID: 20000437 Result: Up-regulated in Transcription
  misc_feature: MA Experiment 20000437 PARAMETER Experiment Name: At_Drought_P Parameter: Age (day) Value: 8
  misc_feature: MA Experiment 20000437 PARAMETER Experiment Name: At_Drought_P Parameter: Organism Value: A. thaliana
  misc_feature: MA Experiment 20000437 PARAMETER Experiment Name: At_Drought_P Parameter: Plant Line Value: WS
  misc_feature: MA Experiment 20000437 PARAMETER Experiment Name: At_Drought_P Parameter: Timepoint (hr) Value: 24
  misc_feature: MA Experiment 20000437 PARAMETER Experiment Name: At_Drought_P Parameter: Tissue Value: Whole Plant
  misc_feature: MA Experiment 20000437 PARAMETER Experiment Name: At_Drought_P Parameter: Treatment Value: Drought vs. No Drought
  misc_feature: MA Experiment ID: 20000438 Result: Down-regulated in Transcription
  misc_feature: MA Experiment 20000438 PARAMETER Experiment Name: At_Shoots__P Parameter: Age (day) Value: 14
  misc_feature: MA Experiment 20000438 PARAMETER Experiment Name: At_Shoots__P Parameter: Tissue Value: Shoots vs. Whole Plant
  misc_feature: MA Experiment ID: 20000439 Result: Up-regulated in Transcription
  misc_feature: MA Experiment 20000439 PARAMETER Experiment Name: At_Roots__P Parameter: Age (day) Value: 14 vs. 21
  misc_feature: MA Experiment 20000439 PARAMETER Experiment Name: At_Roots__P Parameter: Organism Value: A. thaliana
  misc_feature: MA Experiment 20000439 PARAMETER Experiment Name: At_Roots__P Parameter: Tissue Value: Roots vs. Whole Plant
  misc_feature: MA Experiment ID: 20000441 Result: Down-regulated in Transcription
  misc_feature: MA Experiment 20000441 PARAMETER Experiment Name: At_1uM_BR-BRZ__P Parameter: Tissue Value: Shoot Apices
  misc_feature: MA Experiment 20000441 PARAMETER Experiment Name: At_1uM_BR-BRZ__P Parameter: Treatment Value: 1uM BR vs. No Treatment
  misc_feature: MA Experiment ID: 20000443 Result: Down-regulated in Transcription
  misc_feature: MA Experiment 20000443 PARAMETER Experiment Name: At_1uM_BR-BRZ__P Parameter: Tissue Value: Shoot Apices
  misc_feature: MA Experiment 20000443 PARAMETER Experiment Name: At_1uM_BR-BRZ__P Parameter: Treatment Value: 1uM BRZ vs. No Treatment
  misc_feature: MA Experiment ID: 20000453 Result: Up-regulated in Transcription
  misc_feature: MA Experiment 20000453 PARAMETER Experiment Name: At_100uM_ABA_P Parameter: Age (day) Value: 15
  misc_feature: MA Experiment 20000453 PARAMETER Experiment Name: At_100uM_ABA_P Parameter: Organism Value: A. thaliana
  misc_feature: MA Experiment 20000453 PARAMETER Experiment Name: At_100uM_ABA_P Parameter: Plant Line Value: WS
  misc_feature: MA Experiment 20000453 PARAMETER Experiment Name: At_100uM_ABA_P Parameter: Timepoint (hr) Value: 24
  misc_feature: MA Experiment 20000453 PARAMETER Experiment Name: At_100uM_ABA_P Parameter: Tissue Value: Aerial
  misc_feature: MA Experiment 20000453 PARAMETER Experiment Name: At_100uM_ABA_P Parameter: Treatment Value: 100uM ABA vs. No Treatment
  misc_feature: MA Experiment ID: 20000794 Result: Up-regulated in Transcription
  misc_feature: MA Experiment 20000794 PARAMETER Experiment Name: At_Petals_P Parameter: Age (day) Value: 23-25 days
  misc_feature: MA Experiment 20000794 PARAMETER Experiment Name: At_Petals_P Parameter: Plant Line Value: WS
  misc_feature: MA Experiment 20000794 PARAMETER Experiment Name: At_Petals_P Parameter: Tissue Value: Petals vs. Whole plant
  misc_feature: MA Experiment ID: 20001554 Result: Up-regulated in Transcription
  misc_feature: MA Experiment 20001554 PARAMETER Experiment Name: At_Drought_Soil_Dry_P Parameter: Age (day) Value: 21
  misc_feature: MA Experiment 20001554 PARAMETER Experiment Name: At_Drought_Soil_Dry_P Parameter: Organism Value: A. thaliana
  misc_feature: MA Experiment 20001554 PARAMETER Experiment Name: At_Drought_Soil_Dry_P Parameter: Plant Line Value: WS
  misc_feature: MA Experiment 20001554 PARAMETER Experiment Name: At_Drought_Soil_Dry_P Parameter: Post Timepoint (hr) Value: None
  misc_feature: MA Experiment 20001554 PARAMETER Experiment Name: At_Drought_Soil_Dry_P Parameter: Post-Treatment Value: None
  misc_feature: MA Experiment 20001554 PARAMETER Experiment Name: At_Drought_Soil_Dry_P Parameter: Timepoint (day) Value: 7
  misc_feature: MA Experiment 20001554 PARAMETER Experiment Name: At_Drought_Soil_Dry_P Parameter: Treatment Value: Drought vs. No Drought
  misc_feature: MA Experiment ID: 20001556 Result: Up-regulated in Transcription
  misc_feature: MA Experiment 20001556 PARAMETER Experiment Name: At_Drought_Soil_Dry_P Parameter: Age (day) Value: 26
  misc_feature: MA Experiment 20001556 PARAMETER Experiment Name: At_Drought_Soil_Dry_P Parameter: Organism Value: A. thaliana
  misc_feature: MA Experiment 20001556 PARAMETER Experiment Name: At_Drought_Soil_Dry_P Parameter: Plant Line Value: WS
  misc_feature: MA Experiment 20001556 PARAMETER Experiment Name: At_Drought_Soil_Dry_P Parameter: Post Timepoint (hr) Value: None
  misc_feature: MA Experiment 20001556 PARAMETER Experiment Name: At_Drought_Soil_Dry_P Parameter: Post-Treatment Value: None
  misc_feature: MA Experiment 20001556 PARAMETER Experiment Name: At_Drought_Soil_Dry_P Parameter: Timepoint (day) Value: 12
  misc_feature: MA Experiment 20001556 PARAMETER Experiment Name: At_Drought_Soil_Dry_P Parameter: Treatment Value: Drought vs. No Drought
  misc_feature: MA Experiment ID: 20001904 Result: Up-regulated in Transcription
  misc_feature: MA Experiment 20001904 PARAMETER Experiment Name: At_Drought_Reproduction_P Parameter: Age (day) Value: 37
  misc_feature: MA Experiment 20001904 PARAMETER Experiment Name: At_Drought_Reproduction_P Parameter: Organism Value: A. thaliana
  misc_feature: MA Experiment 20001904 PARAMETER Experiment Name: At_Drought_Reproduction_P Parameter: Plant Line Value: WS
  misc_feature: MA Experiment 20001904 PARAMETER Experiment Name: At_Drought_Reproduction_P Parameter: Timepoint (day) Value: 7
  misc_feature: MA Experiment 20001904 PARAMETER Experiment Name: At_Drought_Reproduction_P Parameter: Tissue Value: Rosettes
  misc_feature: MA Experiment 20001904 PARAMETER Experiment Name: At_Drought_Reproduction_P Parameter: Treatment Value: Drought vs. No Drought
  misc_feature: MA Experiment ID: 20001906 Result: Up-regulated in Transcription
  misc_feature: MA Experiment 20001906 PARAMETER Experiment Name: At_Drought_Reproduction_P Parameter: Age (day) Value: 35
  misc_feature: MA Experiment 20001906 PARAMETER Experiment Name: At_Drought_Reproduction_P Parameter: Organism Value: A. thaliana
  misc_feature: MA Experiment 20001906 PARAMETER Experiment Name: At_Drought_Reproduction_P Parameter: Plant Line Value: WS
  misc_feature: MA Experiment 20001906 PARAMETER Experiment Name: At_Drought_Reproduction_P Parameter: Timepoint (day) Value: 5
  misc_feature: MA Experiment 20001906 PARAMETER Experiment Name: At_Drought_Reproduction_P Parameter: Tissue Value: Siliques
  misc_feature: MA Experiment 20001906 PARAMETER Experiment Name: At_Drought_Reproduction_P Parameter: Treatment Value: Drought vs. No Drought
atttaaccgattcttgaaaacatgggacgtctccggagacggcaagagataatagatcatgaagaagaggaatcaaacgacgacgtttcatcaagaagaggaaaactcagtttagccgagacgtttcggtggcttgattcatcagagcatcggagaattgaaaccgatggtcataatgattataaatacatcattcatcccaaaaacaggtggtacaaggcatgggaaatgtttatattggtgtgggcaatatactcctcattgttcactcccatggagtttggtttcttccgcggtctgcctgagagactctttgtacttgacattgttggtcagatcgcgttcttggtcgatattgttcttcagttctttgttgcctatcgcgatactcagacctaccggactgtctacaaaccaacacgtattgctttccggtacttgaagtcgcattttctcatggatttcatcggttgcttcccttgggatcttatttataaggcatcagggaaacatgagttggtgaggtacttgttgtggataaggctatttcgggttcgcaaagtggttgagtttttccaaaggcttgagaaagacacaagaatcaactatctattcactagaatcttaaagctcttgttcgttgaagtttattgtactcacactgctgcttgtatcttctattacttggccaccactcttcctccagaaaacgaaggttacacttggatcggtagcttgaagctaggagactatagctacgagaatttccgagaaatcgatctctggaaacgttatactaccgctctatacttcgccattgtcactatggcaactgtcggttatggagacattcacgcggtgaatctgagggaaatgatattcgtgatgatatatgtttcgtttgatatggttctcggtgcttaccttattggtaacatcactgccttgattgtgaaaggttcaaacacagagaggttcagagataaaatgaatgatctcataagtttcatgaaccgcaaaaaactcgggagagaccttcgtagccagataactggtcatgttagattgcagtacgacagtcactacaccgacactgtcatgcttcaggacatcccagcatcaatccgcgccaagattgcgcaattattgtatctgccttacatcaaaaaagttcctctcttcaaaggctgctccacagagtttattaatcaaatagttataaggctccatgaagagtattttcttccaggagaagtaataacagagcaaggaaacgtcgtggatcatttgtatttcgtctgtgaaggcttactggaggctcttgttacaaaaacagatggatcagaagagagtgtgacgttacttgggcctcacacttcttttggagacatctccatcatttgcaacatttctcaacctttcactgttagggtttgtgagctatgccatcttttacgactcgataaacagtctttctcaaacatcctcgagatttattttcacgacggacgcacaatcttgaacaatattatggaggagaaggaatcaaatgataggataaagaagctagaatctgacatagtgattcacattgggaaacaagaagcagaacttgcattgaaagtaaacagtgcagctttccaaggagatttttaccagcttaagagcttaatccgatctggagccgatcctaacaaaaccgattacgatggaagatcaccgcttcatcttgcagcatgtagaggctatgaagacattacattattccttattcaggaaggtgttgatgtcaatctaaaagataagttcggacacacaccattgtttgaggctgtgaaagcaggacaagaaggagtgattggtttgcttgtcaaagaaggagcctcctttaatttagaagattcaggaaacttcctttgcacgacagttgctaaaggcgactctgattttctcaagagattgctttcaagcggtatgaacccaaacagtgaagattatgatcacagaacgccgcttcatgtcgcggcttctgaagggttattcttgatggctaaaatgttggttgaagctggagcaagcgttatttctaaagaccgatgggggaattctccgcttgatgaagcccgattgtgcggaaacaagaaactgattaagttactcgaagatgtgaaaaatgctcagtcgtctatctacccgtcaagcttgcgtgaattacaagaggagagaattgagagacggaaatgcacggtgtttccattccacccgcaagaggcgaaagaagagcgtagtagaaagcacggagttgtggtttggatcccaagcaatctcgagaaactcatagtaaccgctgcgaaagagctagggctatcggatggagcctcatttgtactattatcagaagaccaaggtcgtatcacagacattgatatgattagtgatggacacaaattgtatatgatcagtgatactactgatcaaacataatgatggactcttcgatttttccgatgattcatttgaggtttttatattctagagcattttgac

SEQ ID NO: 99121 - protein, 820 aa, Arabidopsis thaliana
  peptide (1)..(820): Ceres Seq. ID no. 13602237
  misc_feature (96)..(306): Pfam Name: Ion transport protein Pfam Description: Ion transport protein
  misc_feature (9)..(816): Homolog of NCBI NO: 15232991 NR Description: stelar K+ outward rectifier (potassium [Arabidopsis thaliana] >gi|6728977|gb|AAF26975.1|AC018363_20
  misc_feature (9)..(816): Homolog of NCBI NO: 3810676 NR Description: SKOR [Arabidopsis thaliana]
  misc_feature (9)..(816): Homolog of NCBI NO: 25295800 NR Description: potassium channel protein SKOR [validated] - thaliana >gi|3641845|emb|CAA11281.1| stelar K+ outward rectifying
  misc_feature (51)..(818): Homolog of NCBI NO: 27651624 NR Description: shaker-like potassium channel [Vitis vinifera]
  misc_feature (12)..(809): Homolog of NCBI NO: 10443349 NR Description: outwardly rectifying potassium channel [Samanea
  misc_feature (56)..(815): Homolog of NCBI NO: 9955728 NR Description: outward rectifying potassium channel [Populus
  misc_feature (57)..(722): Homolog of NCBI NO: 38344540 NR Description: OSJNBa0027P08.8 [Oryza sativa (japonica
  misc_feature (504)..(820): Homolog of NCBI NO: 15146306 NR Description: AT5g37500/mpa22_p_30 [Arabidopsis thaliana]
  misc_feature (55)..(714): Homolog of NCBI NO: 7445895 NR Description: potassium channel protein SKT1 - potato
  misc_feature (55)..(714): Homolog of NCBI NO: 8980432 NR Description: potassium channel [Lycopersicon esculentum]
MGRLRRRQEIIDHEEEESNDDVSSRRGKLSLAETFRWLDSSEHRRIETDGHNDYKYIIHPKNRWYKAWEMFILVWAIYSSLFTPMEFGFFRGLPERLFVLDIVGQIAFLVDIVLQFFVAYRDTQTYRTVYKPTRIAFRYLKSHFLMDFIGCFPWDLIYKASGKHELVRYLLWIRLFRVRKVVEFFQRLEKDTRINYLFTRILKLLFVEVYCTHTAACIFYYLATTLPPENEGYTWIGSLKLGDYSYENFREIDLWKRYTTALYFAIVTMATVGYGDIHAVNLREMIFVMIYVSFDMVLGAYLIGNITALIVKGSNTERFRDKMNDLISFMNRKKLGRDLRSQITGHVRLQYDSHYTDTVMLQDIPASIRAKIAQLLYLPYIKKVPLFKGCSTEFINQIVIRLHEEYFLPGEVITEQGNVVDHLYFVCEGLLEALVTKTDGSEESVTLLGPHTSFGDISIICNISQPFTVRVCELCHLLRLDKQSFSNILEIYFHDGRTILNNIMEEKESNDRIKKLESDIVIHIGKQEAELALKVNSAAFQGDFYQLKSLIRSGADPNKTDYDGRSPLHLAACRGYEDITLFLIQEGVDVNLKDKFGHTPLFEAVKAGQEGVIGLLVKEGASFNLEDSGNFLCTTVAKGDSDFLKRLLSSGMNPNSEDYDHRTPLHVAASEGLFLMAKMLVEAGASVISKDRWGNSPLDEARLCGNKKLIKLLEDVKNAQSSIYPSSLRELQEERIERRKCTVFPFHPQEAKEERSRKHGVVVWIPSNLEKLIVTAAKELGLSDGASFVLLSEDQGRITDIDMISDGHKLYMISDTTDQT

SEQ ID NO: 99122 - protein, 751 aa, Arabidopsis thaliana
  peptide (1)..(751): Ceres Seq. ID no. 13602238
  misc_feature (27)..(237): Pfam Name: Ion transport protein Pfam Description: Ion transport protein
  misc_feature (1)..(747): Homolog of NCBI NO: 15232991 NR Description: stelar K+ outward rectifier (potassium [Arabidopsis thaliana] >gi|6728977|gb|AAF26975.1|AC018363_20
  misc_feature (1)..(747): Homolog of NCBI NO: 3810676 NR Description: SKOR [Arabidopsis thaliana]
  misc_feature (1)..(747): Homolog of NCBI NO: 25295800 NR Description: potassium channel protein SKOR [validated] - thaliana >gi|3641845|emb|CAA11281.1| stelar K+ outward rectifying
  misc_feature (1)..(749): Homolog of NCBI NO: 27651624 NR Description: shaker-like potassium channel [Vitis vinifera]
  misc_feature (1)..(740): Homolog of NCBI NO: 10443349 NR Description: outwardly rectifying potassium channel [Samanea
  misc_feature (1)..(746): Homolog of NCBI NO: 9955728 NR Description: outward rectifying potassium channel [Populus
  misc_feature (1)..(653): Homolog of NCBI NO: 38344540 NR Description: OSJNBa0027P08.8 [Oryza sativa (japonica
  misc_feature (435)..(751): Homolog of NCBI NO: 15146306 NR Description: AT5g37500/mpa22_p_30 [Arabidopsis thaliana]
  misc_feature (1)..(645): Homolog of NCBI NO: 7445895 NR Description: potassium channel protein SKT1 - potato
  misc_feature (1)..(645): Homolog of NCBI NO: 8980432 NR Description: potassium channel [Lycopersicon esculentum]
MFILVWAIYSSLFTPMEFGFFRGLPERLFVLDIVGQIAFLVDIVLQFFVAYRDTQTYRTVYKPTRIAFRYLKSHFLMDFIGCFPWDLIYKASGKHELVRYLLWIRLFRVRKVVEFFQRLEKDTRINYLFTRILKLLFVEVYCTHTAACIFYYLATTLPPENEGYTWIGSLKLGDYSYENFREIDLWKRYTTALYFAIVTMATVGYGDIHAVNLREMIFVMIYVSFDMVLGAYLIGNITALIVKGSNTERFRDKMNDLISFMNRKKLGRDLRSQITGHVRLQYDSHYTDTVMLQDIPASIRAKIAQLLYLPYIKKVPLFKGCSTEFINQIVIRLHEEYFLPGEVITEQGNVVDHLYFVCEGLLEALVTKTDGSEESVTLLGPHTSFGDISIICNISQPFTVRVCELCHLLRLDKQSFSNILEIYFHDGRTILNNIMEEKESNDRIKKLESDIVIHIGKQEAELALKVNSAAFQGDFYQLKSLIRSGADPNKTDYDGRSPLHLAACRGYEDITLFLIQEGVDVNLKDKFGHTPLFEAVKAGQEGVIGLLVKEGASFNLEDSGNFLCTTVAKGDSDFLKRLLSSGMNPNSEDYDHRTPLHVAASEGLFLMAKMLVEAGASVISKDRWGNSPLDEARLCGNKKLIKLLEDVKNAQSSIYPSSLRELQEERIERRKCTVFPFHPQEAKEERSRKHGVVVWIPSNLEKLIVTAAKELGLSDGASFVLLSEDQGRITDIDMISDGHKLYMISDTTDQT

SEQ ID NO: 99123 - protein, 736 aa, Arabidopsis thaliana
  peptide (1)..(736): Ceres Seq. ID no. 13602239
  misc_feature (12)..(222): Pfam Name: Ion transport protein Pfam Description: Ion transport protein
  misc_feature (1)..(732): Homolog of NCBI NO: 15232991 NR Description: stelar K+ outward rectifier (potassium [Arabidopsis thaliana] >gi|6728977|gb|AAF26975.1|AC018363_20
  misc_feature (1)..(732): Homolog of NCBI NO: 3810676 NR Description: SKOR [Arabidopsis thaliana]
  misc_feature (1)..(732): Homolog of NCBI NO: 25295800 NR Description: potassium channel protein SKOR [validated] - thaliana >gi|3641845|emb|CAA11281.1| stelar K+ outward rectifying
  misc_feature (1)..(734): Homolog of NCBI NO: 27651624 NR Description: shaker-like potassium channel [Vitis vinifera]
  misc_feature (1)..(725): Homolog of NCBI NO: 10443349 NR Description: outwardly rectifying potassium channel [Samanea
  misc_feature (1)..(731): Homolog of NCBI NO: 9955728 NR Description: outward rectifying potassium channel [Populus
  misc_feature (1)..(638): Homolog of NCBI NO: 38344540 NR Description: OSJNBa0027P08.8 [Oryza sativa (japonica
  misc_feature (420)..(736): Homolog of NCBI NO: 15146306 NR Description: AT5g37500/mpa22_p_30 [Arabidopsis thaliana]
  misc_feature (1)..(630): Homolog of NCBI NO: 7445895 NR Description: potassium channel protein SKT1 - potato
  misc_feature (1)..(630): Homolog of NCBI NO: 8980432 NR Description: potassium channel [Lycopersicon esculentum]
MEFGFFRGLPERLFVLDIVGQIAFLVDIVLQFFVAYRDTQTYRTVYKPTRIAFRYLKSHFLMDFIGCFPWDLIYKASGKHELVRYLLWIRLFRVRKVVEFFQRLEKDTRINYLFTRILKLLFVEVYCTHTAACIFYYLATTLPPENEGYTWIGSLKLGDYSYENFREIDLWKRYTTALYFAIVTMATVGYGDIHAVNLREMIFVMIYVSFDMVLGAYLIGNITALIVKGSNTERFRDKMNDLISFMNRKKLGRDLRSQITGHVRLQYDSHYTDTVMLQDIPASIRAKIAQLLYLPYIKKVPLFKGCSTEFINQIVIRLHEEYFLPGEVITEQGNVVDHLYFVCEGLLEALVTKTDGSEESVTLLGPHTSFGDISIICNISQPFTVRVCELCHLLRLDKQSFSNILEIYFHDGRTILNNIMEEKESNDRIKKLESDIVIHIGKQEAELALKVNSAAFQGDFYQLKSLIRSGADPNKTDYDGRSPLHLAACRGYEDITLFLIQEGVDVNLKDKFGHTPLFEAVKAGQEGVIGLLVKEGASFNLEDSGNFLCTTVAKGDSDFLKRLLSSGMNPNSEDYDHRTPLHVAASEGLFLMAKMLVEAGASVISKDRWGNSPLDEARLCGNKKLIKLLEDVKNAQSSIYPSSLRELQEERIERRKCTVFPFHPQEAKEERSRKHGVVVWIPSNLEKLIVTAAKELGLSDGASFVLLSEDQGRITDIDMISDGHKLYMISDTTDQT

SEQ ID NO: 99124 - DNA, 918 bp, Arabidopsis thaliana
  misc_feature (1)..(918): Ceres Seq. ID no. 13602255
  misc_feature: MA Experiment ID: 108434 Result: Up-regulated in Transcription
  misc_feature: MA Experiment 108434 PARAMETER Experiment Name: At_Root_Tips_cDNA_P Parameter: Tissue Value: Root Tips
  misc_feature: MA Experiment ID: 108461 Result: Down-regulated in Transcription
  misc_feature: MA Experiment 108461 PARAMETER Experiment Name: At_Germinating_Seeds_cDNA_P Parameter: Age (day) Value: 1 vs. 0
  misc_feature: MA Experiment 108461 PARAMETER Experiment Name: At_Germinating_Seeds_cDNA_P Parameter: Tissue Value: Germinating Seeds
  misc_feature: MA Experiment ID: 108462 Result: Down-regulated in Transcription
  misc_feature: MA Experiment 108462 PARAMETER Experiment Name: At_Germinating_Seeds_cDNA_P Parameter: Age (day) Value: 2 vs. 0
  misc_feature: MA Experiment 108462 PARAMETER Experiment Name: At_Germinating_Seeds_cDNA_P Parameter: Tissue Value: Germinating Seeds
  misc_feature: MA Experiment ID: 108463 Result: Down-regulated in Transcription
  misc_feature: MA Experiment 108463 PARAMETER Experiment Name: At_Germinating_Seeds_cDNA_P Parameter: Age (day) Value: 3 vs. 0
  misc_feature: MA Experiment 108463 PARAMETER Experiment Name: At_Germinating_Seeds_cDNA_P Parameter: Tissue Value: Germinating Seeds
  misc_feature: MA Experiment ID: 108464 Result: Down-regulated in Transcription
  misc_feature: MA Experiment 108464 PARAMETER Experiment Name: At_Germinating_Seeds_cDNA_P Parameter: Age (day) Value: 4 vs. 0
  misc_feature: MA Experiment 108464 PARAMETER Experiment Name: At_Germinating_Seeds_cDNA_P Parameter: Tissue Value: Germinating Seeds
  misc_feature: MA Experiment ID: 20000180 Result: Down-regulated in Transcription
  misc_feature: MA Experiment 20000180 PARAMETER Experiment Name: At_Germinating_Seeds_P Parameter: Age (hr) Value: 24 vs. 0
  misc_feature: MA Experiment 20000180 PARAMETER Experiment Name: At_Germinating_Seeds_P Parameter: Tissue Value: Germinating Seeds
aacattcatttggaggaggagacctgaatctttgcaatctcgcaacagaaacggcgatgggaagatcagctctgattcacttgcttcgctcccaatcccgacgtctctcttcctccaccttcacttcaggatatcatcaccggtcaatagcaggatcatggtcatcatcagtgaacccgaaggtcagattccaggttccatcccttagccagagaagctgggcatcatttggagcaaagactagagaggacgatgatgagcacaagatcagcatcggaccccaagagaagaaagaagagaaggatggaggtgtggtttactatggaccaatctcatcaaccataaagaaagtgaaactcctctcactctccacttgctgtctatcagtctctcttggcccggtcatcactttcatgacttccccgggactgaatgtgatcatgaaaggtgctgttgcctctactgtgatcttccttagcgcatccacaaccgctgctctccactggtttgttagtccctacgtgcacaagctgaggtggcagcctggttcagacacttttgaggtcgagatgatgacttggctcggcacatttagcgcaaagacactgaaattctcagacatacgttatccagacacgcaaagaccgtatgtgagcttcaaggctgatgggaatttctactttgtggatgcagatcattgccctaacaaggcattgttggctaggctcactcctccaaaggatgctcatgactctgctttcaagaacttgtaatccaaattcgtttcttttgttatactctttttttgggtgtggatttttgttgggtttgtaagctctttaagatacttggatacctcctccccttctcatcactaatacccaaaaaaatgcaaataagaaaagaccggtttgatcc

SEQ ID NO: 99125 - protein, 256 aa, Arabidopsis thaliana; identical to SEQ ID NO: 35330
  peptide (1)..(256): Ceres Seq. ID no. 13602256
  misc_feature (19)..(256): Homolog of NCBI NO: 18403955 NR Description: expressed protein [Arabidopsis thaliana]
  misc_feature (69)..(256): Homolog of NCBI NO: 29126334 NR Description: unknown protein [Oryza sativa (japonica

SEQ ID NO: 99126 - protein, 238 aa, Arabidopsis thaliana; identical to SEQ ID NO: 35331
  peptide (1)..(238): Ceres Seq. ID no. 13602257
  misc_feature (1)..(238): Homolog of NCBI NO: 18403955 NR Description: expressed protein [Arabidopsis thaliana]
  misc_feature (51)..(238): Homolog of NCBI NO: 29126334 NR Description: unknown protein [Oryza sativa (japonica

SEQ ID NO: 99127 - DNA, 889 bp, Arabidopsis thaliana
  misc_feature (1)..(889): Ceres Seq. ID no. 13602258
gtttcacgaacaaagaggcctgagtataaaaaaacaaatcggacgcttcgagtttttcttgaggaagaatccacacacacacagaagaagaatctcatcacgaattttagctatgggttggatctggattgacgattcatccgcctctaaagccggtgctgatctcaccgataaaccgctcggagattctgccgccgccgccgaaaattgctccacgaccacggtggtaagatctcagtgcaagacggaggaggtcgagcctggaaagttcgtcaggaaatgcgacaaaacagaagaaatcctccgccactgttttgggaagccctctgaagtcgttcaatccaacacagagcacacagaagaggatgtgacagaccagatggtgggaagatccgctcttccgaatcagtttgaggataaaaacccgctaaacttcccgggactccgcagagatgtagacgccatcgaacgccatttcttgagcggaatgaagagtttctttgatgcggctgaagagatgacaagcagcttatttgatatcatgggagaccatcacccaagcaccaggagaggagggatacccattgaaaaccatcccaaggtagaggagcaccgcaatgacgaaactgcccctacacgaccacactcctctggcgagattgatctctcgggcttggccaaggacgtttgagaaaggtcgtctgcttcttcttcttcttctttttttttttcacaaaggtcgtcttgttctagcttttggcatatataatcttaaaaatgtaatgtgactttctaagaagcgtggggattgtagtctaatgttagcggcttgcacgtttttccgagtgggtgctactactatctatcaatatcatcatactactatatt

SEQ ID NO: 99128 - protein, 229 aa, Arabidopsis thaliana; identical to SEQ ID NO: 37303
  peptide (1)..(229): Ceres Seq. ID no. 13602259
  misc_feature (38)..(229): Homolog of NCBI NO: 15227527 NR Description: expressed protein [Arabidopsis thaliana]
  misc_feature (38)..(113): Homolog of NCBI NO: 34909928 NR Description: P0665A11.24 [Oryza sativa (japonica

SEQ ID NO: 99129 - protein, 192 aa, Arabidopsis thaliana; identical to SEQ ID NO: 37304
  peptide (1)..(192): Ceres Seq. ID no. 13602260
  misc_feature (1)..(192): Homolog of NCBI NO: 15227527 NR Description: expressed protein [Arabidopsis thaliana]
  misc_feature (1)..(76): Homolog of NCBI NO: 34909928 NR Description: P0665A11.24 [Oryza sativa (japonica

SEQ ID NO: 99130 - DNA, 1224 bp, Arabidopsis thaliana
  misc_feature (1)..(1224): Ceres Seq. ID no. 13602265
  misc_feature: MA Experiment ID: 20000234 Result: Up-regulated in Transcription
  misc_feature: MA Experiment 20000234 PARAMETER Experiment Name: At_Siliques_P Parameter: Age (day) Value: 21
  misc_feature: MA Experiment 20000234 PARAMETER Experiment Name: At_Siliques_P Parameter: Organism Value: A. thaliana
  misc_feature: MA Experiment 20000234 PARAMETER Experiment Name: At_Siliques_P Parameter: Plant Line Value: WS
  misc_feature: MA Experiment 20000234 PARAMETER Experiment Name: At_Siliques_P Parameter: Tissue Value: Less Than 5mm Siliques vs. Whole Plant
  misc_feature: MA Experiment ID: 20000264 Result: Up-regulated in Transcription
  misc_feature: MA Experiment 20000264 PARAMETER Experiment Name: At_Open_Flower_P Parameter: Age (day) Value: 21
  misc_feature: MA Experiment 20000264 PARAMETER Experiment Name: At_Open_Flower_P Parameter: Plant Line Value: WS
  misc_feature: MA Experiment 20000264 PARAMETER Experiment Name: At_Open_Flower_P Parameter: Tissue Value: Open Flower vs. Whole Plant
  misc_feature: MA Experiment ID: 20000265 Result: Up-regulated in Transcription
  misc_feature: MA Experiment 20000265 PARAMETER Experiment Name: At_Open_Flower_P Parameter: Age (day) Value: 21
  misc_feature: MA Experiment 20000265 PARAMETER Experiment Name: At_Open_Flower_P Parameter: Plant Line Value: WS
  misc_feature: MA Experiment 20000265 PARAMETER Experiment Name: At_Open_Flower_P Parameter: Tissue Value: Closed Flower vs. Whole Plant
  misc_feature: MA Experiment ID: 20000286 Result: Up-regulated in Transcription
  misc_feature: MA Experiment 20000286 PARAMETER Experiment Name: At_Open_Flower_P Parameter: Age (day) Value: 21
  misc_feature: MA Experiment 20000286 PARAMETER Experiment Name: At_Open_Flower_P Parameter: Plant Line Value: WS
  misc_feature: MA Experiment 20000286 PARAMETER Experiment Name: At_Open_Flower_P Parameter: Tissue Value: Half Open vs. Whole Plant
  misc_feature: MA Experiment ID: 20000794 Result: Up-regulated in Transcription
  misc_feature: MA Experiment 20000794 PARAMETER Experiment Name: At_Petals_P Parameter: Age (day) Value: 23-25 days
  misc_feature: MA Experiment 20000794 PARAMETER Experiment Name: At_Petals_P Parameter: Plant Line Value: WS
  misc_feature: MA Experiment 20000794 PARAMETER Experiment Name: At_Petals_P Parameter: Tissue Value: Petals vs. Whole plant
  misc_feature: MA Experiment ID: 20001757 Result: Down-regulated in Transcription
  misc_feature: MA Experiment 20001757 PARAMETER Experiment Name: At_50mM_NH4NO3_L-to-H_P Parameter: Timepoint (hr) Value: 6
  misc_feature: MA Experiment 20001757 PARAMETER Experiment Name: At_50mM_NH4NO3_L-to-H_P Parameter: Tissue Value: Leaf
  misc_feature: MA Experiment 20001757 PARAMETER Experiment Name: At_50mM_NH4NO3_L-to-H_P Parameter: Treatment Value: 50mM NH4NO3 vs 100mM Mannitol
  misc_feature: MA Experiment ID: 20001910 Result: Up-regulated in Transcription
  misc_feature: MA Experiment 20001910 PARAMETER Experiment Name: At_Drought_Reproduction_P Parameter: Age (day) Value: 37
  misc_feature: MA Experiment 20001910 PARAMETER Experiment Name: At_Drought_Reproduction_P Parameter: Organism Value: A. thaliana
  misc_feature: MA Experiment 20001910 PARAMETER Experiment Name: At_Drought_Reproduction_P Parameter: Plant Line Value: WS
  misc_feature: MA Experiment 20001910 PARAMETER Experiment Name: At_Drought_Reproduction_P Parameter: Timepoint (day) Value: 7
  misc_feature: MA Experiment 20001910 PARAMETER Experiment Name: At_Drought_Reproduction_P Parameter: Tissue Value: Flowers
  misc_feature: MA Experiment 20001910 PARAMETER Experiment Name: At_Drought_Reproduction_P Parameter: Treatment Value: Drought vs. No Drought
gtattccaattttagaacttacgcgtcttcataatcttcctctttttttctttgtctttgatattcaaagtttttgtttattttttctttgcttaacccggagagacaccctctccataaatttagttttgatccctctgggttccttgaagaaaaaaacaccaattccattcatattcttcttcatacgttcaataattcttacgaggacgagatcttcctaacgtctttgatcttcttcattaggagataagtctaaactggtcgaagatgttgggagatttcatcatcagactccttgtattgatattagggtacacatacccagcattcgaatgctttaaaacggtggagaagaacaaagttgatatcgaggaactcagattttggtgccaatactggatacttttggcgctaatttcatcattcgagagggttggcgatttttttatctcatggttaccgttatacggagagatgaaagtagtcttcttcgtatatctctggtaccctaaaacaaagggaacgagacatgtgtatgaaacattgttgaagccatacatggctcaacacgagacagagattgacagaaagatcatggagttgcgagctcgagcttgggactttttcatcttttacttcaacaacttcgcccaggccggtcaatccaccttgatccagggttttcagtacgtactcgcccaatcggtccggttctctgccgctgcagctaaccaaccgccaacggagaggaacgtgaacatgaacgcgcagtcaccggtggagatggacaatgatcctccatcaccgcgcgctccaagaccgctgaacaaatcactatctgcgttgcgatcgctagagaagcaaacaagcagagggaggaagtggccgccaccaacaccaccaccaacaccaggccgagactccgccggaacatttaacggtgatgatggagtcaacattcctgatacaattccgggatcacccctcactgatgctcgagctaagctgcgacgttctaactccagaactcagccagcggcatagtaacgcaaacgtacatatacgtgactcgacaaagaaacccttttcgtttgtttaaagatatatagggaaagaaaagtgaatgaaagttttgaattgaaacaaaacagatttttttttttttttcatgttttctgtaaattgaagcagtaagtattaatacagcgagaatatttgtgt

SEQ ID NO: 99131 - protein, 258 aa, Arabidopsis thaliana
  peptide (1)..(258): Ceres Seq. ID no. 13602266
  misc_feature (2)..(98): Pfam Name: TB2/DP1, HVA22 family Pfam Description: TB2/DP1, HVA22 family
  misc_feature (1)..(258): Homolog of NCBI NO: 18404020 NR Description: expressed protein [Arabidopsis thaliana]
  misc_feature (1)..(258): Homolog of NCBI NO: 21537355 NR Description: unknown [Arabidopsis thaliana]
  misc_feature (1)..(258): Homolog of NCBI NO: 26451594 NR Description: unknown protein [Arabidopsis thaliana]
  misc_feature (98)..(258): Homolog of NCBI NO: 25408438 NR Description: hypothetical protein At2g36020 [imported] -
  misc_feature (1)..(222): Homolog of NCBI NO: 21553813 NR Description: unknown [Arabidopsis thaliana]
  misc_feature (1)..(222): Homolog of NCBI NO: 18422223 NR Description: expressed protein [Arabidopsis thaliana]
  misc_feature (9)..(222): Homolog of NCBI NO: 9759014 NR Description: gene_id:K16E1.3~unknown protein [Arabidopsis
  misc_feature (1)..(151): Homolog of NCBI NO: 21671921 NR Description: Putative protein with HVA22 domain [Oryza sativa
  misc_feature (1)..(202): Homolog of NCBI NO: 20502988 NR Description: Putative InsB from Escherichia coli [Oryza sativa
  misc_feature (1)..(151): Homolog of NCBI NO: 37531658 NR Description: putative Magnaporthe grisea pathogenicity protein
MLGDFIIRLLVLILGYTYPAFECFKTVEKNKVDIEELRFWCQYWILLALISSFERVGDFFISWLPLYGEMKVVFFVYLWYPKTKGTRHVYETLLKPYMAQHETEIDRKIMELRARAWDFFIFYFNNFAQAGQSTLIQGFQYVLAQSVRFSAAAANQPPTERNVNMNAQSPVEMDNDPPSPRAPRPLNKSLSALRSLEKQTSRGRKWPPPTPPPTPGRDSAGTFNGDDGVNIPDTIPGSPLTDARAKLRRSNSRTQPAA

SEQ ID NO: 99132 - protein, 189 aa, Arabidopsis thaliana
  peptide (1)..(189): Ceres Seq. ID no. 13602267
  misc_feature (1)..(189): Homolog of NCBI NO: 18404020 NR Description: expressed protein [Arabidopsis thaliana]
  misc_feature (1)..(189): Homolog of NCBI NO: 21537355 NR Description: unknown [Arabidopsis thaliana]
  misc_feature (1)..(189): Homolog of NCBI NO: 26451594 NR Description: unknown protein [Arabidopsis thaliana]
  misc_feature (29)..(189): Homolog of NCBI NO: 25408438 NR Description: hypothetical protein At2g36020 [imported] -
  misc_feature (1)..(153): Homolog of NCBI NO: 21553813 NR Description: unknown [Arabidopsis thaliana]
  misc_feature (1)..(153): Homolog of NCBI NO: 18422223 NR Description: expressed protein [Arabidopsis thaliana]
  misc_feature (1)..(153): Homolog of NCBI NO: 9759014 NR Description: gene_id:K16E1.3~unknown protein [Arabidopsis
  misc_feature (1)..(82): Homolog of NCBI NO: 21671921 NR Description: Putative protein with HVA22 domain [Oryza sativa
  misc_feature (1)..(133): Homolog of NCBI NO: 20502988 NR Description: Putative InsB from Escherichia coli [Oryza sativa
  misc_feature (1)..(82): Homolog of NCBI NO: 37531658 NR Description: putative Magnaporthe grisea pathogenicity protein
MKVVFFVYLWYPKTKGTRHVYETLLKPYMAQHETEIDRKIMELRARAWDFFIFYFNNFAQAGQSTLIQGFQYVLAQSVRFSAAAANQPPTERNVNMNAQSPVEMDNDPPSPRAPRPLNKSLSALRSLEKQTSRGRKWPPPTPPPTPGRDSAGTFNGDDGVNIPDTIPGSPLTDARAKLRRSNSRTQPAA

SEQ ID NO: 99133 - protein, 161 aa, Arabidopsis thaliana
  peptide (1)..(161): Ceres Seq. ID no. 13602268
  misc_feature (1)..(161): Homolog of NCBI NO: 18404020 NR Description: expressed protein [Arabidopsis thaliana]
  misc_feature (1)..(161): Homolog of NCBI NO: 21537355 NR Description: unknown [Arabidopsis thaliana]
  misc_feature (1)..(161): Homolog of NCBI NO: 26451594 NR Description: unknown protein [Arabidopsis thaliana]
  misc_feature (1)..(161): Homolog of NCBI NO: 25408438 NR Description: hypothetical protein At2g36020 [imported] -
  misc_feature (1)..(125): Homolog of NCBI NO: 21553813 NR Description: unknown [Arabidopsis thaliana]
  misc_feature (1)..(125): Homolog of NCBI NO: 18422223 NR Description: expressed protein [Arabidopsis thaliana]
  misc_feature (1)..(125): Homolog of NCBI NO: 9759014 NR Description: gene_id:K16E1.3~unknown protein [Arabidopsis
  misc_feature (1)..(54): Homolog of NCBI NO: 21671921 NR Description: Putative protein with HVA22 domain [Oryza sativa
  misc_feature (1)..(105): Homolog of NCBI NO: 20502988 NR Description: Putative InsB from Escherichia coli [Oryza sativa
  misc_feature (1)..(54): Homolog of NCBI NO: 37531658 NR Description: putative Magnaporthe grisea pathogenicity protein
MAQHETEIDRKIMELRARAWDFFIFYFNNFAQAGQSTLIQGFQYVLAQSVRFSAAAANQPPTERNVNMNAQSPVEMDNDPPSPRAPRPLNKSLSALRSLEKQTSRGRKWPPPTPPPTPGRDSAGTFNGDDGVNIPDTIPGSPLTDARAKLRRSNSRTQPAA

SEQ ID NO: 99134 - DNA, 761 bp, Arabidopsis thaliana
  misc_feature (1)..(761): Ceres Seq. ID no. 13602269
  misc_feature: MA Experiment ID: 20000451 Result: Down-regulated in Transcription
  misc_feature: MA Experiment 20000451 PARAMETER Experiment Name: At_CS6879_Shoots-Roots_P Parameter: Age (day) Value: 14
  misc_feature: MA Experiment 20000451 PARAMETER Experiment Name: At_CS6879_Shoots-Roots_P Parameter: Organism Value: A. thaliana
  misc_feature: MA Experiment 20000451 PARAMETER Experiment Name: At_CS6879_Shoots-Roots_P Parameter: Plant Line Value: CS6879 vs. WS
  misc_feature: MA Experiment 20000451 PARAMETER Experiment Name: At_CS6879_Shoots-Roots_P Parameter: Tissue Value: Roots
  misc_feature: MA Experiment ID: 20000452 Result: Down-regulated in Transcription
  misc_feature: MA Experiment 20000452 PARAMETER Experiment Name: At_CS6879_Shoots-Roots_P Parameter: Age (day) Value: 14
  misc_feature: MA Experiment 20000452 PARAMETER Experiment Name: At_CS6879_Shoots-Roots_P Parameter: Organism Value: A. thaliana
  misc_feature: MA Experiment 20000452 PARAMETER Experiment Name: At_CS6879_Shoots-Roots_P Parameter: Plant Line Value: CS6879 vs. WS
  misc_feature: MA Experiment 20000452 PARAMETER Experiment Name: At_CS6879_Shoots-Roots_P Parameter: Tissue Value: Shoots
  misc_feature: MA Experiment ID: 20000495 Result: Up-regulated in Transcription
  misc_feature: MA Experiment 20000495 PARAMETER Experiment Name: At_Guard_Cells_P Parameter: Harvest Date Value: 8/2/2002
  misc_feature: MA Experiment 20000495 PARAMETER Experiment Name: At_Guard_Cells_P Parameter: Organism Value: A. thaliana
  misc_feature: MA Experiment 20000495 PARAMETER Experiment Name: At_Guard_Cells_P Parameter: Tissue Value: Guard Cells vs. Leaves
  misc_feature: MA Experiment ID: 20001451 Result: Up-regulated in Transcription
  misc_feature: MA Experiment 20001451 PARAMETER Experiment Name: At_Far-red-induction_P Parameter: Age (day) Value: 7
  misc_feature: MA Experiment 20001451 PARAMETER Experiment Name: At_Far-red-induction_P Parameter: Light Value: Far-red vs. White
  misc_feature: MA Experiment 20001451 PARAMETER Experiment Name: At_Far-red-induction_P Parameter: Organism Value: A. thaliana
  misc_feature: MA Experiment 20001451 PARAMETER Experiment Name: At_Far-red-induction_P Parameter: Plant Line Value: Columbia
  misc_feature: MA Experiment 20001451 PARAMETER Experiment Name: At_Far-red-induction_P Parameter: Timepoint (hr) Value: 24
  misc_feature: MA Experiment 20001451 PARAMETER Experiment Name: At_Far-red-induction_P Parameter: Tissue Value: Whole Plant
agtgtagcgtcgcatcatacactccttcggttcccgacgaatcgctgcttttttctctctctctctccgtcgctgaaaaatgtcggcaagacctgaaggaagtccgccggaggttacgctcgagacctccatgggtcctttcaccgtcgagatgtattacaaacactccccgagaacttgccggaacttccttgagctatcccggagaggttactatgacaacgttctgtttcacagaatcgtcaaggatttcattgtgcaaggtggggatcctacaggaactggaagaggtggtgaatccatttatggttcgaagtttgaggatgagataaacaaagagttgaagcacacaggagccggaattttatcaatggcgaacgctggtcctaatacaaatgggagtcaatttttcatcaccttagccccacaaccgtccttggatggaaaacacacaatatttggtagagtgtgccgaggcatggaggtgatcaagaggctcggtagtgtccaaaccgataacaccgacaggccgatccatgaagtgaagattctaaggaccaaagtgatcgattgattggggcagaggagtttttgtcaaggagaagaagaagcatttagtaaaccgtttatgacatgaagaactataactctgtgtactgatcccttgatactattgtagactggtttttgtctaagtcttgactctactttgatggaaaaaaatgattgaaatacgttaaatcactctctatttctttttg

SEQ ID NO: 99135 - protein, 164 aa, Arabidopsis thaliana; identical to SEQ ID NO: 41836
  peptide (1)..(164): Ceres Seq. ID no. 13602270
  misc_feature (1)..(164): Homolog of NCBI NO: 15227585 NR Description: cyclophilin-related protein [Arabidopsis thaliana]
  misc_feature (1)..(164): Homolog of NCBI NO: 21537220 NR Description: cyclophilin-like protein [Arabidopsis thaliana]
  misc_feature (6)..(164): Homolog of NCBI NO: 15076665 NR Description: cyclophilin [Oryza sativa (japonica
  misc_feature (9)..(162): Homolog of NCBI NO: 17986117 NR Description: Cyclophilin-like CG13892-PA [Drosophila
  misc_feature (11)..(164): Homolog of NCBI NO: 40740912 NR Description: hypothetical protein AN8680.2 [Aspergillus
  misc_feature (11)..(164): Homolog of NCBI NO: 18042141 NR Description: cyclophilin-like peptidyl prolyl cis-trans
  misc_feature (1)..(159): Homolog of NCBI NO: 7706339 NR Description: peptidylprolyl isomerase-like 1;
  misc_feature (1)..(159): Homolog of NCBI NO: 21312784 NR Description: peptidylprolyl isomerase-like 1 [Mus musculus]
  misc_feature (9)..(162): Homolog of NCBI NO: 31239537 NR Description: ENSANGP00000011602 [Anopheles gambiae]
  misc_feature (12)..(159): Homolog of NCBI NO: 30172966 NR Description: Peptidyl-prolyl cis-trans isomerase cypE cypE) >gi|6920001|gb|AAF28343.2|AF215865_1 cyclophilin E

SEQ ID NO: 99136 - protein, 147 aa, Arabidopsis thaliana; identical to SEQ ID NO: 41837
  peptide (1)..(147): Ceres Seq. ID no. 13602271
  misc_feature (1)..(147): Homolog of NCBI NO: 15227585 NR Description: cyclophilin-related protein [Arabidopsis thaliana]
  misc_feature (1)..(147): Homolog of NCBI NO: 21537220 NR Description: cyclophilin-like protein [Arabidopsis thaliana]
  misc_feature (1)..(147): Homolog of NCBI NO: 15076665 NR Description: cyclophilin [Oryza sativa (japonica
  misc_feature (1)..(145): Homolog of NCBI NO: 17986117 NR Description: Cyclophilin-like CG13892-PA [Drosophila
  misc_feature (1)..(147): Homolog of NCBI NO: 40740912 NR Description: hypothetical protein AN8680.2 [Aspergillus
  misc_feature (1)..(147): Homolog of NCBI NO: 18042141 NR Description: cyclophilin-like peptidyl prolyl cis-trans
  misc_feature (1)..(142): Homolog of NCBI NO: 7706339 NR Description: peptidylprolyl isomerase-like 1;
  misc_feature (1)..(142): Homolog of NCBI NO: 21312784 NR Description: peptidylprolyl isomerase-like 1 [Mus musculus]
  misc_feature (1)..(145): Homolog of NCBI NO: 31239537 NR Description: ENSANGP00000011602 [Anopheles gambiae]
  misc_feature (1)..(142): Homolog of NCBI NO: 30172966 NR Description: Peptidyl-prolyl cis-trans isomerase cypE cypE) >gi|6920001|gb|AAF28343.2|AF215865_1 cyclophilin E

SEQ ID NO: 99137 - protein, 140 aa, Arabidopsis thaliana; identical to SEQ ID NO: 41838
  peptide (1)..(140): Ceres Seq. ID no. 13602272
  misc_feature (1)..(140): Homolog of NCBI NO: 15227585 NR Description: cyclophilin-related protein [Arabidopsis thaliana]
  misc_feature (1)..(140): Homolog of NCBI NO: 21537220 NR Description: cyclophilin-like protein [Arabidopsis thaliana]
  misc_feature (1)..(140): Homolog of NCBI NO: 15076665 NR Description: cyclophilin [Oryza sativa (japonica
  misc_feature (1)..(138): Homolog of NCBI NO: 17986117 NR Description: Cyclophilin-like CG13892-PA [Drosophila
  misc_feature (1)..(140): Homolog of NCBI NO: 40740912 NR Description: hypothetical protein AN8680.2 [Aspergillus
  misc_feature (1)..(140): Homolog of NCBI NO: 18042141 NR Description: cyclophilin-like peptidyl prolyl cis-trans
  misc_feature (1)..(135): Homolog of NCBI NO: 7706339 NR Description: peptidylprolyl isomerase-like 1;
  misc_feature (1)..(135): Homolog of NCBI NO: 21312784 NR Description: peptidylprolyl isomerase-like 1 [Mus musculus]
  misc_feature (1)..(138): Homolog of NCBI NO: 31239537 NR Description: ENSANGP00000011602 [Anopheles gambiae]
  misc_feature (1)..(135): Homolog of NCBI NO: 30172966 NR Description: Peptidyl-prolyl cis-trans isomerase cypE cypE) >gi|6920001|gb|AAF28343.2|AF215865_1 cyclophilin E

SEQ ID NO: 99138 - DNA, 2079 bp, Arabidopsis thaliana
  misc_feature (1)..(2079): Ceres Seq. ID no. 13602273
  misc_feature: MA Experiment ID: 108474 Result: Down-regulated in Transcription
  misc_feature: MA Experiment 108474 PARAMETER Experiment Name: At_Drought_Flowers_cDNA_P Parameter: Timepoint (hr) Value: null
  misc_feature: MA Experiment 108474 PARAMETER Experiment Name: At_Drought_Flowers_cDNA_P Parameter: Treatment Value: Drought vs. No Drought
  misc_feature: MA Experiment ID: 108501 Result: Down-regulated in Transcription
  misc_feature: MA Experiment 108501 PARAMETER Experiment Name: At_ap2_floral_buds_cDNA_P Parameter: Plant Line Value: ap2 (Ler.)
  misc_feature: MA Experiment 108501 PARAMETER Experiment Name: At_ap2_floral_buds_cDNA_P Parameter: Tissue Value: Closed Flower
  misc_feature: MA Experiment ID: 20000087 Result: Up-regulated in Transcription
  misc_feature: MA Experiment 20000087 PARAMETER Experiment Name: At_100uM_ABA_Mutants_cDNA_P Parameter: Plant Line Value: WS
  misc_feature: MA Experiment 20000087 PARAMETER Experiment Name: At_100uM_ABA_Mutants_cDNA_P Parameter: Timepoint (hr) Value: 6
  misc_feature: MA Experiment 20000087 PARAMETER Experiment Name: At_100uM_ABA_Mutants_cDNA_P Parameter: Tissue Value: Aerial
  misc_feature: MA Experiment 20000087 PARAMETER Experiment Name: At_100uM_ABA_Mutants_cDNA_P Parameter: Treatment Value: 100uM ABA vs. No Treatment
  misc_feature: MA Experiment ID: 20000171 Result: Up-regulated in Transcription
  misc_feature: MA Experiment 20000171 PARAMETER Experiment Name: At_42deg_Heat_P Parameter: Age (day) Value: 14
  misc_feature: MA Experiment 20000171 PARAMETER Experiment Name: At_42deg_Heat_P Parameter: Organism Value: A. thaliana
  misc_feature: MA Experiment 20000171 PARAMETER Experiment Name: At_42deg_Heat_P Parameter: Plant Line Value: WS
  misc_feature: MA Experiment 20000171 PARAMETER Experiment Name: At_42deg_Heat_P Parameter: Temperature (deg C) Value: 42 vs. 22
  misc_feature: MA Experiment 20000171 PARAMETER Experiment Name: At_42deg_Heat_P Parameter: Timepoint (hr) Value: 1
  misc_feature: MA Experiment 20000171 PARAMETER Experiment Name: At_42deg_Heat_P Parameter: Tissue Value: Aerial
  misc_feature: MA Experiment ID: 20000234 Result: Up-regulated in Transcription
  misc_feature: MA Experiment 20000234 PARAMETER Experiment Name: At_Siliques_P Parameter: Age (day) Value: 21
  misc_feature: MA Experiment 20000234 PARAMETER Experiment Name: At_Siliques_P Parameter: Organism Value: A. thaliana
  misc_feature: MA Experiment 20000234 PARAMETER Experiment Name: At_Siliques_P Parameter: Plant Line Value: WS
  misc_feature: MA Experiment 20000234 PARAMETER Experiment Name: At_Siliques_P Parameter: Tissue Value: Less Than 5mm Siliques vs. Whole Plant
  misc_feature: MA Experiment ID: 20000264 Result: Up-regulated in Transcription
  misc_feature: MA Experiment 20000264 PARAMETER Experiment Name: At_Open_Flower_P Parameter: Age (day) Value: 21
  misc_feature: MA Experiment 20000264 PARAMETER Experiment Name: At_Open_Flower_P Parameter: Plant Line Value: WS
  misc_feature: MA Experiment 20000264 PARAMETER Experiment Name: At_Open_Flower_P Parameter: Tissue Value: Open Flower vs. Whole Plant
  misc_feature: MA Experiment ID: 20000265 Result: Up-regulated in Transcription
  misc_feature: MA Experiment 20000265 PARAMETER Experiment Name: At_Open_Flower_P Parameter: Age (day) Value: 21
  misc_feature: MA Experiment 20000265 PARAMETER Experiment Name: At_Open_Flower_P Parameter: Plant Line Value: WS
  misc_feature: MA Experiment 20000265 PARAMETER Experiment Name: At_Open_Flower_P Parameter: Tissue Value: Closed Flower vs. Whole Plant
  misc_feature: MA Experiment ID: 20000286 Result: Up-regulated in Transcription
  misc_feature: MA Experiment 20000286 PARAMETER Experiment Name: At_Open_Flower_P Parameter: Age (day) Value: 21
  misc_feature: MA Experiment 20000286 PARAMETER Experiment Name: At_Open_Flower_P Parameter: Plant Line Value: WS
  misc_feature: MA Experiment 20000286 PARAMETER Experiment Name: At_Open_Flower_P Parameter: Tissue Value: Half Open vs. Whole Plant
  misc_feature: MA Experiment ID: 20000794 Result: Up-regulated in Transcription
  misc_feature: MA Experiment 20000794 PARAMETER Experiment Name: At_Petals_P Parameter: Age (day) Value: 23-25 days
  misc_feature: MA Experiment 20000794 PARAMETER Experiment Name: At_Petals_P Parameter: Plant Line Value: WS
  misc_feature: MA Experiment 20000794 PARAMETER Experiment Name: At_Petals_P Parameter: Tissue Value: Petals vs. Whole plant
  misc_feature: MA Experiment ID: 20001911 Result: Down-regulated in Transcription
  misc_feature: MA Experiment 20001911 PARAMETER Experiment Name: At_Drought_Reproduction_P Parameter: Age (day) Value: 40
  misc_feature: MA Experiment 20001911 PARAMETER Experiment Name: At_Drought_Reproduction_P Parameter: Organism Value: A. thaliana
  misc_feature: MA Experiment 20001911 PARAMETER Experiment Name: At_Drought_Reproduction_P Parameter: Plant Line Value: WS
  misc_feature: MA Experiment 20001911 PARAMETER Experiment Name: At_Drought_Reproduction_P Parameter: Timepoint (day) Value: 10
  misc_feature: MA Experiment 20001911 PARAMETER Experiment Name: At_Drought_Reproduction_P Parameter: Tissue Value: Flowers
  misc_feature: MA Experiment 20001911 PARAMETER Experiment Name: At_Drought_Reproduction_P Parameter: Treatment Value: Drought vs. No Drought
atcacattctctccttattcaacttaaatactacacggccaaaaacatttaacaaacgccactcagatcctgagtctttggatcaatggctatttcaaatgttatttctgtcttattattattgcttgtactaatcaatttaagcaatcaaaatatcaaaggaattgatgcatttcatcagatttacgaagaattgcaatctgaatcagtcgagtcagtgaatcatcttcacagacctagttttcactttcaacctccaaagcattggattaacgatccaaatggtccagtatactacaaaggtctctaccatctcttctaccaatataacaccaaaggtgcggtttggggtaatattatatgggcccattcggtttctaaagacttggttaactgggaggctcttgaaccggctcttagtccttcaaaatggttcgacatcggaggtacatggtccggttcaataacaatcgtaccgggaaaaggaccgattatcctctataccggtgttaaccagaacgaaactcagttgcaaaactatgcaatcccagaggacccatcagacccatacctaaggaaatggattaaaccggacgataacccgattgcaatcccagactatacaatgaacggttcagcattccgtgacccgacaaccgcttggttctccaaagacgggcattggagaaccgtggtagggtcaaaaagaaagcgtagaggaattgcttacatctacagaagccgagatttcaagcattgggtcaaagctaagcacccggttcactctaaacagtcaaccggtatgtgggaatgtcctgatttcttcccggtttccttaaccgatttccgaaacggtttggacttggattacgtcggtccaaacaccaagcatgtgttgaaggttagcttggacattacccggtacgagtattacacgcttggtaaatacgatcttaagaaggaccggtacataccggacggtaatactcccgatggttgggagggtttaagattcgattacggtaatttctacgcttccaagacattctttgactacaaaaagaacagaagaatcttatggggttgggctaatgaatctgacaccgttgaagatgatattttgaagggttgggctggtcttcaggtgattccaagaacggtgctccttgattcaagcaagaagcaacttgtgttttggcctgttgaagagatagagtcattaagaggtaactacgtccgaatgaacaatcatgacatcaagatgggtcaacgcatagaagtcaaaggaatcactcctgctcaagccgatgtggaagtaacgttctatgttggaagtctagagaaagctgagatattcgatccgagtttcacgtggaaaccattggaattgtgtaacattaaaggctcgaatgtgagaggcggtgtaggaccttttggtctgatcacattagcgactcctgatttggaagagtacactcctgtcttctttagagtcttcaacgacactaaaactcataagcctaaagttctcatgtgctccgatgctagaccgtcgtcgttaaagcaagacacgggtttactcgcaaaagataggatgtataaaccatcgtttgctggttttgtggatgttgatatggctgatggaaggatctctctaaggagtttgattgatcattcagtagtagagagctttggagcattaggtaaaacggtgataacatcaagagtgtatccagtgaaagcagtaaaagagaatgcacatttgtatgtctttaacaatggaacacaaactgtgaccatagagagtctcaatgcttggaatatggatcgtcctctgcaaatgaatgatggagctctttaatttagctcttctctctatagtttagctataccgtcttctctctttctcactttttcttatattttcatcttcagtatagtaactgagagatactgtgaaattaggaagaaaaatgtgggagtttctgtgtttacgaacaatttggttgtgatgtccatactttatgtatcgactgttgtatctttctgtctttagtctctcaataaaaataagtttag

SEQ ID NO: 99139 - protein, 591 aa, Arabidopsis thaliana
  peptide (1)..(591): Ceres Seq. ID no. 13602274
  misc_feature (54)..(540): Pfam Name: Glycosyl hydrolases family 32 Pfam Description: Glycosyl hydrolases family 32
  misc_feature (10)..(590): Homolog of NCBI NO: 30693668 NR Description: glycosyl hydrolase family 32 [Arabidopsis
  misc_feature (10)..(590): Homolog of NCBI NO: 26451724 NR Description: putative beta-fructofuranosidase [Arabidopsis
  misc_feature (10)..(590): Homolog of NCBI NO: 719270 NR Description: invertase >gi|1096508|prf||2111428A
  misc_feature (10)..(590): Homolog of NCBI NO: 7435478 NR Description: beta-fructofuranosidase (EC 3.2.1.26), 66.9K -
  misc_feature (11)..(587): Homolog of NCBI NO: 2129916 NR Description: beta-fructofuranosidase (EC 3.2.1.26) 1
  misc_feature (11)..(587): Homolog of NCBI NO: 124712 NR Description: BETA-FRUCTOFURANOSIDASE, INSOLUBLE ISOENZYME 1
  misc_feature (4)..(580): Homolog of NCBI NO: 1076619 NR Description: beta-fructofuranosidase (EC 3.2.1.26) - common
  misc_feature (50)..(580): Homolog of NCBI NO: 18072855 NR Description: beta-fructofuranosidase [Beta vulgaris]
  misc_feature (50)..(587): Homolog of NCBI NO: 124713 NR Description: ACID BETA-FRUCTOFURANOSIDASE PRECURSOR (ACID PHOSPHATE HYDROLASE) (ACID INVERTASE) (AI) (VACUOLAR INVERTASE)
  misc_feature (50)..(587): Homolog of NCBI NO: 21322512 NR Description: acid vacuolar invertase [Beta vulgaris]
MAISNVISVLLLLLVLINLSNQNIKGIDAFHQIYEELQSESVESVNHLHRPSFHFQPPKHWINDPNGPVYYKGLYHLFYQYNTKGAVWGNIIWAHSVSKDLVNWEALEPALSPSKWFDIGGTWSGSITIVPGKGPIILYTGVNQNETQLQNYAIPEDPSDPYLRKWIKPDDNPIAIPDYTMNGSAFRDPTTAWFSKDGHWRTVVGSKRKRRGIAYIYRSRDFKHWVKAKHPVHSKQSTGMWECPDFFPVSLTDFRNGLDLDYVGPNTKHVLKVSLDITRYEYYTLGKYDLKKDRYIPDGNTPDGWEGLRFDYGNFYASKTFFDYKKNRRILWGWANESDTVEDDILKGWAGLQVIPRTVLLDSSKKQLVFWPVEEIESLRGNYVRMNNHDIKMGQRIEVKGITPAQADVEVTFYVGSLEKAEIFDPSFTWKPLELCNIKGSNVRGGVGPFGLITLATPDLEEYTPVFFRVFNDTKTHKPKVLMCSDARPSSLKQDTGLLAKDRMYKPSFAGFVDVDMADGRISLRSLIDHSVVESFGALGKTVITSRVYPVKAVKENAHLYVFNNGTQTVTIESLNAWNMDRPLQMNDGAL

SEQ ID NO: 99140 - protein, 411 aa, Arabidopsis thaliana; identical to SEQ ID NO: 41018
  peptide (1)..(411): Ceres Seq. ID no. 13602275
  misc_feature (1)..(360): Pfam Name: Glycosyl hydrolases family 32 Pfam Description: Glycosyl hydrolases family 32
  misc_feature (1)..(410): Homolog of NCBI NO: 30693668 NR Description: glycosyl hydrolase family 32 [Arabidopsis
  misc_feature (1)..(410): Homolog of NCBI NO: 26451724 NR Description: putative beta-fructofuranosidase [Arabidopsis
  misc_feature (1)..(410): Homolog of NCBI NO: 719270 NR Description: invertase >gi|1096508|prf||2111428A
  misc_feature (1)..(410): Homolog of NCBI NO: 7435478 NR Description: beta-fructofuranosidase (EC 3.2.1.26), 66.9K -
  misc_feature (1)..(407): Homolog of NCBI NO: 2129916 NR Description: beta-fructofuranosidase (EC 3.2.1.26) 1
  misc_feature (1)..(407): Homolog of NCBI NO: 124712 NR Description: BETA-FRUCTOFURANOSIDASE, INSOLUBLE ISOENZYME 1
  misc_feature (1)..(400): Homolog of NCBI NO: 1076619 NR Description: beta-fructofuranosidase (EC 3.2.1.26) - common
  misc_feature (1)..(400): Homolog of NCBI NO: 18072855 NR Description: beta-fructofuranosidase [Beta vulgaris]
  misc_feature (1)..(407): Homolog of NCBI NO: 124713 NR Description: ACID BETA-FRUCTOFURANOSIDASE PRECURSOR (ACID PHOSPHATE HYDROLASE) (ACID INVERTASE) (AI) (VACUOLAR INVERTASE)
  misc_feature (1)..(407): Homolog of NCBI NO: 21322512 NR Description: acid vacuolar invertase [Beta vulgaris]

SEQ ID NO: 99141 - protein, 352 aa, Arabidopsis thaliana; identical to SEQ ID NO: 41019
  peptide (1)..(352): Ceres Seq. ID no. 13602276
  misc_feature (1)..(301): Pfam Name: Glycosyl hydrolases family 32 Pfam Description: Glycosyl hydrolases family 32
  misc_feature (1)..(351): Homolog of NCBI NO: 30693668 NR Description: glycosyl hydrolase family 32 [Arabidopsis
  misc_feature (1)..(351): Homolog of NCBI NO: 26451724 NR Description: putative beta-fructofuranosidase [Arabidopsis
  misc_feature (1)..(351): Homolog of NCBI NO: 719270 NR Description: invertase >gi|1096508|prf||2111428A
  misc_feature (1)..(351): Homolog of NCBI NO: 7435478 NR Description: beta-fructofuranosidase (EC 3.2.1.26), 66.9K -
  misc_feature (1)..(348): Homolog of NCBI NO: 2129916 NR Description: beta-fructofuranosidase (EC 3.2.1.26) 1
  misc_feature (1)..(348): Homolog of NCBI NO: 124712 NR Description: BETA-FRUCTOFURANOSIDASE, INSOLUBLE ISOENZYME 1
  misc_feature (1)..(341): Homolog of NCBI NO: 1076619 NR Description: beta-fructofuranosidase (EC 3.2.1.26) - common
  misc_feature (1)..(341): Homolog of NCBI NO: 18072855 NR Description: beta-fructofuranosidase [Beta vulgaris]
  misc_feature (1)..(348): Homolog of NCBI NO: 124713 NR Description: ACID BETA-FRUCTOFURANOSIDASE PRECURSOR (ACID PHOSPHATE HYDROLASE) (ACID INVERTASE) (AI) (VACUOLAR INVERTASE)
  misc_feature (1)..(348): Homolog of NCBI NO: 21322512 NR Description: acid vacuolar invertase [Beta vulgaris]

SEQ ID NO: 99142 - DNA, 1122 bp, Arabidopsis thaliana
  misc_feature (1)..(1122): Ceres Seq. ID no. 13602281
  misc_feature: MA Experiment ID: 108434 Result: Up-regulated in Transcription
  misc_feature: MA Experiment 108434 PARAMETER Experiment Name: At_Root_Tips_cDNA_P Parameter: Tissue Value: Root Tips
  misc_feature: MA Experiment ID: 108462 Result: Down-regulated in Transcription
  misc_feature: MA Experiment 108462 PARAMETER Experiment Name: At_Germinating_Seeds_cDNA_P Parameter: Age (day) Value: 2 vs. 0
  misc_feature: MA Experiment 108462 PARAMETER Experiment Name: At_Germinating_Seeds_cDNA_P Parameter: Tissue Value: Germinating Seeds
  misc_feature: MA Experiment ID: 108463 Result: Down-regulated in Transcription
  misc_feature: MA Experiment 108463 PARAMETER Experiment Name: At_Germinating_Seeds_cDNA_P Parameter: Age (day) Value: 3 vs. 0
  misc_feature: MA Experiment 108463 PARAMETER Experiment Name: At_Germinating_Seeds_cDNA_P Parameter: Tissue Value: Germinating Seeds
  misc_feature: MA Experiment ID: 108464 Result: Down-regulated in Transcription
  misc_feature: MA Experiment 108464 PARAMETER Experiment Name: At_Germinating_Seeds_cDNA_P Parameter: Age (day) Value: 4 vs. 0
  misc_feature: MA Experiment 108464 PARAMETER Experiment Name: At_Germinating_Seeds_cDNA_P Parameter: Tissue Value: Germinating Seeds
  misc_feature: MA Experiment ID: 108573 Result: Down-regulated in Transcription
  misc_feature: MA Experiment 108573 PARAMETER Experiment Name: At_Drought_cDNA_P Parameter: Timepoint (hr) Value: 6
  misc_feature: MA Experiment 108573 PARAMETER Experiment Name: At_Drought_cDNA_P Parameter: Tissue Value: Aerial
  misc_feature: MA Experiment 108573 PARAMETER Experiment Name: At_Drought_cDNA_P Parameter: Treatment Value: Drought vs. No Drought
  misc_feature: MA Experiment ID: 108585 Result: Down-regulated in Transcription
  misc_feature: MA Experiment 108585 PARAMETER Experiment Name: At_5mM_NaNP_cDNA_P Parameter: Timepoint (hr) Value: 6
  misc_feature: MA Experiment 108585 PARAMETER Experiment Name: At_5mM_NaNP_cDNA_P Parameter: Tissue Value: Aerial
  misc_feature: MA Experiment 108585 PARAMETER Experiment Name: At_5mM_NaNP_cDNA_P Parameter: Treatment Value: null
  misc_feature: MA Experiment ID: 108668 Result: Down-regulated in Transcription
  misc_feature: MA Experiment 108668 PARAMETER Experiment Name: At_2mM_SA_cDNA_P Parameter: Plant Line Value: WS
  misc_feature: MA Experiment 108668 PARAMETER Experiment Name: At_2mM_SA_cDNA_P Parameter: Timepoint (hr) Value: 6
  misc_feature: MA Experiment 108668 PARAMETER Experiment Name: At_2mM_SA_cDNA_P Parameter: Treatment Value: 2mM SA vs. No Treatment
  misc_feature: MA Experiment ID: 20000182 Result: Down-regulated in Transcription
  misc_feature: MA Experiment 20000182 PARAMETER Experiment Name: At_2mM_SA_P Parameter: Age (day) Value: 14
  misc_feature: MA Experiment 20000182 PARAMETER Experiment Name: At_2mM_SA_P Parameter: Organism Value: A. thaliana
  misc_feature: MA Experiment 20000182 PARAMETER Experiment Name: At_2mM_SA_P Parameter: Plant Line Value: WS
  misc_feature: MA Experiment 20000182 PARAMETER Experiment Name: At_2mM_SA_P Parameter: Timepoint (hr) Value: 6
  misc_feature: MA Experiment 20000182 PARAMETER Experiment Name: At_2mM_SA_P Parameter: Tissue Value: Aerial
  misc_feature: MA Experiment 20000182 PARAMETER Experiment Name: At_2mM_SA_P Parameter: Treatment Value: 2mM SA vs. No Treatment
  misc_feature: MA Experiment ID: 20000437 Result: Down-regulated in Transcription
  misc_feature: MA Experiment 20000437 PARAMETER Experiment Name: At_Drought_P Parameter: Age (day) Value: 8
  misc_feature: MA Experiment 20000437 PARAMETER Experiment Name: At_Drought_P Parameter: Organism Value: A. thaliana
  misc_feature: MA Experiment 20000437 PARAMETER Experiment Name: At_Drought_P Parameter: Plant Line Value: WS
  misc_feature: MA Experiment 20000437 PARAMETER Experiment Name: At_Drought_P Parameter: Timepoint (hr) Value: 24
  misc_feature: MA Experiment 20000437 PARAMETER Experiment Name: At_Drought_P Parameter: Tissue Value: Whole Plant
  misc_feature: MA Experiment 20000437 PARAMETER Experiment Name: At_Drought_P Parameter: Treatment Value: Drought vs. No Drought
  misc_feature: MA Experiment ID: 20000794 Result: Down-regulated in Transcription
  misc_feature: MA Experiment 20000794 PARAMETER Experiment Name: At_Petals_P Parameter: Age (day) Value: 23-25 days
  misc_feature: MA Experiment 20000794 PARAMETER Experiment Name: At_Petals_P Parameter: Plant Line Value: WS
  misc_feature: MA Experiment 20000794 PARAMETER Experiment Name: At_Petals_P Parameter: Tissue Value: Petals vs. Whole plant
  misc_feature: MA Experiment ID: 20001560 Result: Up-regulated in Transcription
  misc_feature: MA Experiment 20001560 PARAMETER Experiment Name: At_Drought_Soil_Dry_P Parameter: Age (day) Value: 28
  misc_feature: MA Experiment 20001560 PARAMETER Experiment Name: At_Drought_Soil_Dry_P Parameter: Organism Value: A. thaliana
  misc_feature: MA Experiment 20001560 PARAMETER Experiment Name: At_Drought_Soil_Dry_P Parameter: Plant Line Value: WS
  misc_feature: MA Experiment 20001560 PARAMETER Experiment Name: At_Drought_Soil_Dry_P Parameter: Post Timepoint (hr) Value: None
  misc_feature: MA Experiment 20001560 PARAMETER Experiment Name: At_Drought_Soil_Dry_P Parameter: Post-Treatment Value: None
  misc_feature: MA Experiment 20001560 PARAMETER Experiment Name: At_Drought_Soil_Dry_P Parameter: Timepoint (day) Value: 14
  misc_feature: MA Experiment 20001560 PARAMETER Experiment Name: At_Drought_Soil_Dry_P Parameter: Treatment Value: Drought vs. No Drought
gcttactgattacagtttcagttccaaagatgagaactttgagctcccaattatactccaatggtggtctcacttggttccagaagaagaatcagagctctctgttcatcaagcatctcagagtctctaaaccatcgagggttcagctcatatctgctgttcaattccgtccgtgcatcgatattcataagggaaaagtgaaacagatagttggatccacacttcgtgacttgaaagaggatggttcagttctcgttacgaattttgaatcggataagtctgcggaagagtatgcaaagatgtacaaagaagatgggcttacgggtggtcatgtgataatgcttggagcagaccctttaagccaagctgcagctattggagcattacatgcttatcctggcggtttgcaagttggaggtggaatcaattctgagaattgcatgagttatattgaggagggagcaagccatgtcattgtcacttcgtatgtatttaacaatggaaagattgatcttgaaagactcaaagatattgtgagcattgttgggaaacaaagactgatattggaccttagctgcagaaagaaggatggaagatacgcaattgttactgatagatggcagaagttcagcgacgtcatccttgacgagaaatcattggagtttcttggaggattttcagatgagtttctggtgcatggcgtagacgttgaaggaaagaagctagggatcgatgaagagcttgtagcattgcttggcaactactctccgattccagtaacttatgcgggaggtgtgacggtaatggatgatgtagagaggatcaaggacgcaggaaagggacgtgtagatgtaacagtgggaagtgccttagacattttcgggggaaatcttccatacaaagacgtcgtcgcttggcatcacaagcagcactcactccattgatatcgccattttcacctttgctcatcttttttatttgcattaccccaaaccttaagcttcaatatttgcaacattaatcttcagctttaaacttttgtgcttctttctaaactcttcaagaatttgtcaattttgaatattttttcgattaatcaagtttatggtttggtttgactac

SEQ ID NO: 99143 - protein, 313 aa, Arabidopsis thaliana; identical to SEQ ID NO: 26446
  peptide (1)..(313): Ceres Seq. ID no. 13602282
  misc_feature (57)..(306): Pfam Name: Histidine biosynthesis protein Pfam Description: Histidine biosynthesis protein
  misc_feature (10)..(313): Homolog of NCBI NO: 15227607 NR Description: phosphoribosylformimino-5-aminoimidazole
  misc_feature (55)..(308): Homolog of NCBI NO: 19114853 NR Description: probable phosphoribosylformimino-5-aminoimidazole
  misc_feature (54)..(309): Homolog of NCBI NO: 32403246 NR Description: hypothetical protein [Neurospora crassa]
  misc_feature (54)..(309): Homolog of NCBI NO: 38105940 NR Description: hypothetical protein MG04998.4 [Magnaporthe
  misc_feature (54)..(309): Homolog of NCBI NO: 6322169 NR Description: phosphoribosyl-5-amino-1-phosphoribosyl-4-
  misc_feature (54)..(306): Homolog of NCBI NO: 10444341 NR Description: 5-proFAR isomerase [Candida albicans]
  misc_feature (54)..(224): Homolog of NCBI NO: 40745248 NR Description: hypothetical protein AN2293.2 [Aspergillus
  misc_feature (57)..(290): Homolog of NCBI NO: 20093802 NR Description: Phosphoribosylformimino-5-aminoimidazole
  misc_feature (76)..(290): Homolog of NCBI NO: 15669727 NR Description: phosphoribosylformimino-5-aminoimidazole
  misc_feature (57)..(305): Homolog of NCBI NO: 23027167 NR Description: hypothetical protein [Microbulbifer degradans

SEQ ID NO: 99144 - protein, 304 aa, Arabidopsis thaliana; identical to SEQ ID NO: 26447
  peptide (1)..(304): Ceres Seq. ID no. 13602283
  misc_feature (48)..(297): Pfam Name: Histidine biosynthesis protein Pfam Description: Histidine biosynthesis protein
  misc_feature (1)..(304): Homolog of NCBI NO: 15227607 NR Description: phosphoribosylformimino-5-aminoimidazole
  misc_feature (46)..(299): Homolog of NCBI NO: 19114853 NR Description: probable phosphoribosylformimino-5-aminoimidazole
  misc_feature (45)..(300): Homolog of NCBI NO: 32403246 NR Description: hypothetical protein [Neurospora crassa]
  misc_feature (45)..(300): Homolog of NCBI NO: 38105940 NR Description: hypothetical protein MG04998.4 [Magnaporthe
  misc_feature (45)..(300): Homolog of NCBI NO: 6322169 NR Description: phosphoribosyl-5-amino-1-phosphoribosyl-4-
  misc_feature (45)..(297): Homolog of NCBI NO: 10444341 NR Description: 5-proFAR isomerase [Candida albicans]
  misc_feature (45)..(215): Homolog of NCBI NO: 40745248 NR Description: hypothetical protein AN2293.2 [Aspergillus
  misc_feature (48)..(281): Homolog of NCBI NO: 20093802 NR Description: Phosphoribosylformimino-5-aminoimidazole
  misc_feature (67)..(281): Homolog of NCBI NO: 15669727 NR Description: phosphoribosylformimino-5-aminoimidazole
  misc_feature (48)..(296): Homolog of NCBI NO: 23027167 NR Description: hypothetical protein [Microbulbifer degradans

SEQ ID NO: 99145 - protein, 214 aa, Arabidopsis thaliana; identical to SEQ ID NO: 26448
  peptide (1)..(214): Ceres Seq. ID no. 13602284
  misc_feature (1)..(207): Pfam Name: Histidine biosynthesis protein Pfam Description: Histidine biosynthesis protein
  misc_feature (1)..(214): Homolog of NCBI NO: 15227607 NR Description: phosphoribosylformimino-5-aminoimidazole
  misc_feature (1)..(209): Homolog of NCBI NO: 19114853 NR Description: probable phosphoribosylformimino-5-aminoimidazole
  misc_feature (1)..(210): Homolog of NCBI NO: 32403246 NR Description: hypothetical protein [Neurospora crassa]
  misc_feature (1)..(210): Homolog of NCBI NO: 38105940 NR Description: hypothetical protein MG04998.4 [Magnaporthe
  misc_feature (1)..(210): Homolog of NCBI NO: 6322169 NR Description: phosphoribosyl-5-amino-1-phosphoribosyl-4-
  misc_feature (1)..(207): Homolog of NCBI NO: 10444341 NR Description: 5-proFAR isomerase [Candida albicans]
  misc_feature (1)..(125): Homolog of NCBI NO: 40745248 NR Description: hypothetical protein AN2293.2 [Aspergillus
  misc_feature (1)..(191): Homolog of NCBI NO: 20093802 NR Description: Phosphoribosylformimino-5-aminoimidazole
  misc_feature (1)..(191): Homolog of NCBI NO: 15669727 NR Description: phosphoribosylformimino-5-aminoimidazole
  misc_feature (1)..(206): Homolog of NCBI NO: 23027167 NR Description: hypothetical protein [Microbulbifer degradans

SEQ ID NO: 99146 - DNA, 1359 bp, Arabidopsis thaliana
  misc_feature (1)..(1359): Ceres Seq. ID no. 13602285
  misc_feature: MA Experiment ID: 20000179 Result: Up-regulated in Transcription
  misc_feature: MA Experiment 20000179 PARAMETER Experiment Name: At_Germinating_Seeds_P Parameter: Age (hr) Value: 6 vs. 0
  misc_feature: MA Experiment 20000179 PARAMETER Experiment Name: At_Germinating_Seeds_P Parameter: Tissue Value: Germinating Seeds
  misc_feature: MA Experiment ID: 20000180 Result: Up-regulated in Transcription
  misc_feature: MA Experiment 20000180 PARAMETER Experiment Name: At_Germinating_Seeds_P Parameter: Age (hr) Value: 24 vs. 0
  misc_feature: MA Experiment 20000180 PARAMETER Experiment Name: At_Germinating_Seeds_P Parameter: Tissue Value: Germinating Seeds
  misc_feature: MA Experiment ID: 20000185 Result: Up-regulated in Transcription
  misc_feature: MA Experiment 20000185 PARAMETER Experiment Name: At_Roots__P Parameter: Age (day) Value: 7 vs. 21
  misc_feature: MA Experiment 20000185 PARAMETER Experiment Name: At_Roots__P Parameter: Organism Value: A. thaliana
  misc_feature: MA Experiment 20000185 PARAMETER Experiment Name: At_Roots__P Parameter: Tissue Value: Roots vs. Whole Plant
  misc_feature: MA Experiment ID: 20000286 Result: Up-regulated in Transcription
  misc_feature: MA Experiment 20000286 PARAMETER Experiment Name: At_Open_Flower_P Parameter: Age (day) Value: 21
  misc_feature: MA Experiment 20000286 PARAMETER Experiment Name: At_Open_Flower_P Parameter: Plant Line Value: WS
  misc_feature: MA Experiment 20000286 PARAMETER Experiment Name: At_Open_Flower_P Parameter: Tissue Value: Half Open vs. Whole Plant
  misc_feature: MA Experiment ID: 20000439 Result: Up-regulated in Transcription
  misc_feature: MA Experiment 20000439 PARAMETER Experiment Name: At_Roots__P Parameter: Age (day) Value: 14 vs. 21
  misc_feature: MA Experiment 20000439 PARAMETER Experiment Name: At_Roots__P Parameter: Organism Value: A. thaliana
  misc_feature: MA Experiment 20000439 PARAMETER Experiment Name: At_Roots__P Parameter: Tissue Value: Roots vs. Whole Plant
  misc_feature: MA Experiment ID: 20001757 Result: Down-regulated in Transcription
  misc_feature: MA Experiment 20001757 PARAMETER Experiment Name: At_50mM_NH4NO3_L-to-H_P Parameter: Timepoint (hr) Value: 6
  misc_feature: MA Experiment 20001757 PARAMETER Experiment Name: At_50mM_NH4NO3_L-to-H_P Parameter: Tissue Value: Leaf
  misc_feature: MA Experiment 20001757 PARAMETER Experiment Name: At_50mM_NH4NO3_L-to-H_P Parameter: Treatment Value: 50mM NH4NO3 vs 100mM Mannitol
aaacctctctcttctctcacttcccagctacttctctctctcgcgctctctctttcttttttggcaatggctactggatcaacaaccgattccgccaggtctccttcctcaggtgttctccaaaagctgttattactattctctgtctgtatagctacttcaacttataaagcaatccagcctcctccatcaaagctatgtggctctcctgatggtccatccatcacaggaccaaggattaagctaagagacggaaggcagttagcttacaaagagcatggagttcctagagatgaagctactcataaaatcatcgttgtccatggatctgatagttgcagacatgataatgctttcgcagctctactatcaccggatattaaggaaggactaggtgtgtatatggtttcatttgatagacctggttatgcagagagtgatcctgacccaaaccgtactcctaaaagcttggctttggacattgaagagcttgctgatcagttgagtctaggatcgaagttctatgtcatcggttactcgatgggaggacaagctacttgggcatgccttaaatacattcctcacaggttggctggagtaacgcttgttgctccagtggtgaactattggtggaagaactttccatcagagatctcaaccgaagcttttaaccaacaagggagaaatgaccaatgggcggttcgtgttgcacactatgctccttggcttactcattggtggaactcccagagctggttccctggatcaagtgttgtggctcgcaatctcggtatgttgtccaaagcagacaaagagatcatgtttaagctcggtgctgcaaggagccaacatgaggcacaaataaggcaacaaggaacacacgagacattgcaccgtgacatgattgttggatttggaacttgggagttcgatccaatggagctcgagaatctgttcccgaacaatgaaggatcagtgcacttgtggcagggagatgatgatgtgcttgtccctgtgactctgcaacgttacattgcgaagaagctgccatggatccattaccatgagattcctggagcagggcatttgttcccgtttgctccaggtatggttaataacattgttaaaacgctcttaaccaatgatggagtgaagaagtaaacgatgtcttctctctcaaaaagttggctagttttggttttgtaacatgcattgctatgatattttgaaccgggatcagagagattcatgagaatctcaagtttctcttggttgctgatatatattgtgggtgattagtaaagagttctggtacctatgtaaaacattctcagcattcatctcaaaaagctgtttctg

SEQ ID NO: 99147 - protein, 386 aa, Arabidopsis thaliana
  peptide (1)..(386): Ceres Seq. ID no. 13602286
  misc_feature (133)..(377): Pfam Name: alpha/beta hydrolase fold Pfam Description: alpha/beta hydrolase fold
  misc_feature (1)..(386): Homolog of NCBI NO: 28416665 NR Description: At2g36290 [Arabidopsis thaliana]
  misc_feature (23)..(386): Homolog of NCBI NO: 18404095 NR Description: hydrolase, alpha/beta fold family [Arabidopsis
  misc_feature (43)..(381): Homolog of NCBI NO: 21592662 NR Description: unknown [Arabidopsis thaliana]
  misc_feature (43)..(381): Homolog of NCBI NO: 18410582 NR Description: esterase/lipase/thioesterase family [Arabidopsis
  misc_feature (23)..(385): Homolog of NCBI NO: 21537089 NR Description: unknown [Arabidopsis thaliana]
  misc_feature (43)..(382): Homolog of NCBI NO: 18410575 NR Description: hydrolase, alpha/beta fold family [Arabidopsis
  misc_feature (23)..(382): Homolog of NCBI NO: 15221193 NR Description: esterase/lipase/thioesterase family [Arabidopsis
  misc_feature (25)..(382): Homolog of NCBI NO: 15228377 NR Description: hydrolase, alpha/beta fold family [Arabidopsis
  misc_feature (39)..(382): Homolog of NCBI NO: 38346334 NR Description: OSJNBa0073L04.5 [Oryza sativa (japonica
  misc_feature (23)..(379): Homolog of NCBI NO: 37536164 NR Description: putative alpha/beta hydrolase [Oryza sativa
KPLSSLTSQLLLSLALSLSFLAMATGSTTDSARSPSSGVLQKLLLLFSVCIATSTYKAIQPPPSKLCGSPDGPSITGPRIKLRDGRQLAYKEHGVPRDEATHKIIVVHGSDSCRHDNAFAALLSPDIKEGLGVYMVSFDRPGYAESDPDPNRTPKSLALDIEELADQLSLGSKFYVIGYSMGGQATWACLKYIPHRLAGVTLVAPVVNYWWKNFPSEISTEAFNQQGRNDQWAVRVAHYAPWLTHWWNSQSWFPGSSVVARNLGMLSKADKEIMFKLGAARSQHEAQIRQQGTHETLHRDMIVGFGTWEFDPMELENLFPNNEGSVHLWQGDDDVLVPVTLQRYIAKKLPWIHYHEIPGAGHLFPFAPGMVNNIVKTLLTNDGVKK

SEQ ID NO: 99148 - protein, 364 aa, Arabidopsis thaliana
  peptide (1)..(364): Ceres Seq. ID no. 13602287
  misc_feature (111)..(355): Pfam Name: alpha/beta hydrolase fold Pfam Description: alpha/beta hydrolase fold
  misc_feature (1)..(364): Homolog of NCBI NO: 28416665 NR Description: At2g36290 [Arabidopsis thaliana]
  misc_feature (1)..(364): Homolog of NCBI NO: 18404095 NR Description: hydrolase, alpha/beta fold family [Arabidopsis
  misc_feature (21)..(359): Homolog of NCBI NO: 21592662 NR Description: unknown [Arabidopsis thaliana]
  misc_feature (21)..(359): Homolog of NCBI NO: 18410582 NR Description: esterase/lipase/thioesterase family [Arabidopsis
  misc_feature (1)..(363): Homolog of NCBI NO: 21537089 NR Description: unknown [Arabidopsis thaliana]
  misc_feature (21)..(360): Homolog of NCBI NO: 18410575 NR Description: hydrolase, alpha/beta fold family [Arabidopsis
  misc_feature (1)..(360): Homolog of NCBI NO: 15221193 NR Description: esterase/lipase/thioesterase family [Arabidopsis
  misc_feature (3)..(360): Homolog of NCBI NO: 15228377 NR Description: hydrolase, alpha/beta fold family [Arabidopsis
  misc_feature (17)..(360): Homolog of NCBI NO: 38346334 NR Description: OSJNBa0073L04.5 [Oryza sativa (japonica
  misc_feature (1)..(357): Homolog of NCBI NO: 37536164 NR Description: putative alpha/beta hydrolase [Oryza sativa
MATGSTTDSARSPSSGVLQKLLLLFSVCIATSTYKAIQPPPSKLCGSPDGPSITGPRIKLRDGRQLAYKEHGVPRDEATHKIIVVHGSDSCRHDNAFAALLSPDIKEGLGVYMVSFDRPGYAESDPDPNRTPKSLALDIEELADQLSLGSKFYVIGYSMGGQATWACLKYIPHRLAGVTLVAPVVNYWWKNFPSEISTEAFNQQGRNDQWAVRVAHYAPWLTHWWNSQSWFPGSSVVARNLGMLSKADKEIMFKLGAARSQHEAQIRQQGTHETLHRDMIVGFGTWEFDPMELENLFPNNEGSVHLWQGDDDVLVPVTLQRYIAKKLPWIHYHEIPGAGHLFPFAPGMVNNIVKTLLTNDGVKK

SEQ ID NO: 99149 - protein, 252 aa, Arabidopsis thaliana
  peptide (1)..(252): Ceres Seq. ID no. 13602288
  misc_feature (1)..(243): Pfam Name: alpha/beta hydrolase fold Pfam Description: alpha/beta hydrolase fold
  misc_feature (1)..(252): Homolog of NCBI NO: 28416665 NR Description: At2g36290 [Arabidopsis thaliana]
  misc_feature (1)..(252): Homolog of NCBI NO: 18404095 NR Description: hydrolase, alpha/beta fold family [Arabidopsis
  misc_feature (1)..(247): Homolog of NCBI NO: 21592662 NR Description: unknown [Arabidopsis thaliana]
  misc_feature (1)..(247): Homolog of NCBI NO: 18410582 NR Description: esterase/lipase/thioesterase family [Arabidopsis
  misc_feature (1)..(251): Homolog of NCBI NO: 21537089 NR Description: unknown [Arabidopsis thaliana]
  misc_feature (1)..(248): Homolog of NCBI NO: 18410575 NR Description: hydrolase, alpha/beta fold family [Arabidopsis
  misc_feature (1)..(248): Homolog of NCBI NO: 15221193 NR Description: esterase/lipase/thioesterase family [Arabidopsis
  misc_feature (1)..(248): Homolog of NCBI NO: 15228377 NR Description: hydrolase, alpha/beta fold family [Arabidopsis
  misc_feature (1)..(248): Homolog of NCBI NO: 38346334 NR Description: OSJNBa0073L04.5 [Oryza sativa (japonica
  misc_feature (1)..(245): Homolog of NCBI NO: 37536164 NR Description: putative alpha/beta hydrolase [Oryza sativa
MVSFDRPGYAESDPDPNRTPKSLALDIEELADQLSLGSKFYVIGYSMGGQATWACLKYIPHRLAGVTLVAPVVNYWWKNFPSEISTEAFNQQGRNDQWAVRVAHYAPWLTHWWNSQSWFPGSSVVARNLGMLSKADKEIMFKLGAARSQHEAQIRQQGTHETLHRDMIVGFGTWEFDPMELENLFPNNEGSVHLWQGDDDVLVPVTLQRYIAKKLPWIHYHEIPGAGHLFPFAPGMVNNIVKTLLTNDGVKK

SEQ ID NO: 99150 - DNA, 1328 bp, Arabidopsis thaliana
  misc_feature (1)..(1328): Ceres Seq. ID no. 13602292
  misc_feature: MA Experiment ID: 108594 Result: Up-regulated in Transcription
  misc_feature: MA Experiment 108594 PARAMETER Experiment Name: At_Ler-rhl_Root_cDNA_P Parameter: Plant Line Value: null
  misc_feature: MA Experiment ID: 108595 Result: Down-regulated in Transcription
  misc_feature: MA Experiment 108595 PARAMETER Experiment Name: At_Ler-pi_Ovule_cDNA_P Parameter: Plant Line Value: null
  misc_feature: MA Experiment ID: 20000185 Result: Up-regulated in Transcription
  misc_feature: MA Experiment 20000185 PARAMETER Experiment Name: At_Roots__P Parameter: Age (day) Value: 7 vs. 21
  misc_feature: MA Experiment 20000185 PARAMETER Experiment Name: At_Roots__P Parameter: Organism Value: A. thaliana
  misc_feature: MA Experiment 20000185 PARAMETER Experiment Name: At_Roots__P Parameter: Tissue Value: Roots vs. Whole Plant
  misc_feature: MA Experiment ID: 20000439 Result: Up-regulated in Transcription
  misc_feature: MA Experiment 20000439 PARAMETER Experiment Name: At_Roots__P Parameter: Age (day) Value: 14 vs. 21
  misc_feature: MA Experiment 20000439 PARAMETER Experiment Name: At_Roots__P Parameter: Organism Value: A. thaliana
  misc_feature: MA Experiment 20000439 PARAMETER Experiment Name: At_Roots__P Parameter: Tissue Value: Roots vs. Whole Plant
  misc_feature: MA Experiment ID: 20000794 Result: Up-regulated in Transcription
  misc_feature: MA Experiment 20000794 PARAMETER Experiment Name: At_Petals_P Parameter: Age (day) Value: 23-25 days
  misc_feature: MA Experiment 20000794 PARAMETER Experiment Name: At_Petals_P Parameter: Plant Line Value: WS
  misc_feature: MA Experiment 20000794 PARAMETER Experiment Name: At_Petals_P Parameter: Tissue Value: Petals vs. Whole plant
  misc_feature: MA Experiment ID: 20001905 Result: Up-regulated in Transcription
  misc_feature: MA Experiment 20001905 PARAMETER Experiment Name: At_Drought_Reproduction_P Parameter: Age (day) Value: 40
  misc_feature: MA Experiment 20001905 PARAMETER Experiment Name: At_Drought_Reproduction_P Parameter: Organism Value: A. thaliana
  misc_feature: MA Experiment 20001905 PARAMETER Experiment Name: At_Drought_Reproduction_P Parameter: Plant Line Value: WS
  misc_feature: MA Experiment 20001905 PARAMETER Experiment Name: At_Drought_Reproduction_P Parameter: Timepoint (day) Value: 10
  misc_feature: MA Experiment 20001905 PARAMETER Experiment Name: At_Drought_Reproduction_P Parameter: Tissue Value: Rosettes
  misc_feature: MA Experiment 20001905 PARAMETER Experiment Name: At_Drought_Reproduction_P Parameter: Treatment Value: Drought vs. No Drought
aaaggattccgaaaaaagcttagacctttttgatctgatacgtatctataaatctggaaaggagctgagagtttcaaggggttttaatttcgctgagaaaacgtttaattatctttgtcgagatggattgtggtatggagaattgtaatggtgggatctcaaacggtgacgttttgggtaagcatgagaagctcattatcgatacagacccaggaattgatgatagcatggcgatattgatggcgtttcaaacaccggagctggagatattaggattaactactgtgtttggtaatgtttctacacaagatgctactcgcaacgctttactcttgtgtgagattgctggcttccctgatgttcccgttgcagaaggaagttccgaacctttaaagggtggaattccgcgtgttgctgattttgtgcatggtaaaaacggactaggagatgtctctcttcctcctccgagtagaaagaaatctgagaaaagtgcagctgagtttctagatgagaaggtcgaagaatatccgggtgaagtcaccattctcgccctcggacctctaaccaacctggcattagccatcaaacgcgatagttcatttgcgagcaaggtgaagaaaattgttattcttggtggagctttcttttctttgggaaatgtcaatcctgcagctgaggctaatatatatggtgacccggaagcagctgatgttgttttcacatctggagcggatatcactgttgtcggtataaacatcacaacccaacttaaactatcagatgatgacctcttggagcttggtaactgcaaggggaaacactctaaattgataagcgatatgtgcaaattttatagagattggcacgtcaaatctgatggtgtttacggagtgtacctccatgacccagtcagctttgtggctgtagtacggcctgatttattcacatataagaaaggcgttgttcgggtggagactcaagggatatgtgttggccacacgctcatggatcaaggcctcaagagatggaacggaagcaatccgtgggtgggatattcaccgatatcagttgcttggacggttgacgtagaaggagttttggaatatgtcaaagcaaagctgatgaagccataaaagatgagtttcagagcacgttagagtgtgaatattcatttaaaatggcatcatcacattcatctcttctggttctaaccggaatcttatattcatctctgtatttgatctgtataaatgctatattcgattaaaagaaaagactaatgaatgaaaactatcttcgttttctcttatcgatctttgtttctttcc

SEQ ID NO: 99151 - protein, 336 aa, Arabidopsis thaliana; identical to SEQ ID NO: 26357
  peptide (1)..(336): Ceres Seq. ID no. 13602293
  misc_feature (21)..(333): Pfam Name: Inosine-uridine preferring nucleoside hydrolase Pfam Description: Inosine-uridine preferring nucleoside hydrolase
  misc_feature (1)..(336): Homolog of NCBI NO: 18404099 NR Description: expressed protein [Arabidopsis thaliana] At2g36310/F2H17.8 [Arabidopsis thaliana] At2g36310/F2H17.8 [Arabidopsis thaliana]
  misc_feature (36)..(256): Homolog of NCBI NO: 25321061 NR Description: hypothetical protein At2g36310 [imported] -
  misc_feature (231)..(302): Homolog of NCBI NO: 25321061 NR Description: hypothetical protein At2g36310 [imported] -
  misc_feature (22)..(333): Homolog of NCBI NO: 30089728 NR Description: putative inosine-uridine preferring nucleoside
  misc_feature (18)..(335): Homolog of NCBI NO: 18390550 NR Description: expressed protein [Arabidopsis thaliana] unknown [Arabidopsis thaliana] >gi|25083300|gb|AAN72060.1| protein [Arabidopsis thaliana] >gi|30984540|gb|AAP42733.1|
  misc_feature (18)..(225): Homolog of NCBI NO: 25321071 NR Description: hypothetical protein [imported] - Arabidopsis >gi|4836912|gb|AAD30614.1|AC007153_6 Hypothetical protein
  misc_feature (221)..(335): Homolog of NCBI NO: 25321071 NR Description: hypothetical protein [imported] - Arabidopsis >gi|4836912|gb|AAD30614.1|AC007153_6 Hypothetical protein
  misc_feature (19)..(335): Homolog of NCBI NO: 15888904 NR Description: AGR_C_2923p [Agrobacterium tumefaciens]
  misc_feature (19)..(335): Homolog of NCBI NO: 17935486 NR Description: inosine-uridine preferring nucleoside hydrolase
  misc_feature (23)..(326): Homolog of NCBI NO: 22984963 NR Description: hypothetical protein [Burkholderia fungorum]

SEQ ID NO: 99152 - protein, 332 aa, Arabidopsis thaliana; identical to SEQ ID NO: 26358
  peptide (1)..(332): Ceres Seq. ID no. 13602294
  misc_feature (17)..(329): Pfam Name: Inosine-uridine preferring nucleoside hydrolase Pfam Description: Inosine-uridine preferring nucleoside hydrolase
  misc_feature (1)..(332): Homolog of NCBI NO: 18404099 NR Description: expressed protein [Arabidopsis thaliana] At2g36310/F2H17.8 [Arabidopsis thaliana] At2g36310/F2H17.8 [Arabidopsis thaliana]
  misc_feature (32)..(252): Homolog of NCBI NO: 25321061 NR Description: hypothetical protein At2g36310 [imported] -
  misc_feature (227)..(298): Homolog of NCBI NO: 25321061 NR Description: hypothetical protein At2g36310 [imported] -
  misc_feature (18)..(329): Homolog of NCBI NO: 30089728 NR Description: putative inosine-uridine preferring nucleoside
  misc_feature (14)..(331): Homolog of NCBI NO: 18390550 NR Description: expressed protein [Arabidopsis thaliana] unknown [Arabidopsis thaliana] >gi|25083300|gb|AAN72060.1| protein [Arabidopsis thaliana] >gi|30984540|gb|AAP42733.1|
  misc_feature (14)..(221): Homolog of NCBI NO: 25321071 NR Description: hypothetical protein [imported] - Arabidopsis >gi|4836912|gb|AAD30614.1|AC007153_6 Hypothetical protein
  misc_feature (217)..(331): Homolog of NCBI NO: 25321071 NR Description: hypothetical protein [imported] - Arabidopsis >gi|4836912|gb|AAD30614.1|AC007153_6 Hypothetical protein
  misc_feature (15)..(331): Homolog of NCBI NO: 15888904 NR Description: AGR_C_2923p [Agrobacterium tumefaciens]
  misc_feature (15)..(331): Homolog of NCBI NO: 17935486 NR Description: inosine-uridine preferring nucleoside hydrolase
  misc_feature (19)..(322): Homolog of NCBI NO: 22984963 NR Description: hypothetical protein [Burkholderia fungorum]

SEQ ID NO: 99153 - protein, 301 aa, Arabidopsis thaliana; identical to SEQ ID NO: 26359
  peptide (1)..(301): Ceres Seq. ID no. 13602295
  misc_feature (1)..(298): Pfam Name: Inosine-uridine preferring nucleoside hydrolase Pfam Description: Inosine-uridine preferring nucleoside hydrolase
  misc_feature (1)..(301): Homolog of NCBI NO: 18404099 NR Description: expressed protein [Arabidopsis thaliana] At2g36310/F2H17.8 [Arabidopsis thaliana] At2g36310/F2H17.8 [Arabidopsis thaliana]
  misc_feature (1)..(221): Homolog of NCBI NO: 25321061 NR Description: hypothetical protein At2g36310 [imported] -
  misc_feature (196)..(267): Homolog of NCBI NO: 25321061 NR Description: hypothetical protein At2g36310 [imported] -
  misc_feature (1)..(298): Homolog of NCBI NO: 30089728 NR Description: putative inosine-uridine preferring nucleoside
  misc_feature (1)..(300): Homolog of NCBI NO: 18390550 NR Description: expressed protein [Arabidopsis thaliana] unknown [Arabidopsis thaliana] >gi|25083300|gb|AAN72060.1| protein [Arabidopsis thaliana] >gi|30984540|gb|AAP42733.1|
  misc_feature (1)..(190): Homolog of NCBI NO: 25321071 NR Description: hypothetical protein [imported] - Arabidopsis >gi|4836912|gb|AAD30614.1|AC007153_6 Hypothetical protein
  misc_feature (186)..(300): Homolog of NCBI NO: 25321071 NR Description: hypothetical protein [imported] - Arabidopsis >gi|4836912|gb|AAD30614.1|AC007153_6 Hypothetical protein
  misc_feature (1)..(300): Homolog of NCBI NO: 15888904 NR Description: AGR_C_2923p [Agrobacterium tumefaciens]
  misc_feature (1)..(300): Homolog of NCBI NO: 17935486 NR Description: inosine-uridine preferring nucleoside hydrolase
  misc_feature (1)..(291): Homolog of NCBI NO: 22984963 NR Description: hypothetical protein [Burkholderia fungorum]

SEQ ID NO: 99154 - DNA, 2763 bp, Arabidopsis thaliana
  misc_feature (1)..(2763): Ceres Seq. ID no. 13602300
  misc_feature: MA Experiment ID: 108435 Result: Down-regulated in Transcription
  misc_feature: MA Experiment 108435 PARAMETER Experiment Name: At_stm_Mutants_cDNA_P Parameter: Plant Line Value: wt Landsburg vs stm
  misc_feature: MA Experiment 108435 PARAMETER Experiment Name: At_stm_Mutants_cDNA_P Parameter: Tissue Value: Shoot Apical Meristem Region
  misc_feature: MA Experiment ID: 20000069 Result: Up-regulated in Transcription
  misc_feature: MA Experiment 20000069 PARAMETER Experiment Name: At_100uM_ABA_Mutants_cDNA_P Parameter: Plant Line Value: CS23
  misc_feature: MA Experiment 20000069 PARAMETER Experiment Name: At_100uM_ABA_Mutants_cDNA_P Parameter: Timepoint (hr) Value: 6
  misc_feature: MA Experiment 20000069 PARAMETER Experiment Name: At_100uM_ABA_Mutants_cDNA_P Parameter: Tissue Value: Aerial
  misc_feature: MA Experiment 20000069 PARAMETER Experiment Name: At_100uM_ABA_Mutants_cDNA_P Parameter: Treatment Value: 100uM ABA vs. No Treatment
  misc_feature: MA Experiment ID: 20000070 Result: Up-regulated in Transcription
  misc_feature: MA Experiment 20000070 PARAMETER Experiment Name: At_100uM_ABA_Mutants_cDNA_P Parameter: Plant Line Value: CS24
  misc_feature: MA Experiment 20000070 PARAMETER Experiment Name: At_100uM_ABA_Mutants_cDNA_P Parameter: Timepoint (hr) Value: 6
  misc_feature: MA Experiment 20000070 PARAMETER Experiment Name: At_100uM_ABA_Mutants_cDNA_P Parameter: Tissue Value: Aerial
  misc_feature: MA Experiment 20000070 PARAMETER Experiment Name: At_100uM_ABA_Mutants_cDNA_P Parameter: Treatment Value: 100uM ABA vs. No Treatment
  misc_feature: MA Experiment ID: 20000071 Result: Up-regulated in Transcription
  misc_feature: MA Experiment 20000071 PARAMETER Experiment Name: At_100uM_ABA_Mutants_cDNA_P Parameter: Plant Line Value: CS8104
  misc_feature: MA Experiment 20000071 PARAMETER Experiment Name: At_100uM_ABA_Mutants_cDNA_P Parameter: Timepoint (hr) Value: 6
  misc_feature: MA Experiment 20000071 PARAMETER Experiment Name: At_100uM_ABA_Mutants_cDNA_P Parameter: Tissue Value: Aerial
  misc_feature: MA Experiment 20000071 PARAMETER Experiment Name: At_100uM_ABA_Mutants_cDNA_P Parameter: Treatment Value: 100uM ABA vs. No Treatment
  misc_feature: MA Experiment ID: 20000072 Result: Up-regulated in Transcription
  misc_feature: MA Experiment 20000072 PARAMETER Experiment Name: At_100uM_ABA_Mutants_cDNA_P Parameter: Plant Line Value: CS8105
  misc_feature: MA Experiment 20000072 PARAMETER Experiment Name: At_100uM_ABA_Mutants_cDNA_P Parameter: Timepoint (hr) Value: 6
  misc_feature: MA Experiment 20000072 PARAMETER Experiment Name: At_100uM_ABA_Mutants_cDNA_P Parameter: Tissue Value: Aerial
  misc_feature: MA Experiment 20000072 PARAMETER Experiment Name: At_100uM_ABA_Mutants_cDNA_P Parameter: Treatment Value: 100uM ABA vs. No Treatment
  misc_feature: MA Experiment ID: 20000086 Result: Up-regulated in Transcription
  misc_feature: MA Experiment 20000086 PARAMETER Experiment Name: At_100uM_ABA_Mutants_cDNA_P Parameter: Plant Line Value: CS22
  misc_feature: MA Experiment 20000086 PARAMETER Experiment Name: At_100uM_ABA_Mutants_cDNA_P Parameter: Timepoint (hr) Value: 6
  misc_feature: MA Experiment 20000086 PARAMETER Experiment Name: At_100uM_ABA_Mutants_cDNA_P Parameter: Tissue Value: Aerial
  misc_feature: MA Experiment 20000086 PARAMETER Experiment Name: At_100uM_ABA_Mutants_cDNA_P Parameter: Treatment Value: 100uM ABA vs. No Treatment
  misc_feature: MA Experiment ID: 20000087 Result: Up-regulated in Transcription
  misc_feature: MA Experiment 20000087 PARAMETER Experiment Name: At_100uM_ABA_Mutants_cDNA_P Parameter: Plant Line Value: WS
  misc_feature: MA Experiment 20000087 PARAMETER Experiment Name: At_100uM_ABA_Mutants_cDNA_P Parameter: Timepoint (hr) Value: 6
  misc_feature: MA Experiment 20000087 PARAMETER Experiment Name: At_100uM_ABA_Mutants_cDNA_P Parameter: Tissue Value: Aerial
  misc_feature: MA Experiment 20000087 PARAMETER Experiment Name: At_100uM_ABA_Mutants_cDNA_P Parameter: Treatment Value: 100uM ABA vs. No Treatment
  misc_feature: MA Experiment ID: 20000088 Result: Up-regulated in Transcription
  misc_feature: MA Experiment 20000088 PARAMETER Experiment Name: At_100uM_ABA_Mutants_cDNA_P Parameter: Plant Line Value: Landsberg
  misc_feature: MA Experiment 20000088 PARAMETER Experiment Name: At_100uM_ABA_Mutants_cDNA_P Parameter: Timepoint (hr) Value: 6
  misc_feature: MA Experiment 20000088 PARAMETER Experiment Name: At_100uM_ABA_Mutants_cDNA_P Parameter: Tissue Value: Aerial
  misc_feature: MA Experiment 20000088 PARAMETER Experiment Name: At_100uM_ABA_Mutants_cDNA_P Parameter: Treatment Value: 100uM ABA vs. No Treatment
  misc_feature: MA Experiment ID: 20000089 Result: Up-regulated in Transcription
  misc_feature: MA Experiment ID: 20000090 Result: Up-regulated in Transcription
  misc_feature: MA Experiment ID: 20000112 Result: Down-regulated in Transcription
  misc_feature: MA Experiment 20000112 PARAMETER Experiment Name: At_42deg_Heat_cDNA_P Parameter: Temperature (deg C) Value: 42 vs. 22
  misc_feature: MA Experiment 20000112 PARAMETER Experiment Name: At_42deg_Heat_cDNA_P Parameter: Timepoint (hr) Value: 2
  misc_feature: MA Experiment 20000112 PARAMETER Experiment Name: At_42deg_Heat_cDNA_P Parameter: Tissue Value: Aerial
  misc_feature: MA Experiment ID: 20000113 Result: Down-regulated in Transcription
  misc_feature: MA Experiment 20000113 PARAMETER Experiment Name: At_42deg_Heat_cDNA_P Parameter: Temperature (deg C) Value: 42 vs. 22
  misc_feature: MA Experiment 20000113 PARAMETER Experiment Name: At_42deg_Heat_cDNA_P Parameter: Timepoint (hr) Value: 8
  misc_feature: MA Experiment 20000113 PARAMETER Experiment Name: At_42deg_Heat_cDNA_P Parameter: Tissue Value: Aerial
  misc_feature: MA Experiment ID: 20000117 Result: Up-regulated in Transcription
  misc_feature: MA Experiment 20000117 PARAMETER Experiment Name: At_100uM_ABA_Mutants_cDNA_P Parameter: Plant Line Value: Columbia
  misc_feature: MA Experiment 20000117 PARAMETER Experiment Name: At_100uM_ABA_Mutants_cDNA_P Parameter: Timepoint (hr) Value: 6
  misc_feature: MA Experiment 20000117 PARAMETER Experiment Name: At_100uM_ABA_Mutants_cDNA_P Parameter: Tissue Value: Aerial
  misc_feature: MA Experiment 20000117 PARAMETER Experiment Name: At_100uM_ABA_Mutants_cDNA_P Parameter: Treatment Value: 100uM ABA vs. No Treatment
  misc_feature: MA Experiment ID: 20000173 Result: Down-regulated in Transcription
  misc_feature: MA Experiment 20000173 PARAMETER Experiment Name: At_42deg_Heat_P Parameter: Age (day) Value: 14
  misc_feature: MA Experiment 20000173 PARAMETER Experiment Name: At_42deg_Heat_P Parameter: Organism Value: A. thaliana
  misc_feature: MA Experiment 20000173 PARAMETER Experiment Name: At_42deg_Heat_P Parameter: Plant Line Value: WS
  misc_feature: MA Experiment 20000173 PARAMETER Experiment Name: At_42deg_Heat_P Parameter: Temperature (deg C) Value: 42 vs. 22
  misc_feature: MA Experiment 20000173 PARAMETER Experiment Name: At_42deg_Heat_P Parameter: Timepoint (hr) Value: 6
  misc_feature: MA Experiment 20000173 PARAMETER Experiment Name: At_42deg_Heat_P Parameter: Tissue Value: Aerial
  misc_feature: MA Experiment ID: 20000182 Result: Down-regulated in Transcription
  misc_feature: MA Experiment 20000182 PARAMETER Experiment Name: At_2mM_SA_P Parameter: Age (day) Value: 14
  misc_feature: MA Experiment 20000182 PARAMETER Experiment Name: At_2mM_SA_P Parameter: Organism Value: A. thaliana
  misc_feature: MA Experiment 20000182 PARAMETER Experiment Name: At_2mM_SA_P Parameter: Plant Line Value: WS
  misc_feature: MA Experiment 20000182 PARAMETER Experiment Name: At_2mM_SA_P Parameter: Timepoint (hr) Value: 6
  misc_feature: MA Experiment 20000182 PARAMETER Experiment Name: At_2mM_SA_P Parameter: Tissue Value: Aerial
  misc_feature: MA Experiment 20000182 PARAMETER Experiment Name: At_2mM_SA_P Parameter: Treatment Value: 2mM SA vs. No Treatment
  misc_feature: MA Experiment ID: 20000184 Result: Down-regulated in Transcription
  misc_feature: MA Experiment 20000184 PARAMETER Experiment Name: At_Shoots__P Parameter: Age (day) Value: 7
  misc_feature: MA Experiment 20000184 PARAMETER Experiment Name: At_Shoots__P Parameter: Tissue Value: Shoots vs. Whole Plant
  misc_feature: MA Experiment ID: 20000437 Result: Up-regulated in Transcription
  misc_feature: MA Experiment 20000437 PARAMETER Experiment Name: At_Drought_P Parameter: Age (day) Value: 8
  misc_feature: MA Experiment 20000437 PARAMETER Experiment Name: At_Drought_P Parameter: Organism Value: A. thaliana
  misc_feature: MA Experiment 20000437 PARAMETER Experiment Name: At_Drought_P Parameter: Plant Line Value: WS
  misc_feature: MA Experiment 20000437 PARAMETER Experiment Name: At_Drought_P Parameter: Timepoint (hr) Value: 24
  misc_feature: MA Experiment 20000437 PARAMETER Experiment Name: At_Drought_P Parameter: Tissue Value: Whole Plant
  misc_feature: MA Experiment 20000437 PARAMETER Experiment Name: At_Drought_P Parameter: Treatment Value: Drought vs. No Drought
  misc_feature: MA Experiment ID: 20000438 Result: Down-regulated in Transcription
  misc_feature: MA Experiment 20000438 PARAMETER Experiment Name: At_Shoots__P Parameter: Age (day) Value: 14
  misc_feature: MA Experiment 20000438 PARAMETER Experiment Name: At_Shoots__P Parameter: Tissue Value: Shoots vs. Whole Plant
  misc_feature: MA Experiment ID: 20001451 Result: Down-regulated in Transcription
  misc_feature: MA Experiment 20001451 PARAMETER Experiment Name: At_Far-red-induction_P Parameter: Age (day) Value: 7
  misc_feature: MA Experiment 20001451 PARAMETER Experiment Name: At_Far-red-induction_P Parameter: Light Value: Far-red vs. White
  misc_feature: MA Experiment 20001451 PARAMETER Experiment Name: At_Far-red-induction_P Parameter: Organism Value: A. thaliana
  misc_feature: MA Experiment 20001451 PARAMETER Experiment Name: At_Far-red-induction_P Parameter: Plant Line Value: Columbia
  misc_feature: MA Experiment 20001451 PARAMETER Experiment Name: At_Far-red-induction_P Parameter: Timepoint (hr) Value: 24
  misc_feature: MA Experiment 20001451 PARAMETER Experiment Name: At_Far-red-induction_P Parameter: Tissue Value: Whole Plant
  misc_feature: MA Experiment ID: 20001555 Result: Up-regulated in Transcription
  misc_feature: MA Experiment 20001555 PARAMETER Experiment Name: At_Drought_Soil_Dry_P Parameter: Age (day) Value: 24
  misc_feature: MA Experiment 20001555 PARAMETER Experiment Name: At_Drought_Soil_Dry_P Parameter: Organism Value: A. thaliana
  misc_feature: MA Experiment 20001555 PARAMETER Experiment Name: At_Drought_Soil_Dry_P Parameter: Plant Line Value: WS
  misc_feature: MA Experiment 20001555 PARAMETER Experiment Name: At_Drought_Soil_Dry_P Parameter: Post Timepoint (hr) Value: None
  misc_feature: MA Experiment 20001555 PARAMETER Experiment Name: At_Drought_Soil_Dry_P Parameter: Post-Treatment Value: None
  misc_feature: MA Experiment 20001555 PARAMETER Experiment Name: At_Drought_Soil_Dry_P Parameter: Timepoint (day) Value: 10
  misc_feature: MA Experiment 20001555 PARAMETER Experiment Name: At_Drought_Soil_Dry_P Parameter: Treatment Value: Drought vs. No Drought
  misc_feature: MA Experiment ID: 20001558 Result: Down-regulated in Transcription
  misc_feature: MA Experiment 20001558 PARAMETER Experiment Name: At_Drought_Soil_Dry_P Parameter: Age (day) Value: 27
  misc_feature: MA Experiment 20001558 PARAMETER Experiment Name: At_Drought_Soil_Dry_P Parameter: Organism Value: A. thaliana
  misc_feature: MA Experiment 20001558 PARAMETER Experiment Name: At_Drought_Soil_Dry_P Parameter: Plant Line Value: WS
  misc_feature: MA Experiment 20001558 PARAMETER Experiment Name: At_Drought_Soil_Dry_P Parameter: Post Timepoint (hr) Value: 6
  misc_feature: MA Experiment 20001558 PARAMETER Experiment Name: At_Drought_Soil_Dry_P Parameter: Post-Treatment Value: Re-Water vs. No Drought
  misc_feature: MA Experiment 20001558 PARAMETER Experiment Name: At_Drought_Soil_Dry_P Parameter: Timepoint (day) Value: 13
  misc_feature: MA Experiment 20001558 PARAMETER Experiment Name: At_Drought_Soil_Dry_P Parameter: Treatment Value: Drought vs. No Drought
actctctcttcccaaagttctctgtaaaactctctctccgtcttcaatggtttacacgatttcaggcgtacgttttcctcatcttccatcgattaagaagaagaattcgtctcttcacagtttcaatgaagatctcaggagaagcaacgctgtctcattctctctgaggaaggactctcgttcttctgggaaggtttttgctcggaagccatcgtatgattctgattcgtcttccttagctaccactgcatctgagaagctccgtggccatcagagtgatagctcttcatctgcctctgatcaagtacaatctcgggatactgtctctgacgatactcaggtgctcggcaatgtagacgttcagaaaactgaagaagcccaggaaacagagacactagatcaaacttctgcactctcaacatctggaagcataagttataaagaagattttgcaaagatgtcacactctgtcgaccaagaagttgggcagaggaagattccacctcctggagatgggaagagaatatatgacattgatcctatgttgaacagtcatcgtaatcatcttgattaccgatatgggcagtacagaaaactgcgtgaagaaattgacaagaatgaaggtggtttggaggcattttctcgtggttatgaaatatttggcttcactcgaagcgccactggtatcacttaccgggaatgggcaccgggagctaaggcagcatcactgatcggagattttaataactggaatgcgaaatctgatgttatggctcggaacgactttggtgtgtgggaaatatttctgccaaataatgctgatggctcaccagcaattccccatggctcccgtgtgaagatccgcatggataccccatctggtattaaagactccattccagcttggatcaagtattctgtccagccacctggcgagatcccatataatggagtatattatgaccctcctgaggaggataaatatgcgttcaaacatcctcgtccaaagaaacccacatcgctgcgtatatatgaatcacatgttggaatgagtagtacggaaccaaagataaatacatatgccaactttagagatgatgtacttccccgtataaaaaagctaggctataatgctgtgcagataatggccattcaagagcatgcctactatgccagctttgggtatcatgtgacaaattttttcgcacctagcagccgctttggaacacctgatgaccttaaatctttgatagacaaagctcatgagctaggtctggttgttctgatggatattgtgcacagccatgcatcaaaaaacacactggatggcctggacatgtttgatggtactgatggtcaatatttccactctggatcgcgtggttatcattggatgtgggattctcgtcttttcaattacggaagctgggaagtgcttaggtatcttctttccaacgcgagatggtggctggaagaatacaagtttgatgggttcagatttgatggtgtgacttccatgatgtacactcatcatggactgcaggtcgaatttactgggaattacaatgagtactttggatattctactgatgttgacgctgtggtctatctaatgctggtgaacgatttgattcatgggctataccctgaggctattgttgtcggcgaagatgttagcgggatgccagctttttgcgttcctgtcgaagacggtggtgtgggttttgactaccgtctacacatggcagtggcagataaatggattgagcttcttaagaagagagacgaggactggcaggttggtgatataactttcacgcttaccaacaggaggtggggagaaaaatgtgtcgtctatgcagagagtcatgatcaagcccttgttggagacaaaacgatagctttctggctaatggataaggacatgtatgatttcatggccgttgatagacaggccactccgcgtgtagaccgtgggattgctttacacaaaatgatccgtctcattacgatgggattgggtggagaaggatacctcaatttcatgggaaacgaatttggacacccagaatggatcgacttcccaaggaccgaccagcaccttcctgatggcagagtcatcgctgggaataatggtagttatgataaatgccgacgtaggtttgatctgggagatgcagaatatcttagataccatggactacaagagtttgatcgagcaatgcaaaatctagaggagacgtatggtttcatgacttcagagcaccagtacatatcccgcaaggatgaaggagacagagtcattgtattcgagagaggtaacttgctcttcgtcttcaacttccactggaccaacagttactctgactaccgtatcggttgctctgttcccggaaagtacaaaatcgttttggactctgataactctttatttggaggcttcaaccggctagatgactccgcggagtttttcacctctgatggaaggcacgacgataggccttgctccttcatggtgtatgcaccgtgcagaaccgctgtagtttacgctgcagtagatgatgatgatgatgatgaacgttcttctcttgtccccataggcctgttacccgaagatgtttaggagcaaagacagttgtccgagtttacctactgtaagcttctttgtactacaaaaatttactcgttgatcttcttctcctttagttttcgcttgcagcatcattataacttaaaaatgaaataaaaagtcgttgcacttct

SEQ ID NO: 99155 - protein, 873 aa, Arabidopsis thaliana; identical to SEQ ID NO: 27072
  peptide (1)..(873): Ceres Seq. ID no. 13602301
  misc_feature (109)..(853): Homolog of NCBI NO: 3822022 NR Description: starch branching enzyme IIb [Hordeum vulgare]
  misc_feature (175)..(873): Homolog of NCBI NO: 1771261 NR Description: 1,4-alpha-glucan branching enzyme [Manihot
  misc_feature (175)..(854): Homolog of NCBI NO: 7433851 NR Description: 1,4-alpha-glucan branching enzyme (EC 2.4.1.18) I
  misc_feature (175)..(864): Homolog of NCBI NO: 5441248 NR Description: branching enzyme 3 [Phaseolus vulgaris]
  misc_feature (175)..(826): Homolog of NCBI NO: 1169912 NR Description: 1,4-alpha-glucan branching enzyme (Starch
  misc_feature (171)..(854): Homolog of NCBI NO: 32186932 NR Description: starch branching enzyme I [Hordeum vulgare]
  misc_feature (175)..(854): Homolog of NCBI NO: 4586236 NR Description: starch branching enzyme I [Triticum aestivum]
  misc_feature (175)..(854): Homolog of NCBI NO: 4586237 NR Description: starch branching enzyme I [Triticum aestivum]
  misc_feature (175)..(854): Homolog of NCBI NO: 4586238 NR Description: starch branching enzyme I [Triticum aestivum]
  misc_feature (175)..(854): Homolog of NCBI NO: 11037532 NR Description: starch branching enyzyme 1 [Triticum aestivum]

SEQ ID NO: 99156 - protein, 858 aa, Arabidopsis thaliana; identical to SEQ ID NO: 27073
  peptide (1)..(858): Ceres Seq. ID no. 13602302
  misc_feature (94)..(838): Homolog of NCBI NO: 3822022 NR Description: starch branching enzyme IIb [Hordeum vulgare]
  misc_feature (160)..(858): Homolog of NCBI NO: 1771261 NR Description: 1,4-alpha-glucan branching enzyme [Manihot
  misc_feature (160)..(839): Homolog of NCBI NO: 7433851 NR Description: 1,4-alpha-glucan branching enzyme (EC 2.4.1.18) I
  misc_feature (160)..(849): Homolog of NCBI NO: 5441248 NR Description: branching enzyme 3 [Phaseolus vulgaris]
  misc_feature (160)..(811): Homolog of NCBI NO: 1169912 NR Description: 1,4-alpha-glucan branching enzyme (Starch
  misc_feature (156)..(839): Homolog of NCBI NO: 32186932 NR Description: starch branching enzyme I [Hordeum vulgare]
  misc_feature (160)..(839): Homolog of NCBI NO: 4586236 NR Description: starch branching enzyme I [Triticum aestivum]
  misc_feature (160)..(839): Homolog of NCBI NO: 4586237 NR Description: starch branching enzyme I [Triticum aestivum]
  misc_feature (160)..(839): Homolog of NCBI NO: 11037532 NR Description: starch branching enyzyme 1 [Triticum aestivum]
  misc_feature (160)..(839): Homolog of NCBI NO: 4586238 NR Description: starch branching enzyme I [Triticum aestivum]

SEQ ID NO: 99157 - protein, 721 aa, Arabidopsis thaliana; identical to SEQ ID NO: 27074
  peptide (1)..(721): Ceres Seq. ID no. 13602303
  misc_feature (1)..(701): Homolog of NCBI NO: 3822022 NR Description: starch branching enzyme IIb [Hordeum vulgare]
  misc_feature (23)..(721): Homolog of NCBI NO: 1771261 NR Description: 1,4-alpha-glucan branching enzyme [Manihot
  misc_feature (23)..(702): Homolog of NCBI NO: 7433851 NR Description: 1,4-alpha-glucan branching enzyme (EC 2.4.1.18) I
  misc_feature (23)..(712): Homolog of NCBI NO: 5441248 NR Description: branching enzyme 3 [Phaseolus vulgaris]
  misc_feature (23)..(674): Homolog of NCBI NO: 1169912 NR Description: 1,4-alpha-glucan branching enzyme (Starch
  misc_feature (19)..(702): Homolog of NCBI NO: 32186932 NR Description: starch branching enzyme I [Hordeum vulgare]
  misc_feature (23)..(702): Homolog of NCBI NO: 4586236 NR Description: starch branching enzyme I [Triticum aestivum]
  misc_feature (23)..(702): Homolog of NCBI NO: 4586238 NR Description: starch branching enzyme I [Triticum aestivum]
  misc_feature (23)..(702): Homolog of NCBI NO: 11037532 NR Description: starch branching enyzyme 1 [Triticum aestivum]
  misc_feature (23)..(702): Homolog of NCBI NO: 4586237 NR Description: starch branching enzyme I [Triticum aestivum]

SEQ ID NO: 99158 - DNA, 1544 bp, Arabidopsis thaliana
  misc_feature (1)..(1544): Ceres Seq. ID no. 13602304
  misc_feature: MA Experiment ID: 108434 Result: Down-regulated in Transcription
  misc_feature: MA Experiment 108434 PARAMETER Experiment Name: At_Root_Tips_cDNA_P Parameter: Tissue Value: Root Tips
  misc_feature: MA Experiment ID: 108461 Result: Down-regulated in Transcription
  misc_feature: MA Experiment 108461 PARAMETER Experiment Name: At_Germinating_Seeds_cDNA_P Parameter: Age (day) Value: 1 vs. 0
  misc_feature: MA Experiment 108461 PARAMETER Experiment Name: At_Germinating_Seeds_cDNA_P Parameter: Tissue Value: Germinating Seeds
  misc_feature: MA Experiment ID: 108572 Result: Up-regulated in Transcription
  misc_feature: MA Experiment 108572 PARAMETER Experiment Name: At_Drought_cDNA_P Parameter: Timepoint (hr) Value: 1
  misc_feature: MA Experiment 108572 PARAMETER Experiment Name: At_Drought_cDNA_P Parameter: Tissue Value: Aerial
  misc_feature: MA Experiment 108572 PARAMETER Experiment Name: At_Drought_cDNA_P Parameter: Treatment Value: Drought vs. No Drought
  misc_feature: MA Experiment ID: 108573 Result: Up-regulated in Transcription
  misc_feature: MA Experiment 108573 PARAMETER Experiment Name: At_Drought_cDNA_P Parameter: Timepoint (hr) Value: 6
  misc_feature: MA Experiment 108573 PARAMETER Experiment Name: At_Drought_cDNA_P Parameter: Tissue Value: Aerial
  misc_feature: MA Experiment 108573 PARAMETER Experiment Name: At_Drought_cDNA_P Parameter: Treatment Value: Drought vs. No Drought
  misc_feature: MA Experiment ID: 108574 Result: Up-regulated in Transcription
  misc_feature: MA Experiment 108574 PARAMETER Experiment Name: At_Wounding__cDNA_P Parameter: Timepoint (hr) Value: 1
  misc_feature: MA Experiment 108574 PARAMETER Experiment Name: At_Wounding__cDNA_P Parameter: Tissue Value: Aerial
  misc_feature: MA Experiment 108574 PARAMETER Experiment Name: At_Wounding__cDNA_P Parameter: Treatment Value: Wounding vs. No Wounding
  misc_feature: MA Experiment ID: 108668 Result: Up-regulated in Transcription
  misc_feature: MA Experiment 108668 PARAMETER Experiment Name: At_2mM_SA_cDNA_P Parameter: Plant Line Value: WS
  misc_feature: MA Experiment 108668 PARAMETER Experiment Name: At_2mM_SA_cDNA_P Parameter: Timepoint (hr) Value: 6
  misc_feature: MA Experiment 108668 PARAMETER Experiment Name: At_2mM_SA_cDNA_P Parameter: Treatment Value: 2mM SA vs. No Treatment
  misc_feature: MA Experiment ID: 20000069 Result: Down-regulated in Transcription
  misc_feature: MA Experiment 20000069 PARAMETER Experiment Name: At_100uM_ABA_Mutants_cDNA_P Parameter: Plant Line Value: CS23
  misc_feature: MA Experiment 20000069 PARAMETER Experiment Name: At_100uM_ABA_Mutants_cDNA_P Parameter: Timepoint (hr) Value: 6
  misc_feature: MA Experiment 20000069 PARAMETER Experiment Name: At_100uM_ABA_Mutants_cDNA_P Parameter: Tissue Value: Aerial
  misc_feature: MA Experiment 20000069 PARAMETER Experiment Name: At_100uM_ABA_Mutants_cDNA_P Parameter: Treatment Value: 100uM ABA vs. No Treatment
  misc_feature: MA Experiment ID: 20000327 Result: Down-regulated in Transcription
  misc_feature: MA Experiment 20000327 PARAMETER Experiment Name: At_42deg_Heat_Sub_P Parameter: Age (day) Value: 14
  misc_feature: MA Experiment 20000327 PARAMETER Experiment Name: At_42deg_Heat_Sub_P Parameter: Organism Value: A. thaliana
  misc_feature: MA Experiment 20000327 PARAMETER Experiment Name: At_42deg_Heat_Sub_P Parameter: Plant Line Value: WS
  misc_feature: MA Experiment 20000327 PARAMETER Experiment Name: At_42deg_Heat_Sub_P Parameter: Temperature (deg C) Value: 42 vs. 22
  misc_feature: MA Experiment 20000327 PARAMETER Experiment Name: At_42deg_Heat_Sub_P Parameter: Timepoint (hr) Value: 1
  misc_feature: MA Experiment 20000327 PARAMETER Experiment Name: At_42deg_Heat_Sub_P Parameter: Tissue Value: Aerial
  misc_feature: MA Experiment ID: 20000328 Result: Down-regulated in Transcription
  misc_feature: MA Experiment 20000328 PARAMETER Experiment Name: At_42deg_Heat_Sub_P Parameter: Age (day) Value: 14
  misc_feature: MA Experiment 20000328 PARAMETER Experiment Name: At_42deg_Heat_Sub_P Parameter: Organism Value: A. thaliana
  misc_feature: MA Experiment 20000328 PARAMETER Experiment Name: At_42deg_Heat_Sub_P Parameter: Plant Line Value: WS
  misc_feature: MA Experiment 20000328 PARAMETER Experiment Name: At_42deg_Heat_Sub_P Parameter: Temperature (deg C) Value: 42 vs. 22
  misc_feature: MA Experiment 20000328 PARAMETER Experiment Name: At_42deg_Heat_Sub_P Parameter: Timepoint (hr) Value: 6
  misc_feature: MA Experiment 20000328 PARAMETER Experiment Name: At_42deg_Heat_Sub_P Parameter: Tissue Value: Aerial
  misc_feature: MA Experiment ID: 20000440 Result: Up-regulated in Transcription
  misc_feature: MA Experiment 20000440 PARAMETER Experiment Name: At_Closed-Flower__Sub_P Parameter: Tissue Value: Closed Flower vs. Whole Plant
aatgaaagaaactgttcaacaacttctgatttctaaaatcttttaaaaatctctccgccacttctagttggacttgatttctcaccatagtctgtcccgttgttaccgaccatctattatatagggaaagtctcttagctacagagacacaataaccatttggagaggtcatgaactctaagaatcgcataaacaatgtcggggaaggtgttgatatcgaaatccctgacactgctcatcagattagcagcgattcatggtttcaggcagcgttcgttctgacaacaagtataaacagcgcatacgtgttgggatattcaggaacagtcatggttcctttaggatggattggtggtgtggttggtcttattcttgctactgcaatctcactctatgcaaacactctcgtagccaagcttcatgagtttggtggcaaaagacacattcgctatagagaccttgcgggattcatttacggtagaaaggcttattgtcttacatgggtgttgcaatatgtcaatcttttcatgattaattgtggtttcatcatactagctggttccgccttaaaggctgtttatgtgctttttagggatgatcatgccatgaagttacctcattttatagctattgcgggtctgatttgtgcggtttttgctattggaattcctcatttgtcggctcttgggatatggcttgcggtttcgactatcctcagcctcatctatatcgttgtggcaatcgtgctatcggttaaagatggagttaaagcaccttcaagagattacgagatacaaggatcaccactaagcaaactttttaccatcactggagcagccgctacactagttttcgtattcaacacagggatgcttccagaaattcaggcaacagtaaagcaaccagtagtaaaaaacatgatgaaggctctatactttcaattcacggtgggtgttttaccgatgtttgcggttgtattcatcgggtattgggcttacggatcctcgacctcgccctatctactaaacaacgttaatggtccactttgggttaaagcccttgctaacatctccgctatccttcaatccgttatctcgttgcacatttttgcaagtccaacatatgagtacatggacaccaagtttgggatcaaaggaaacccattggcattaaagaacttgttgtttaggatcatggcaagaggcgggtacatagcagttagtacgcttctctcagcactcttgccgttccttggggacttcatgagcctcactggtgcagtgagcacattcccccttacattcattctagccaaccacatgtactataaggctaagaacaataagctcaatactttgcaaaagctatgccattggctcaacgttgtcttcttcagtttgatgtctgttgctgccgccattgcagctcttaggctcatcgcccttgactccaaaaacttccacgtttttgcagatttgtaattcataatatatactcatcgtatttattcttagttggatttcttatcaataaaattaattttc

SEQ ID NO: 99159 - protein, 436 aa, Arabidopsis thaliana; identical to SEQ ID NO: 34897
  peptide (1)..(436): Ceres Seq. ID no. 13602305
  misc_feature (1)..(436): Homolog of NCBI NO: 15228000 NR Description: proline transporter, putative [Arabidopsis
  misc_feature (1)..(436): Homolog of NCBI NO: 21554196 NR Description: putative proline transporter [Arabidopsis
  misc_feature (3)..(436): Homolog of NCBI NO: 15225591 NR Description: proline transporter 1 (ProT1) [Arabidopsis
  misc_feature (3)..(436): Homolog of NCBI NO: 21593453 NR Description: proline transporter 1 [Arabidopsis thaliana]
  misc_feature (1)..(436): Homolog of NCBI NO: 15228183 NR Description: proline transporter 2 (ProT2) [Arabidopsis
  misc_feature (6)..(436): Homolog of NCBI NO: 21069018 NR Description: betaine/proline transporter [Avicennia marina]
  misc_feature (14)..(436): Homolog of NCBI NO: 21069020 NR Description: betaine/proline transporter [Avicennia marina]
  misc_feature (16)..(436): Homolog of NCBI NO: 8571474 NR Description: proline/glycine betaine transporter [Atriplex
  misc_feature (7)..(436): Homolog of NCBI NO: 11358950 NR Description: proline transport protein 3 [imported] - tomato
  misc_feature (1)..(436): Homolog of NCBI NO: 16215723 NR Description: proline transporter [Hordeum vulgare subsp.

SEQ ID NO: 99160 - protein, 383 aa, Arabidopsis thaliana; identical to SEQ ID NO: 34898
  peptide (1)..(383): Ceres Seq. ID no. 13602306
  misc_feature (1)..(383): Homolog of NCBI NO: 15228000 NR Description: proline transporter, putative [Arabidopsis
  misc_feature (1)..(383): Homolog of NCBI NO: 21554196 NR Description: putative proline transporter [Arabidopsis
  misc_feature (1)..(383): Homolog of NCBI NO: 15225591 NR Description: proline transporter 1 (ProT1) [Arabidopsis
  misc_feature (1)..(383): Homolog of NCBI NO: 21593453 NR Description: proline transporter 1 [Arabidopsis thaliana]
  misc_feature (1)..(383): Homolog of NCBI NO: 15228183 NR Description: proline transporter 2 (ProT2) [Arabidopsis
  misc_feature (1)..(383): Homolog of NCBI NO: 21069018 NR Description: betaine/proline transporter [Avicennia marina]
  misc_feature (1)..(383): Homolog of NCBI NO: 21069020 NR Description: betaine/proline transporter [Avicennia marina]
  misc_feature (1)..(383): Homolog of NCBI NO: 8571474 NR Description: proline/glycine betaine transporter [Atriplex
  misc_feature (1)..(383): Homolog of NCBI NO: 11358950 NR Description: proline transport protein 3 [imported] - tomato
  misc_feature (1)..(383): Homolog of NCBI NO: 16215723 NR Description: proline transporter [Hordeum vulgare subsp.

SEQ ID NO: 99161 - protein, 317 aa, Arabidopsis thaliana; identical to SEQ ID NO: 34899
  peptide (1)..(317): Ceres Seq. ID no. 13602307
  misc_feature (1)..(317): Homolog of NCBI NO: 15228000 NR Description: proline transporter, putative [Arabidopsis
  misc_feature (1)..(317): Homolog of NCBI NO: 21554196 NR Description: putative proline transporter [Arabidopsis
  misc_feature (1)..(317): Homolog of NCBI NO: 15225591 NR Description: proline transporter 1 (ProT1) [Arabidopsis
  misc_feature (1)..(317): Homolog of NCBI NO: 21593453 NR Description: proline transporter 1 [Arabidopsis thaliana]
  misc_feature (1)..(317): Homolog of NCBI NO: 15228183 NR Description: proline transporter 2 (ProT2) [Arabidopsis
  misc_feature (1)..(317): Homolog of NCBI NO: 21069018 NR Description: betaine/proline transporter [Avicennia marina]
  misc_feature (1)..(317): Homolog of NCBI NO: 21069020 NR Description: betaine/proline transporter [Avicennia marina]
  misc_feature (1)..(317): Homolog of NCBI NO: 8571474 NR Description: proline/glycine betaine transporter [Atriplex
  misc_feature (1)..(317): Homolog of NCBI NO: 11358950 NR Description: proline transport protein 3 [imported] - tomato
  misc_feature (1)..(317): Homolog of NCBI NO: 16215723 NR Description: proline transporter [Hordeum vulgare subsp.

SEQ ID NO: 99162 - DNA, 1042 bp, Arabidopsis thaliana
  misc_feature (1)..(1042): Ceres Seq. ID no. 13602312
  misc_feature: MA Experiment ID: 108464 Result: Up-regulated in Transcription
  misc_feature: MA Experiment 108464 PARAMETER Experiment Name: At_Germinating_Seeds_cDNA_P Parameter: Age (day) Value: 4 vs. 0
  misc_feature: MA Experiment 108464 PARAMETER Experiment Name: At_Germinating_Seeds_cDNA_P Parameter: Tissue Value: Germinating Seeds
  misc_feature: MA Experiment ID: 20000113 Result: Down-regulated in Transcription
  misc_feature: MA Experiment 20000113 PARAMETER Experiment Name: At_42deg_Heat_cDNA_P Parameter: Temperature (deg C) Value: 42 vs. 22
  misc_feature: MA Experiment 20000113 PARAMETER Experiment Name: At_42deg_Heat_cDNA_P Parameter: Timepoint (hr) Value: 8
  misc_feature: MA Experiment 20000113 PARAMETER Experiment Name: At_42deg_Heat_cDNA_P Parameter: Tissue Value: Aerial
  misc_feature: MA Experiment ID: 20000173 Result: Up-regulated in Transcription
  misc_feature: MA Experiment 20000173 PARAMETER Experiment Name: At_42deg_Heat_P Parameter: Age (day) Value: 14
  misc_feature: MA Experiment 20000173 PARAMETER Experiment Name: At_42deg_Heat_P Parameter: Organism Value: A. thaliana
  misc_feature: MA Experiment 20000173 PARAMETER Experiment Name: At_42deg_Heat_P Parameter: Plant Line Value: WS
  misc_feature: MA Experiment 20000173 PARAMETER Experiment Name: At_42deg_Heat_P Parameter: Temperature (deg C) Value: 42 vs. 22
  misc_feature: MA Experiment 20000173 PARAMETER Experiment Name: At_42deg_Heat_P Parameter: Timepoint (hr) Value: 6
  misc_feature: MA Experiment 20000173 PARAMETER Experiment Name: At_42deg_Heat_P Parameter: Tissue Value: Aerial
  misc_feature: MA Experiment ID: 20000180 Result: Up-regulated in Transcription
  misc_feature: MA Experiment 20000180 PARAMETER Experiment Name: At_Germinating_Seeds_P Parameter: Age (hr) Value: 24 vs. 0
  misc_feature: MA Experiment 20000180 PARAMETER Experiment Name: At_Germinating_Seeds_P Parameter: Tissue Value: Germinating Seeds
  misc_feature: MA Experiment ID: 20000184 Result: Up-regulated in Transcription
  misc_feature: MA Experiment 20000184 PARAMETER Experiment Name: At_Shoots__P Parameter: Age (day) Value: 7
  misc_feature: MA Experiment 20000184 PARAMETER Experiment Name: At_Shoots__P Parameter: Tissue Value: Shoots vs. Whole Plant
  misc_feature: MA Experiment ID: 20000185 Result: Up-regulated in Transcription
  misc_feature: MA Experiment 20000185 PARAMETER Experiment Name: At_Roots__P Parameter: Age (day) Value: 7 vs. 21
  misc_feature: MA Experiment 20000185 PARAMETER Experiment Name: At_Roots__P Parameter: Organism Value: A. thaliana
  misc_feature: MA Experiment 20000185 PARAMETER Experiment Name: At_Roots__P Parameter: Tissue Value: Roots vs. Whole Plant
  misc_feature: MA Experiment ID: 20000437 Result: Down-regulated in Transcription
  misc_feature: MA Experiment 20000437 PARAMETER Experiment Name: At_Drought_P Parameter: Age (day) Value: 8
  misc_feature: MA Experiment 20000437 PARAMETER Experiment Name: At_Drought_P Parameter: Organism Value: A. thaliana
  misc_feature: MA Experiment 20000437 PARAMETER Experiment Name: At_Drought_P Parameter: Plant Line Value: WS
  misc_feature: MA Experiment 20000437 PARAMETER Experiment Name: At_Drought_P Parameter: Timepoint (hr) Value: 24
  misc_feature: MA Experiment 20000437 PARAMETER Experiment Name: At_Drought_P Parameter: Tissue Value: Whole Plant
  misc_feature: MA Experiment 20000437 PARAMETER Experiment Name: At_Drought_P Parameter: Treatment Value: Drought vs. No Drought
  misc_feature: MA Experiment ID: 20000573 Result: Down-regulated in Transcription
  misc_feature: MA Experiment 20000573 PARAMETER Experiment Name: At_100uM_ABA_Mutants__P Parameter: Organism Value: A. thaliana
  misc_feature: MA Experiment 20000573 PARAMETER Experiment Name: At_100uM_ABA_Mutants__P Parameter: Plant Line Value: CS22 vs. Ler wt
  misc_feature: MA Experiment 20000573 PARAMETER Experiment Name: At_100uM_ABA_Mutants__P Parameter: Timepoint (hr) Value: N/A
  misc_feature: MA Experiment 20000573 PARAMETER Experiment Name: At_100uM_ABA_Mutants__P Parameter: Tissue Value: Whole Plant
  misc_feature: MA Experiment 20000573 PARAMETER Experiment Name: At_100uM_ABA_Mutants__P Parameter: Treatment Value: None
  misc_feature: MA Experiment ID: 20000794 Result: Down-regulated in Transcription
  misc_feature: MA Experiment 20000794 PARAMETER Experiment Name: At_Petals_P Parameter: Age (day) Value: 23-25 days
  misc_feature: MA Experiment 20000794 PARAMETER Experiment Name: At_Petals_P Parameter: Plant Line Value: WS
  misc_feature: MA Experiment 20000794 PARAMETER Experiment Name: At_Petals_P Parameter: Tissue Value: Petals vs. Whole plant
  misc_feature: MA Experiment ID: 20001248 Result: Down-regulated in Transcription
  misc_feature: MA Experiment 20001248 PARAMETER Experiment Name: At_Far-red-induction_P Parameter: Age (day) Value: 7
  misc_feature: MA Experiment 20001248 PARAMETER Experiment Name: At_Far-red-induction_P Parameter: Light Value: Far-red vs. White
  misc_feature: MA Experiment 20001248 PARAMETER Experiment Name: At_Far-red-induction_P Parameter: Organism Value: A. thaliana
  misc_feature: MA Experiment 20001248 PARAMETER Experiment Name: At_Far-red-induction_P Parameter: Plant Line Value: Columbia
  misc_feature: MA Experiment 20001248 PARAMETER Experiment Name: At_Far-red-induction_P Parameter: Timepoint (hr) Value: 4
  misc_feature: MA Experiment 20001248 PARAMETER Experiment Name: At_Far-red-induction_P Parameter: Tissue Value: Whole Plant
  misc_feature: MA Experiment ID: 20001450 Result: Down-regulated in Transcription
  misc_feature: MA Experiment 20001450 PARAMETER Experiment Name: At_Far-red-induction_P Parameter: Age (day) Value: 7
  misc_feature: MA Experiment 20001450 PARAMETER Experiment Name: At_Far-red-induction_P Parameter: Light Value: Far-red vs. White
  misc_feature: MA Experiment 20001450 PARAMETER Experiment Name: At_Far-red-induction_P Parameter: Organism Value: A. thaliana
  misc_feature: MA Experiment 20001450 PARAMETER Experiment Name: At_Far-red-induction_P Parameter: Plant Line Value: Columbia
  misc_feature: MA Experiment 20001450 PARAMETER Experiment Name: At_Far-red-induction_P Parameter: Timepoint (hr) Value: 8
  misc_feature: MA Experiment 20001450 PARAMETER Experiment Name: At_Far-red-induction_P Parameter: Tissue Value: Whole Plant
  misc_feature: MA Experiment ID: 20001451 Result: Down-regulated in Transcription
  misc_feature: MA Experiment 20001451 PARAMETER Experiment Name: At_Far-red-induction_P Parameter: Age (day) Value: 7
  misc_feature: MA Experiment 20001451 PARAMETER Experiment Name: At_Far-red-induction_P Parameter: Light Value: Far-red vs. White
  misc_feature: MA Experiment 20001451 PARAMETER Experiment Name: At_Far-red-induction_P Parameter: Organism Value: A. thaliana
  misc_feature: MA Experiment 20001451 PARAMETER Experiment Name: At_Far-red-induction_P Parameter: Plant Line Value: Columbia
  misc_feature: MA Experiment 20001451 PARAMETER Experiment Name: At_Far-red-induction_P Parameter: Timepoint (hr) Value: 24
  misc_feature: MA Experiment 20001451 PARAMETER Experiment Name: At_Far-red-induction_P Parameter: Tissue Value: Whole Plant
  misc_feature: MA Experiment ID: 20001555 Result: Down-regulated in Transcription
  misc_feature: MA Experiment 20001555 PARAMETER Experiment Name: At_Drought_Soil_Dry_P Parameter: Age (day) Value: 24
  misc_feature: MA Experiment 20001555 PARAMETER Experiment Name: At_Drought_Soil_Dry_P Parameter: Organism Value: A. thaliana
  misc_feature: MA Experiment 20001555 PARAMETER Experiment Name: At_Drought_Soil_Dry_P Parameter: Plant Line Value: WS
  misc_feature: MA Experiment 20001555 PARAMETER Experiment Name: At_Drought_Soil_Dry_P Parameter: Post Timepoint (hr) Value: None
  misc_feature: MA Experiment 20001555 PARAMETER Experiment Name: At_Drought_Soil_Dry_P Parameter: Post-Treatment Value: None
  misc_feature: MA Experiment 20001555 PARAMETER Experiment Name: At_Drought_Soil_Dry_P Parameter: Timepoint (day) Value: 10
  misc_feature: MA Experiment 20001555 PARAMETER Experiment Name: At_Drought_Soil_Dry_P Parameter: Treatment Value: Drought vs. No Drought
  misc_feature: MA Experiment ID: 20001556 Result: Down-regulated in Transcription
  misc_feature: MA Experiment 20001556 PARAMETER Experiment Name: At_Drought_Soil_Dry_P Parameter: Age (day) Value: 26
  misc_feature: MA Experiment 20001556 PARAMETER Experiment Name: At_Drought_Soil_Dry_P Parameter: Organism Value: A. thaliana
  misc_feature: MA Experiment 20001556 PARAMETER Experiment Name: At_Drought_Soil_Dry_P Parameter: Plant Line Value: WS
  misc_feature: MA Experiment 20001556 PARAMETER Experiment Name: At_Drought_Soil_Dry_P Parameter: Post Timepoint (hr) Value: None
  misc_feature: MA Experiment 20001556 PARAMETER Experiment Name: At_Drought_Soil_Dry_P Parameter: Post-Treatment Value: None
  misc_feature: MA Experiment 20001556 PARAMETER Experiment Name: At_Drought_Soil_Dry_P Parameter: Timepoint (day) Value: 12
  misc_feature: MA Experiment 20001556 PARAMETER Experiment Name: At_Drought_Soil_Dry_P Parameter: Treatment Value: Drought vs. No Drought
  misc_feature: MA Experiment ID: 20001905 Result: Down-regulated in Transcription
  misc_feature: MA Experiment 20001905 PARAMETER Experiment Name: At_Drought_Reproduction_P Parameter: Age (day) Value: 40
  misc_feature: MA Experiment 20001905 PARAMETER Experiment Name: At_Drought_Reproduction_P Parameter: Organism Value: A. thaliana
  misc_feature: MA Experiment 20001905 PARAMETER Experiment Name: At_Drought_Reproduction_P Parameter: Plant Line Value: WS
  misc_feature: MA Experiment 20001905 PARAMETER Experiment Name: At_Drought_Reproduction_P Parameter: Timepoint (day) Value: 10
  misc_feature: MA Experiment 20001905 PARAMETER Experiment Name: At_Drought_Reproduction_P Parameter: Tissue Value: Rosettes
  misc_feature: MA Experiment 20001905 PARAMETER Experiment Name: At_Drought_Reproduction_P Parameter: Treatment Value: Drought vs. No Drought
  misc_feature: MA Experiment ID: 20001906 Result: Down-regulated in Transcription
  misc_feature: MA Experiment 20001906 PARAMETER Experiment Name: At_Drought_Reproduction_P Parameter: Age (day) Value: 35
  misc_feature: MA Experiment 20001906 PARAMETER Experiment Name: At_Drought_Reproduction_P Parameter: Organism Value: A. thaliana
  misc_feature: MA Experiment 20001906 PARAMETER Experiment Name: At_Drought_Reproduction_P Parameter: Plant Line Value: WS
  misc_feature: MA Experiment 20001906 PARAMETER Experiment Name: At_Drought_Reproduction_P Parameter: Timepoint (day) Value: 5
  misc_feature: MA Experiment 20001906 PARAMETER Experiment Name: At_Drought_Reproduction_P Parameter: Tissue Value: Siliques
  misc_feature: MA Experiment 20001906 PARAMETER Experiment Name: At_Drought_Reproduction_P Parameter: Treatment Value: Drought vs. No Drought
  misc_feature: MA Experiment ID: 20001911 Result: Down-regulated in Transcription
  misc_feature: MA Experiment 20001911 PARAMETER Experiment Name: At_Drought_Reproduction_P Parameter: Age (day) Value: 40
  misc_feature: MA Experiment 20001911 PARAMETER Experiment Name: At_Drought_Reproduction_P Parameter: Organism Value: A. thaliana
  misc_feature: MA Experiment 20001911 PARAMETER Experiment Name: At_Drought_Reproduction_P Parameter: Plant Line Value: WS
  misc_feature: MA Experiment 20001911 PARAMETER Experiment Name: At_Drought_Reproduction_P Parameter: Timepoint (day) Value: 10
  misc_feature: MA Experiment 20001911 PARAMETER Experiment Name: At_Drought_Reproduction_P Parameter: Tissue Value: Flowers
  misc_feature: MA Experiment 20001911 PARAMETER Experiment Name: At_Drought_Reproduction_P Parameter: Treatment Value: Drought vs. No Drought
aaaatcatcaaatccatctcccactcttctagcatcttgaagcttaaatctcagccgtccgatcatgccgatcagaaacatcgccattggccgtccagatgaagccacccgtcccgatgccttaaaggcggcgttggctgagttcatttcaactttgatctttgtcgtcgccggttcaggctctggcatggctttcaacaagctcactgaaaacggagccaccactccttctggtctcgtagctgctgcagtggctcatgcctttggactcttcgtcgctgtctcagttggtgccaacatctctggtggacacgttaaccctgccgtcactttcggtgctttcattggtggtaacatcactctcctccgtggtatcctctactggattgctcagcttctcggctccgtcgtcgcttgcctcatccttaaattcgccaccggtggcttggctgtgccggcttttggtctctctgctggagtaggagtgttgaacgctttcgttttcgagatcgtgatgacattcgggcttgtttacaccgtctacgctacagccattgaccccaaaaacgggagtcttggaacaattgctcccatcgcaatcggtttcattgttggagccaacatcttagctggaggagctttctctggagcctccatgaatcccgccgtggctttcggaccagcggtggtgagctggacatggaccaaccactgggtctactgggccggacctctcgtcggcggtggaatcgctggactcatctacgaagttttcttcatcaacaccacacacgagcagctcccaaccacagactactgaattaatctctctttttctctcttgtgtaattttattcgactttgaatttgaattttaatgtctttttaatttccgtttgtgtaatttcgaatcatcaaggggtttatgatcgttcgatcttttagatgaatccttgtccgttggtttcaagagtggccattgcaatttcgactatataatgtgaattatgtatcaatctcatcttaagttttcaagtgttgc

SEQ ID NO: 99163 - protein, 251 aa, Arabidopsis thaliana
  peptide (1)..(251): Ceres Seq. ID no. 13602313
  misc_feature (13)..(234): Pfam Name: Major intrinsic protein Pfam Description: Major intrinsic protein
  misc_feature (1)..(251): Homolog of NCBI NO: 15228041 NR Description: major intrinsic protein (MIP) family [Arabidopsis >gi|135860|sp|P25818|TIPG_ARATH Tonoplast intrinsic protein,
  misc_feature (1)..(251): Homolog of NCBI NO: 21593151 NR Description: putative aquaporin (tonoplast intrinsic protein
  misc_feature (1)..(251): Homolog of NCBI NO: 475048 NR Description: tonoplast intrinsic protein gamma (gamma-TIP)
  misc_feature (1)..(243): Homolog of NCBI NO: 99747 NR Description: probable membrane channel protein RB7 - thaliana >gi|16492|emb|CAA38633.1| possible membrane channel
  misc_feature (1)..(251): Homolog of NCBI NO: 22858917 NR Description: tonoplast intrinsic protein bobTIP26-2 [Brassica
  misc_feature (1)..(251): Homolog of NCBI NO: 21284370 NR Description: tonoplast intrinsic protein bobTIP26-1 [Brassica
  misc_feature (1)..(251): Homolog of NCBI NO: 1514977 NR Description: VM23 [Raphanus sativus]
  misc_feature (1)..(251): Homolog of NCBI NO: 5081419 NR Description: tonoplast intrinsic protein [Brassica napus]
  misc_feature (1)..(251): Homolog of NCBI NO: 15231569 NR Description: tonoplast intrinsic protein, putative
  misc_feature (1)..(251): Homolog of NCBI NO: 11357300 NR Description: gamma tonoplast intrinsic protein 2 [imported] - thaliana >gi|3688799|gb|AAC62397.1| gamma tonoplast intrinsic
MPIRNIAIGRPDEATRPDALKAALAEFISTLIFVVAGSGSGMAFNKLTENGATTPSGLVAAAVAHAFGLFVAVSVGANISGGHVNPAVTFGAFIGGNITLLRGILYWIAQLLGSVVACLILKFATGGLAVPAFGLSAGVGVLNAFVFEIVMTFGLVYTVYATAIDPKNGSLGTIAPIAIGFIVGANILAGGAFSGASMNPAVAFGPAVVSWTWTNHWVYWAGPLVGGGIAGLIYEVFFINTTHEQLPTTDY

SEQ ID NO: 99164 - protein, 210 aa, Arabidopsis thaliana
  peptide (1)..(210): Ceres Seq. ID no. 13602314
  misc_feature (1)..(193): Pfam Name: Major intrinsic protein Pfam Description: Major intrinsic protein
  misc_feature (1)..(210): Homolog of NCBI NO: 15228041 NR Description: major intrinsic protein (MIP) family [Arabidopsis >gi|135860|sp|P25818|TIPG_ARATH Tonoplast intrinsic protein,
  misc_feature (1)..(210): Homolog of NCBI NO: 21593151 NR Description: putative aquaporin (tonoplast intrinsic protein
  misc_feature (1)..(210): Homolog of NCBI NO: 475048 NR Description: tonoplast intrinsic protein gamma (gamma-TIP)
  misc_feature (1)..(202): Homolog of NCBI NO: 99747 NR Description: probable membrane channel protein RB7 - thaliana >gi|16492|emb|CAA38633.1| possible membrane channel
  misc_feature (1)..(210): Homolog of NCBI NO: 22858917 NR Description: tonoplast intrinsic protein bobTIP26-2 [Brassica
  misc_feature (1)..(210): Homolog of NCBI NO: 21284370 NR Description: tonoplast intrinsic protein bobTIP26-1 [Brassica
  misc_feature (1)..(210): Homolog of NCBI NO: 1514977 NR Description: VM23 [Raphanus sativus]
  misc_feature (1)..(210): Homolog of NCBI NO: 5081419 NR Description: tonoplast intrinsic protein [Brassica napus]
  misc_feature (1)..(210): Homolog of NCBI NO: 15231569 NR Description: tonoplast intrinsic protein, putative
  misc_feature (1)..(210): Homolog of NCBI NO: 11357300 NR Description: gamma tonoplast intrinsic protein 2 [imported] - thaliana >gi|3688799|gb|AAC62397.1| gamma tonoplast intrinsic
MAFNKLTENGATTPSGLVAAAVAHAFGLFVAVSVGANISGGHVNPAVTFGAFIGGNITLLRGILYWIAQLLGSVVACLILKFATGGLAVPAFGLSAGVGVLNAFVFEIVMTFGLVYTVYATAIDPKNGSLGTIAPIAIGFIVGANILAGGAFSGASMNPAVAFGPAVVSWTWTNHWVYWAGPLVGGGIAGLIYEVFFINTTHEQLPTTDY

SEQ ID NO: 99165 - DNA, 1666 bp, Arabidopsis thaliana
  misc_feature (1)..(1666): Ceres Seq. ID no. 13602319
  misc_feature: MA Experiment ID: 108433 Result: Down-regulated in Transcription
  misc_feature: MA Experiment 108433 PARAMETER Experiment Name: At_rhl_Mutant2_cDNA_P Parameter: Age (day) Value: 7
  misc_feature: MA Experiment 108433 PARAMETER Experiment Name: At_rhl_Mutant2_cDNA_P Parameter: Organism Value: A. thaliana
  misc_feature: MA Experiment 108433 PARAMETER Experiment Name: At_rhl_Mutant2_cDNA_P Parameter: Plant Line Value: rhl Mutant vs. wt landsburg
  misc_feature: MA Experiment 108433 PARAMETER Experiment Name: At_rhl_Mutant2_cDNA_P Parameter: Tissue Value: Roots
  misc_feature: MA Experiment ID: 108461 Result: Up-regulated in Transcription
  misc_feature: MA Experiment 108461 PARAMETER Experiment Name: At_Germinating_Seeds_cDNA_P Parameter: Age (day) Value: 1 vs. 0
  misc_feature: MA Experiment 108461 PARAMETER Experiment Name: At_Germinating_Seeds_cDNA_P Parameter: Tissue Value: Germinating Seeds
  misc_feature: MA Experiment ID: 108462 Result: Up-regulated in Transcription
  misc_feature: MA Experiment 108462 PARAMETER Experiment Name: At_Germinating_Seeds_cDNA_P Parameter: Age (day) Value: 2 vs. 0
  misc_feature: MA Experiment 108462 PARAMETER Experiment Name: At_Germinating_Seeds_cDNA_P Parameter: Tissue Value: Germinating Seeds
  misc_feature: MA Experiment ID: 108463 Result: Up-regulated in Transcription
  misc_feature: MA Experiment 108463 PARAMETER Experiment Name: At_Germinating_Seeds_cDNA_P Parameter: Age (day) Value: 3 vs. 0
  misc_feature: MA Experiment 108463 PARAMETER Experiment Name: At_Germinating_Seeds_cDNA_P Parameter: Tissue Value: Germinating Seeds
  misc_feature: MA Experiment ID: 108464 Result: Up-regulated in Transcription
  misc_feature: MA Experiment 108464 PARAMETER Experiment Name: At_Germinating_Seeds_cDNA_P Parameter: Age (day) Value: 4 vs. 0
  misc_feature: MA Experiment 108464 PARAMETER Experiment Name: At_Germinating_Seeds_cDNA_P Parameter: Tissue Value: Germinating Seeds
  misc_feature: MA Experiment ID: 108569 Result: Up-regulated in Transcription
  misc_feature: MA Experiment 108569 PARAMETER Experiment Name: At_0.001%_MeJA__cDNA_P Parameter: Timepoint (hr) Value: 6
  misc_feature: MA Experiment 108569 PARAMETER Experiment Name: At_0.001%_MeJA__cDNA_P Parameter: Tissue Value: Aerial
  misc_feature: MA Experiment 108569 PARAMETER Experiment Name: At_0.001%_MeJA__cDNA_P Parameter: Treatment Value: 0.001% MeJA vs. No Treatment
  misc_feature: MA Experiment ID: 108576 Result: Down-regulated in Transcription
  misc_feature: MA Experiment 108576 PARAMETER Experiment Name: At_42deg_Heat_cDNA_P Parameter: Temperature (deg C) Value: 42 vs. 22
  misc_feature: MA Experiment 108576 PARAMETER Experiment Name: At_42deg_Heat_cDNA_P Parameter: Timepoint (hr) Value: 1
  misc_feature: MA Experiment 108576 PARAMETER Experiment Name: At_42deg_Heat_cDNA_P Parameter: Tissue Value: Aerial
  misc_feature: MA Experiment ID: 108579 Result: Up-regulated in Transcription
  misc_feature: MA Experiment 108579 PARAMETER Experiment Name: At_4deg_Cold_cDNA_P Parameter: Temperature (deg C) Value: 4 vs. 22
  misc_feature: MA Experiment 108579 PARAMETER Experiment Name: At_4deg_Cold_cDNA_P Parameter: Timepoint (hr) Value: 6
  misc_feature: MA Experiment 108579 PARAMETER Experiment Name: At_4deg_Cold_cDNA_P Parameter: Tissue Value: Aerial
  misc_feature: MA Experiment ID: 108595 Result: Down-regulated in Transcription
  misc_feature: MA Experiment 108595 PARAMETER Experiment Name: At_Ler-pi_Ovule_cDNA_P Parameter: Plant Line Value: null
  misc_feature: MA Experiment ID: 20000069 Result: Down-regulated in Transcription
  misc_feature: MA Experiment 20000069 PARAMETER Experiment Name: At_100uM_ABA_Mutants_cDNA_P Parameter: Plant Line Value: CS23
  misc_feature: MA Experiment 20000069 PARAMETER Experiment Name: At_100uM_ABA_Mutants_cDNA_P Parameter: Timepoint (hr) Value: 6
  misc_feature: MA Experiment 20000069 PARAMETER Experiment Name: At_100uM_ABA_Mutants_cDNA_P Parameter: Tissue Value: Aerial
  misc_feature: MA Experiment 20000069 PARAMETER Experiment Name: At_100uM_ABA_Mutants_cDNA_P Parameter: Treatment Value: 100uM ABA vs. No Treatment
  misc_feature: MA Experiment ID: 20000072 Result: Down-regulated in Transcription
  misc_feature: MA Experiment 20000072 PARAMETER Experiment Name: At_100uM_ABA_Mutants_cDNA_P Parameter: Plant Line Value: CS8105
  misc_feature: MA Experiment 20000072 PARAMETER Experiment Name: At_100uM_ABA_Mutants_cDNA_P Parameter: Timepoint (hr) Value: 6
  misc_feature: MA Experiment 20000072 PARAMETER Experiment Name: At_100uM_ABA_Mutants_cDNA_P Parameter: Tissue Value: Aerial
  misc_feature: MA Experiment 20000072 PARAMETER Experiment Name: At_100uM_ABA_Mutants_cDNA_P Parameter: Treatment Value: 100uM ABA vs. No Treatment
  misc_feature: MA Experiment ID: 20000086 Result: Down-regulated in Transcription
  misc_feature: MA Experiment 20000086 PARAMETER Experiment Name: At_100uM_ABA_Mutants_cDNA_P Parameter: Plant Line Value: CS22
  misc_feature: MA Experiment 20000086 PARAMETER Experiment Name: At_100uM_ABA_Mutants_cDNA_P Parameter: Timepoint (hr) Value: 6
  misc_feature: MA Experiment 20000086 PARAMETER Experiment Name: At_100uM_ABA_Mutants_cDNA_P Parameter: Tissue Value: Aerial
  misc_feature: MA Experiment 20000086 PARAMETER Experiment Name: At_100uM_ABA_Mutants_cDNA_P Parameter: Treatment Value: 100uM ABA vs. No Treatment
  misc_feature: MA Experiment ID: 20000087 Result: Down-regulated in Transcription
  misc_feature: MA Experiment 20000087 PARAMETER Experiment Name: At_100uM_ABA_Mutants_cDNA_P Parameter: Plant Line Value: WS
  misc_feature: MA Experiment 20000087 PARAMETER Experiment Name: At_100uM_ABA_Mutants_cDNA_P Parameter: Timepoint (hr) Value: 6
  misc_feature: MA Experiment 20000087 PARAMETER Experiment Name: At_100uM_ABA_Mutants_cDNA_P Parameter: Tissue Value: Aerial
  misc_feature: MA Experiment 20000087 PARAMETER Experiment Name: At_100uM_ABA_Mutants_cDNA_P Parameter: Treatment Value: 100uM ABA vs. No Treatment
  misc_feature: MA Experiment ID: 20000111 Result: Down-regulated in Transcription
  misc_feature: MA Experiment 20000111 PARAMETER Experiment Name: At_42deg_Heat_cDNA_P Parameter: Temperature (deg C) Value: 42 vs. 22
  misc_feature: MA Experiment 20000111 PARAMETER Experiment Name: At_42deg_Heat_cDNA_P Parameter: Timepoint (hr) Value: 6
  misc_feature: MA Experiment 20000111 PARAMETER Experiment Name: At_42deg_Heat_cDNA_P Parameter: Tissue Value: Aerial
  misc_feature: MA Experiment ID: 20000112 Result: Down-regulated in Transcription
  misc_feature: MA Experiment 20000112 PARAMETER Experiment Name: At_42deg_Heat_cDNA_P Parameter: Temperature (deg C) Value: 42 vs. 22
  misc_feature: MA Experiment 20000112 PARAMETER Experiment Name: At_42deg_Heat_cDNA_P Parameter: Timepoint (hr) Value: 2
  misc_feature: MA Experiment 20000112 PARAMETER Experiment Name: At_42deg_Heat_cDNA_P Parameter: Tissue Value: Aerial
  misc_feature: MA Experiment ID: 20000113 Result: Down-regulated in Transcription
  misc_feature: MA Experiment 20000113 PARAMETER Experiment Name: At_42deg_Heat_cDNA_P Parameter: Temperature (deg C) Value: 42 vs. 22
  misc_feature: MA Experiment 20000113 PARAMETER Experiment Name: At_42deg_Heat_cDNA_P Parameter: Timepoint (hr) Value: 8
  misc_feature: MA Experiment 20000113 PARAMETER Experiment Name: At_42deg_Heat_cDNA_P Parameter: Tissue Value: Aerial
  misc_feature: MA Experiment ID: 20000117 Result: Down-regulated in Transcription
  misc_feature: MA Experiment 20000117 PARAMETER Experiment Name: At_100uM_ABA_Mutants_cDNA_P Parameter: Plant Line Value: Columbia
  misc_feature: MA Experiment 20000117 PARAMETER Experiment Name: At_100uM_ABA_Mutants_cDNA_P Parameter: Timepoint (hr) Value: 6
  misc_feature: MA Experiment 20000117 PARAMETER Experiment Name: At_100uM_ABA_Mutants_cDNA_P Parameter: Tissue Value: Aerial
  misc_feature: MA Experiment 20000117 PARAMETER Experiment Name: At_100uM_ABA_Mutants_cDNA_P Parameter: Treatment Value: 100uM ABA vs. No Treatment
  misc_feature: MA Experiment ID: 20000144 Result: Down-regulated in Transcription
  misc_feature: MA Experiment 20000144 PARAMETER Experiment Name: At_42deg_Heat_cDNA_P Parameter: Temperature (deg C) Value: 42 vs. 22
  misc_feature: MA Experiment 20000144 PARAMETER Experiment Name: At_42deg_Heat_cDNA_P Parameter: Timepoint (hr) Value: 1
  misc_feature: MA Experiment 20000144 PARAMETER Experiment Name: At_42deg_Heat_cDNA_P Parameter: Tissue Value: Aerial
  misc_feature: MA Experiment ID: 20000171 Result: Down-regulated in Transcription
  misc_feature: MA Experiment 20000171 PARAMETER Experiment Name: At_42deg_Heat_P Parameter: Age (day) Value: 14
  misc_feature: MA Experiment 20000171 PARAMETER Experiment Name: At_42deg_Heat_P Parameter: Organism Value: A. thaliana
  misc_feature: MA Experiment 20000171 PARAMETER Experiment Name: At_42deg_Heat_P Parameter: Plant Line Value: WS
  misc_feature: MA Experiment 20000171 PARAMETER Experiment Name: At_42deg_Heat_P Parameter: Temperature (deg C) Value: 42 vs. 22
  misc_feature: MA Experiment 20000171 PARAMETER Experiment Name: At_42deg_Heat_P Parameter: Timepoint (hr) Value: 1
  misc_feature: MA Experiment 20000171 PARAMETER Experiment Name: At_42deg_Heat_P Parameter: Tissue Value: Aerial
  misc_feature: MA Experiment ID: 20000179 Result: Up-regulated in Transcription
  misc_feature: MA Experiment 20000179 PARAMETER Experiment Name: At_Germinating_Seeds_P Parameter: Age (hr) Value: 6 vs. 0
  misc_feature: MA Experiment 20000179 PARAMETER Experiment Name: At_Germinating_Seeds_P Parameter: Tissue Value: Germinating Seeds
  misc_feature: MA Experiment ID: 20000180 Result: Up-regulated in Transcription
  misc_feature: MA Experiment 20000180 PARAMETER Experiment Name: At_Germinating_Seeds_P Parameter: Age (hr) Value: 24 vs. 0
  misc_feature: MA Experiment 20000180 PARAMETER Experiment Name: At_Germinating_Seeds_P Parameter: Tissue Value: Germinating Seeds
  misc_feature: MA Experiment ID: 20000185 Result: Up-regulated in Transcription
  misc_feature: MA Experiment 20000185 PARAMETER Experiment Name: At_Roots__P Parameter: Age (day) Value: 7 vs. 21
  misc_feature: MA Experiment 20000185 PARAMETER Experiment Name: At_Roots__P Parameter: Organism Value: A. thaliana
  misc_feature: MA Experiment 20000185 PARAMETER Experiment Name: At_Roots__P Parameter: Tissue Value: Roots vs. Whole Plant
  misc_feature: MA Experiment ID: 20000213 Result: Up-regulated in Transcription
  misc_feature: MA Experiment 20000213 PARAMETER Experiment Name: At_4deg_Cold_P Parameter: Timepoint (hr) Value: 2
  misc_feature: MA Experiment ID: 20000234 Result: Up-regulated in Transcription
  misc_feature: MA Experiment 20000234 PARAMETER Experiment Name: At_Siliques_P Parameter: Age (day) Value: 21
  misc_feature: MA Experiment 20000234 PARAMETER Experiment Name: At_Siliques_P Parameter: Organism Value: A. thaliana
  misc_feature: MA Experiment 20000234 PARAMETER Experiment Name: At_Siliques_P Parameter: Plant Line Value: WS
  misc_feature: MA Experiment 20000234 PARAMETER Experiment Name: At_Siliques_P Parameter: Tissue Value: Less Than 5mm Siliques vs. Whole Plant
  misc_feature: MA Experiment ID: 20000235 Result: Up-regulated in Transcription
  misc_feature: MA Experiment 20000235 PARAMETER Experiment Name: At_Siliques_P Parameter: Age (day) Value: 21
  misc_feature: MA Experiment 20000235 PARAMETER Experiment Name: At_Siliques_P Parameter: Organism Value: A. thaliana
  misc_feature: MA Experiment 20000235 PARAMETER Experiment Name: At_Siliques_P Parameter: Plant Line Value: WS
  misc_feature: MA Experiment 20000235 PARAMETER Experiment Name: At_Siliques_P Parameter: Tissue Value: 5-10mm Siliques vs. Whole Plant
  misc_feature: MA Experiment ID: 20000437 Result: Down-regulated in Transcription
  misc_feature: MA Experiment 20000437 PARAMETER Experiment Name: At_Drought_P Parameter: Age (day) Value: 8
  misc_feature: MA Experiment 20000437 PARAMETER Experiment Name: At_Drought_P Parameter: Organism Value: A. thaliana
  misc_feature: MA Experiment 20000437 PARAMETER Experiment Name: At_Drought_P Parameter: Plant Line Value: WS
  misc_feature: MA Experiment 20000437 PARAMETER Experiment Name: At_Drought_P Parameter: Timepoint (hr) Value: 24
  misc_feature: MA Experiment 20000437 PARAMETER Experiment Name: At_Drought_P Parameter: Tissue Value: Whole Plant
  misc_feature: MA Experiment 20000437 PARAMETER Experiment Name: At_Drought_P Parameter: Treatment Value: Drought vs. No Drought
  misc_feature: MA Experiment ID: 20000439 Result: Up-regulated in Transcription
  misc_feature: MA Experiment 20000439 PARAMETER Experiment Name: At_Roots__P Parameter: Age (day) Value: 14 vs. 21
  misc_feature: MA Experiment 20000439 PARAMETER Experiment Name: At_Roots__P Parameter: Organism Value: A. thaliana
  misc_feature: MA Experiment 20000439 PARAMETER Experiment Name: At_Roots__P Parameter: Tissue Value: Roots vs. Whole Plant
  misc_feature: MA Experiment ID: 20001248 Result: Down-regulated in Transcription
  misc_feature: MA Experiment 20001248 PARAMETER Experiment Name: At_Far-red-induction_P Parameter: Age (day) Value: 7
  misc_feature: MA Experiment 20001248 PARAMETER Experiment Name: At_Far-red-induction_P Parameter: Light Value: Far-red vs. White
  misc_feature: MA Experiment 20001248 PARAMETER Experiment Name: At_Far-red-induction_P Parameter: Organism Value: A. thaliana
  misc_feature: MA Experiment 20001248 PARAMETER Experiment Name: At_Far-red-induction_P Parameter: Plant Line Value: Columbia
  misc_feature: MA Experiment 20001248 PARAMETER Experiment Name: At_Far-red-induction_P Parameter: Timepoint (hr) Value: 4
  misc_feature: MA Experiment 20001248 PARAMETER Experiment Name: At_Far-red-induction_P Parameter: Tissue Value: Whole Plant
  misc_feature: MA Experiment ID: 20001450 Result: Down-regulated in Transcription
  misc_feature: MA Experiment 20001450 PARAMETER Experiment Name: At_Far-red-induction_P Parameter: Age (day) Value: 7
  misc_feature: MA Experiment 20001450 PARAMETER Experiment Name: At_Far-red-induction_P Parameter: Light Value: Far-red vs. White
  misc_feature: MA Experiment 20001450 PARAMETER Experiment Name: At_Far-red-induction_P Parameter: Organism Value: A. thaliana
  misc_feature: MA Experiment 20001450 PARAMETER Experiment Name: At_Far-red-induction_P Parameter: Plant Line Value: Columbia
  misc_feature: MA Experiment 20001450 PARAMETER Experiment Name: At_Far-red-induction_P Parameter: Timepoint (hr) Value: 8
  misc_feature: MA Experiment 20001450 PARAMETER Experiment Name: At_Far-red-induction_P Parameter: Tissue Value: Whole Plant
  misc_feature: MA Experiment ID: 20001559 Result: Down-regulated in Transcription
  misc_feature: MA Experiment 20001559 PARAMETER Experiment Name: At_Drought_Soil_Dry_P Parameter: Age (day) Value: 28
  misc_feature: MA Experiment 20001559 PARAMETER Experiment Name: At_Drought_Soil_Dry_P Parameter: Organism Value: A. thaliana
  misc_feature: MA Experiment 20001559 PARAMETER Experiment Name: At_Drought_Soil_Dry_P Parameter: Plant Line Value: WS
  misc_feature: MA Experiment 20001559 PARAMETER Experiment Name: At_Drought_Soil_Dry_P Parameter: Post Timepoint (hr) Value: 29
  misc_feature: MA Experiment 20001559 PARAMETER Experiment Name: At_Drought_Soil_Dry_P Parameter: Post-Treatment Value: Re-Water vs. No Drought
  misc_feature: MA Experiment 20001559 PARAMETER Experiment Name: At_Drought_Soil_Dry_P Parameter: Timepoint (day) Value: 14
  misc_feature: MA Experiment 20001559 PARAMETER Experiment Name: At_Drought_Soil_Dry_P Parameter: Treatment Value: Drought vs. No Drought
  misc_feature: MA Experiment ID: 20001911 Result: Down-regulated in Transcription
  misc_feature: MA Experiment 20001911 PARAMETER Experiment Name: At_Drought_Reproduction_P Parameter: Age (day) Value: 40
  misc_feature: MA Experiment 20001911 PARAMETER Experiment Name: At_Drought_Reproduction_P Parameter: Organism Value: A. thaliana
  misc_feature: MA Experiment 20001911 PARAMETER Experiment Name: At_Drought_Reproduction_P Parameter: Plant Line Value: WS
  misc_feature: MA Experiment 20001911 PARAMETER Experiment Name: At_Drought_Reproduction_P Parameter: Timepoint (day) Value: 10
  misc_feature: MA Experiment 20001911 PARAMETER Experiment Name: At_Drought_Reproduction_P Parameter: Tissue Value: Flowers
  misc_feature: MA Experiment 20001911 PARAMETER Experiment Name: At_Drought_Reproduction_P Parameter: Treatment Value: Drought vs. No Drought
aagagcgggcaaaacaaacagagagcgagtcacgcgccgagttttcctcacttgttctcaataaatctctctctctttcttctctatcgctttcatttttctcctccagatctcgattccaatctctctccctctctacttccttcaacagaaatggaaacgttcctatttacctctgaatccgtcaatgaaggacacccagacaagctttgtgaccagatttctgatgcgatccttgatgcttgcttagagcaagatcctgaaagcaaagtggcgtgtgagacatgcaccaagaccaacatggtgatggtgtttggtgagatcactaccgctgcgaaagttgactatgagaagattgttagatccacttgcagggagattggttttatctctgctgatgttggtcttgacgctgacaaatgcaatgttttggttaacattgagcaacagagccctgacattgctcagggtgttcatggtcatttgaccaagaagcctgaagatattggtgctggtgatcagggacatatgtttgggtatgctactgatgagactcctgagctcatgccgttgactcatgtcctagccaccaagcttggtgctaagcttactgaagtgaggaagaacaagacttgcccatggttgaggcctgatggtaagacacaagtcacagtggagtacaagaacgatggtggagctatgattccgattagagtccacactgttcttatctcaactcaacatgacgaaactgtcaccaatgatgagattgctgctgacttgaaggagcatgtgatcaagcctgttatccctgctaagtaccttgacgataacaccatctttcacttgaacccatctggtcgttttgtcatcggagggcctcatggtgatgctggacttacagggaggaagatcatcattgacacttatggtggttggggtgctcatggtggaggtgccttctcaggaaaggacccaaccaaggttgacagaagcggtgcctatatcgtgaggcaggctgcaaagagcgtggtagcagcaggactcgcacgccgttgtatcgtgcaggtatcatacgccattggtgtccctgagccgctctcagtgtttgttgacacctacaagaccgggaccatcccagacaaggatatccttgtgttgatcaaggaagcatttgacttcaggccgggaatgatggccattaaccttgaccttaagaggggaggtaacttcaggttccagaaaaccgctgcgtatggccatttcgggcgtgatgaccctgacttcacttgggaggttgtcaagccgctcaagccaaaggcctagacagaaacaaagctggcaattgcaagaactgagttgagtcactccccaactactgggaacttatcattataccattattattgcaaatgactgaataaagaaagcttctgcattgtcaccattcacatttgttttcgcgaacacaggccagcggttcatatatctggtaatcgaagattgcaaatgaaagatttgagttttatgttttgaatttttgcctcttttttatttttctttttcttttccctcttaatctcttgtattgtaattttgattgtgtaaccaagaaatccatcctcgtgatgtttttttttttataagaaaatatcatgcaagttag

SEQ ID NO: 99166 - protein, 441 aa, Arabidopsis thaliana; identical to SEQ ID NO: 29210
  peptide (1)..(441): Ceres Seq. ID no. 13602320
  misc_feature (167)..(289): Pfam Name: S-adenosylmethionine synthetase, central domain Pfam Description: S-adenosylmethionine synthetase, central domain
  misc_feature (52)..(441): Homolog of NCBI NO: 15228048 NR Description: s-adenosylmethionine synthetase -related
  misc_feature (52)..(441): Homolog of NCBI NO: 14600070 NR Description: S-adenosylmethionine synthetase [Brassica juncea]
  misc_feature (52)..(441): Homolog of NCBI NO: 1170939 NR Description: S-adenosylmethionine synthetase 3 (Methionine
  misc_feature (52)..(441): Homolog of NCBI NO: 7230379 NR Description: S-adenosyl-L-methionine synthetase [Nicotiana
  misc_feature (52)..(441): Homolog of NCBI NO: 1346523 NR Description: S-adenosylmethionine synthetase (Methionine
  misc_feature (52)..(441): Homolog of NCBI NO: 5923879 NR Description: S-adenosyl-L-methionine synthetase [Petunia x
  misc_feature (52)..(441): Homolog of NCBI NO: 1709004 NR Description: S-adenosylmethionine synthetase 2 (Methionine
  misc_feature (52)..(441): Homolog of NCBI NO: 3024148 NR Description: S-adenosylmethionine synthetase 3 (Methionine
  misc_feature (52)..(441): Homolog of NCBI NO: 1708995 NR Description: S-adenosylmethionine synthetase 1 (Methionine
  misc_feature (52)..(438): Homolog of NCBI NO: 3024127 NR Description: S-adenosylmethionine synthetase 2 (Methionine

SEQ ID NO: 99167 - protein, 390 aa, Arabidopsis thaliana; identical to SEQ ID NO: 29211
  peptide (1)..(390): Ceres Seq. ID no. 13602321
  misc_feature (116)..(238): Pfam Name: S-adenosylmethionine synthetase, central domain Pfam Description: S-adenosylmethionine synthetase, central domain
  misc_feature (1)..(390): Homolog of NCBI NO: 15228048 NR Description: s-adenosylmethionine synthetase -related
  misc_feature (1)..(390): Homolog of NCBI NO: 14600070 NR Description: S-adenosylmethionine synthetase [Brassica juncea]
  misc_feature (1)..(390): Homolog of NCBI NO: 1170939 NR Description: S-adenosylmethionine synthetase 3 (Methionine
  misc_feature (1)..(390): Homolog of NCBI NO: 7230379 NR Description: S-adenosyl-L-methionine synthetase [Nicotiana
  misc_feature (1)..(390): Homolog of NCBI NO: 1346523 NR Description: S-adenosylmethionine synthetase (Methionine
  misc_feature (1)..(390): Homolog of NCBI NO: 5923879 NR Description: S-adenosyl-L-methionine synthetase [Petunia x
  misc_feature (1)..(390): Homolog of NCBI NO: 1709004 NR Description: S-adenosylmethionine synthetase 2 (Methionine
  misc_feature (1)..(390): Homolog of NCBI NO: 3024148 NR Description: S-adenosylmethionine synthetase 3 (Methionine
  misc_feature (1)..(390): Homolog of NCBI NO: 1708995 NR Description: S-adenosylmethionine synthetase 1 (Methionine
  misc_feature (1)..(387): Homolog of NCBI NO: 3024127 NR Description: S-adenosylmethionine synthetase 2 (Methionine

SEQ ID NO: 99168 - protein, 341 aa, Arabidopsis thaliana; identical to SEQ ID NO: 29212
  peptide (1)..(341): Ceres Seq. ID no. 13602322
  misc_feature (67)..(189): Pfam Name: S-adenosylmethionine synthetase, central domain Pfam Description: S-adenosylmethionine synthetase, central domain
  misc_feature (1)..(341): Homolog of NCBI NO: 15228048 NR Description: s-adenosylmethionine synthetase -related
  misc_feature (1)..(341): Homolog of NCBI NO: 14600070 NR Description: S-adenosylmethionine synthetase [Brassica juncea]
  misc_feature (1)..(341): Homolog of NCBI NO: 1170939 NR Description: S-adenosylmethionine synthetase 3 (Methionine
  misc_feature (1)..(341): Homolog of NCBI NO: 7230379 NR Description: S-adenosyl-L-methionine synthetase [Nicotiana
  misc_feature (1)..(341): Homolog of NCBI NO: 1346523 NR Description: S-adenosylmethionine synthetase (Methionine
  misc_feature (1)..(341): Homolog of NCBI NO: 5923879 NR Description: S-adenosyl-L-methionine synthetase [Petunia x
  misc_feature (1)..(341): Homolog of NCBI NO: 1709004 NR Description: S-adenosylmethionine synthetase 2 (Methionine
  misc_feature (1)..(341): Homolog of NCBI NO: 3024148 NR Description: S-adenosylmethionine synthetase 3 (Methionine
  misc_feature (1)..(341): Homolog of NCBI NO: 1708995 NR Description: S-adenosylmethionine synthetase 1 (Methionine
  misc_feature (1)..(338): Homolog of NCBI NO: 3024127 NR Description: S-adenosylmethionine synthetase 2 (Methionine

SEQ ID NO: 99169 - DNA, 4276 bp, Arabidopsis thaliana
  misc_feature (1)..(4276): Ceres Seq. ID no. 13602335
  misc_feature: MA Experiment ID: 108474 Result: Up-regulated in Transcription
  misc_feature: MA Experiment 108474 PARAMETER Experiment Name: At_Drought_Flowers_cDNA_P Parameter: Timepoint (hr) Value: null
  misc_feature: MA Experiment 108474 PARAMETER Experiment Name: At_Drought_Flowers_cDNA_P Parameter: Treatment Value: Drought vs. No Drought
  misc_feature: MA Experiment ID: 108488 Result: Up-regulated in Transcription
gtcccaacaatctgatcagaaaaaagtagacgaagaagaagaaattaagtcacttgaacaatggcgttggtccgaaatgcaaggccttgagcttctccctcataacaccaacaacaactcacgaagctccagagaaactcaccggaaatggataatgacggtggtgctcctcctcctccgccgacactagtggtggaagagcctaagaaagcagagattcgtggagttgcttttaaagagctattcagattcgccgacggattagattatgtattgatgggaattggctctgttggtgcttttgtccatggctgctctttacctctgtttcttcgattcttcgccgatcttgttaattcctttggttctaattctaataacgttgaaaagatgatggaagaagttctcaagtatgcgctttactttttagtggttggtgctgcaatctgggcttcctcttgggcagagatttcgtgttggatgtggagtggagagagacaaacaacgaagatgaggattaagtatttagaagcagctttgaatcaagacattcagttctttgatacagaagttcgaacttcagatgttgtcttcgccattaacaccgacgctgttatggttcaagacgccattagtgagaaacttggtaatttcatccattacatggcgacttttgtttctggattcatcgtgggtttcactgcggtgtggcaactagctttagtgactctcgcggtggttccgttgattgctgtgatcggaggaattcacaccactactctctctaaactatctaataagagtcaagagtctctttcacaagctggtaatatcgtcgaacagacagtggtacaaatcagggtagtgatggctttcgttggagaatcaagagcttcacaagcttattcatcagctttgaagattgctcagaagcttggttacaaaacaggtttagctaaaggaatgggacttggtgctacatacttcgttgtcttttgttgttacgctctcttgctttggtacggtggttatctagttcgccaccatttgaccaacggtggtctcgctattgccacaatgttcgccgttatgattggtggattggcattgggacaatcagcaccgagcatggctgcatttgccaaagcaaaggttgctgctgcaaagatctttagaatcattgatcacaaaccaacgatagagcgtaacagcgagtccggtgtggagttagactcagtcacgggtcttgtcgagcttaaaaatgtggacttttcgtatccgtcaaggccagatgttaagattcttaacaacttctgcctctctgttcctgctgggaagaccattgctttggttgggagcagtggttcaggaaaaagcacagtcgtttcgcttatagagcggttttacgacccgaactcaggacaagttttactagatgggcaagacctgaagacgctgaaactgagatggttaaggcaacagatagggctagtgagtcaagaacctgcattattcgccacttctatcaaggagaatatactcttaggccgtcctgacgcagatcaagtcgagatagaggaggctgctcgagtcgcaaatgctcattcctttatcatcaaactacctgatggcttcgacacacaggttggggagagaggattgcagctgtctggtgggcagaagcaaagaatagcgatagcaagagcgatgttgaagaacccggcgatacttctattagatgaggcgacgagtgcattggattctgaatcagagaagcttgtacaagaggctttggatcgtttcatgattggaaggactactctcatcattgctcatcgcctttctaccattcgaaaagctgaccttgttgctgtgctacagcaaggaagtgtctctgagattggaacgcatgatgagcttttttccaagggagaaaatggagtctatgctaagctaattaaaatgcaagaagcagctcacgaaaccgccatgagcaatgcaagaaagagtagcgcaagaccgtcgagtgctagaaactcggttagctcgccaataatgactcggaattcgtcgtatggaagatcaccttattcacggagactatccgatttctcaacttctgattttagcctctccattgacgcttcgtcctacccaaactatagaaacgagaagctggccttcaaggatcaagccaattcattctggcgactagctaaaatgaactctccagagtggaaatacgctttgctcggttcagtaggctctgtcatttgtggctcccttagtgcattcttcgcatatgtcctcagtgcagtcttaagcgtctactacaacccggaccacgaatacatgatcaaacagattgataagtactgttatctcttaatcggtctctcttccgcagcacttgtcttcaacacgctccagcattctttctgggacattgtgggtgagaatctgaccaagagagtccgtgagaagatgctgagcgctgtactcaagaatgagatggcttggtttgatcaagaggagaacgaaagtgcaagaatcgcagcaagattagctcttgatgctaataatgtgagatctgcgataggagatagaatatcggttattgtgcagaacacagcactgatgcttgttgcttgcactgccgggtttgttctacaatggagactcgcacttgtccttgtcgcagtcttccccgtagttgttgctgcaactgtcttacagaaaatgttcatgactggtttctcgggagacctggaagcggcacatgccaagggaacgcagcttgctggtgaagccatagctaatgtcaggacagttgctgcatttaactcggaggcaaagattgtccgtctctacactgcaaacctcgaaccaccattgaaacgatgcttctggaaaggacagatcgctggaagtggttatggtgtagctcagttctgtctttatgcatcttatgctctcgggctatggtacgcatcatggcttgtgaaacacggcatctctgacttctccaaaaccataagagtcttcatggttctgatggtctcagccaatggtgcagcagagacactcacactggctcctgatttcatcaaaggtggtcaagctatgcggtctgttttcgaacttcttgaccggaaaaccgagattgaacctgatgatcctgataccaccccggtcccagaccggttacgtggtgaagtcgagctcaaacatatcgatttctcttacccttcaaggccagacatccagattttccgtgaccttagccttcgtgctagagctggcaaaaccctagctcttgtgggtccaagcgggtgcggaaaaagctcagttatctccctcatccagagattctacgaaccttcctcaggccgagtcatgatcgacgggaaagacataaggaaatacaacctgaaagccataaggaaacacatagccatagtccctcaagagccgtgcttgttcggaactaccatttacgaaaacattgcatatggacatgaatgtgcgaccgaagcagagatcatacaagccgcgactctagccagtgcgcacaaattcatatccgcgctaccagaaggttacaaaacgtatgttggcgagagaggcgttcagctctcgggaggacagaaacagaggatcgcgatcgcacgtgccctcgtgaggaaagcagagatcatgctgcttgacgaggctacaagcgctcttgatgcagagtccgagagatcagtccaagaagcattagaccaggcttgctctggtagaacatcaatagtcgtggctcataggctatctacaatcaggaacgcacacgtgatcgctgtcatcgatgatggaaaagtggctgaacaaggatcgcattcgcatcttctcaagaaccatcctgatggaatctacgcgcgaatgatacagttgcaaagatttacgcatacacaagtgattggtatgacgtcaggttcaagttctagggttaaggaagatgatgcttagtacttactactttggtcatatagaagaaaaaagaaggagagtaaaaaacaacaaacaccagaagatgtttctgataaaaaactctacgaactcatcattttctctttttttctttctgttttgattttggggttacttatttttggaactacgtttcagatttgatggtatagtattattattgtgtattatcataattaatctaatttttcacctctgtaatatccatttatatgccatatcaatctatgagcctctgcctttctag

SEQ ID NO: 99170 - protein, 1286 aa, Arabidopsis thaliana
  peptide (1)..(1286): Ceres Seq. ID no. 13602336
  misc_feature (44)..(324): Pfam Name: ABC transporter transmembrane region Pfam Description: ABC transporter transmembrane region
  misc_feature (1)..(1262): Homolog of NCBI NO: 14715462 NR Description: CjMDR1 [Coptis japonica]
  misc_feature (528)..(1262): Homolog of NCBI NO: 15234323 NR Description: multidrug resistance P-glycoprotein, putative
  misc_feature (21)..(634): Homolog of NCBI NO: 15234323 NR Description: multidrug resistance P-glycoprotein, putative
  misc_feature (1)..(642): Homolog of NCBI NO: 27368853 NR Description: MDR-like ABC transporter [Oryza sativa (japonica
  misc_feature (605)..(1266): Homolog of NCBI NO: 27368853 NR Description: MDR-like ABC transporter [Oryza sativa (japonica
  misc_feature (625)..(1261): Homolog of NCBI NO: 15233244 NR Description: multidrug resistance P-glycoprotein, putative
  misc_feature (18)..(645): Homolog of NCBI NO: 15233244 NR Description: multidrug resistance P-glycoprotein, putative
  misc_feature (27)..(797): Homolog of NCBI NO: 25407562 NR Description: hypothetical protein AT4g18050 [imported] -
  misc_feature (801)..(1247): Homolog of NCBI NO: 25407562 NR Description: hypothetical protein AT4g18050 [imported] -
  misc_feature (1)..(956): Homolog of NCBI NO: 18496818 NR Description: ABC transporter AbcB3 [Dictyostelium discoideum]
MDNDGGAPPPPPTLVVEEPKKAEIRGVAFKELFRFADGLDYVLMGIGSVGAFVHGCSLPLFLRFFADLVNSFGSNSNNVEKMMEEVLKYALYFLVVGAAIWASSWAEISCWMWSGERQTTKMRIKYLEAALNQDIQFFDTEVRTSDVVFAINTDAVMVQDAISEKLGNFIHYMATFVSGFIVGFTAVWQLALVTLAVVPLIAVIGGIHTTTLSKLSNKSQESLSQAGNIVEQTVVQIRVVMAFVGESRASQAYSSALKIAQKLGYKTGLAKGMGLGATYFVVFCCYALLLWYGGYLVRHHLTNGGLAIATMFAVMIGGLALGQSAPSMAAFAKAKVAAAKIFRIIDHKPTIERNSESGVELDSVTGLVELKNVDFSYPSRPDVKILNNFCLSVPAGKTIALVGSSGSGKSTVVSLIERFYDPNSGQVLLDGQDLKTLKLRWLRQQIGLVSQEPALFATSIKENILLGRPDADQVEIEEAARVANAHSFIIKLPDGFDTQVGERGLQLSGGQKQRIAIARAMLKNPAILLLDEATSALDSESEKLVQEALDRFMIGRTTLIIAHRLSTIRKADLVAVLQQGSVSEIGTHDELFSKGENGVYAKLIKMQEAAHETAMSNARKSSARPSSARNSVSSPIMTRNSSYGRSPYSRRLSDFSTSDFSLSIDASSYPNYRNEKLAFKDQANSFWRLAKMNSPEWKYALLGSVGSVICGSLSAFFAYVLSAVLSVYYNPDHEYMIKQIDKYCYLLIGLSSAALVFNTLQHSFWDIVGENLTKRVREKMLSAVLKNEMAWFDQEENESARIAARLALDANNVRSAIGDRISVIVQNTALMLVACTAGFVLQWRLALVLVAVFPVVVAATVLQKMFMTGFSGDLEAAHAKGTQLAGEAIANVRTVAAFNSEAKIVRLYTANLEPPLKRCFWKGQIAGSGYGVAQFCLYASYALGLWYASWLVKHGISDFSKTIRVFMVLMVSANGAAETLTLAPDFIKGGQAMRSVFELLDRKTEIEPDDPDTTPVPDRLRGEVELKHIDFSYPSRPDIQIFRDLSLRARAGKTLALVGPSGCGKSSVISLIQRFYEPSSGRVMIDGKDIRKYNLKAIRKHIAIVPQEPCLFGTTIYENIAYGHECATEAEIIQAATLASAHKFISALPEGYKTYVGERGVQLSGGQKQRIAIARALVRKAEIMLLDEATSALDAESERSVQEALDQACSGRTSIVVAHRLSTIRNAHVIAVIDDGKVAEQGSHSHLLKNHPDGIYARMIQLQRFTHTQVIGMTSGSSSRVKEDDA

SEQ ID NO: 99171 - protein, 1243 aa, Arabidopsis thaliana
  peptide (1)..(1243): Ceres Seq. ID no. 13602337
  misc_feature (1)..(281): Pfam Name: ABC transporter transmembrane region Pfam Description: ABC transporter transmembrane region
  misc_feature (1)..(1219): Homolog of NCBI NO: 14715462 NR Description: CjMDR1 [Coptis japonica]
  misc_feature (485)..(1219): Homolog of NCBI NO: 15234323 NR Description: multidrug resistance P-glycoprotein, putative
  misc_feature (1)..(591): Homolog of NCBI NO: 15234323 NR Description: multidrug resistance P-glycoprotein, putative
  misc_feature (1)..(599): Homolog of NCBI NO: 27368853 NR Description: MDR-like ABC transporter [Oryza sativa (japonica
  misc_feature (562)..(1223): Homolog of NCBI NO: 27368853 NR Description: MDR-like ABC transporter [Oryza sativa (japonica
  misc_feature (582)..(1218): Homolog of NCBI NO: 15233244 NR Description: multidrug resistance P-glycoprotein, putative
  misc_feature (1)..(602): Homolog of NCBI NO: 15233244 NR Description: multidrug resistance P-glycoprotein, putative
  misc_feature (1)..(754): Homolog of NCBI NO: 25407562 NR Description: hypothetical protein AT4g18050 [imported] -
  misc_feature (758)..(1204): Homolog of NCBI NO: 25407562 NR Description: hypothetical protein AT4g18050 [imported] -
  misc_feature (1)..(913): Homolog of NCBI NO: 18496818 NR Description: ABC transporter AbcB3 [Dictyostelium discoideum]
MGIGSVGAFVHGCSLPLFLRFFADLVNSFGSNSNNVEKMMEEVLKYALYFLVVGAAIWASSWAEISCWMWSGERQTTKMRIKYLEAALNQDIQFFDTEVRTSDVVFAINTDAVMVQDAISEKLGNFIHYMATFVSGFIVGFTAVWQLALVTLAVVPLIAVIGGIHTTTLSKLSNKSQESLSQAGNIVEQTVVQIRVVMAFVGESRASQAYSSALKIAQKLGYKTGLAKGMGLGATYFVVFCCYALLLWYGGYLVRHHLTNGGLAIATMFAVMIGGLALGQSAPSMAAFAKAKVAAAKIFRIIDHKPTIERNSESGVELDSVTGLVELKNVDFSYPSRPDVKILNNFCLSVPAGKTIALVGSSGSGKSTVVSLIERFYDPNSGQVLLDGQDLKTLKLRWLRQQIGLVSQEPALFATSIKENILLGRPDADQVEIEEAARVANAHSFIIKLPDGFDTQVGERGLQLSGGQKQRIAIARAMLKNPAILLLDEATSALDSESEKLVQEALDRFMIGRTTLIIAHRLSTIRKADLVAVLQQGSVSEIGTHDELFSKGENGVYAKLIKMQEAAHETAMSNARKSSARPSSARNSVSSPIMTRNSSYGRSPYSRRLSDFSTSDFSLSIDASSYPNYRNEKLAFKDQANSFWRLAKMNSPEWKYALLGSVGSVICGSLSAFFAYVLSAVLSVYYNPDHEYMIKQIDKYCYLLIGLSSAALVFNTLQHSFWDIVGENLTKRVREKMLSAVLKNEMAWFDQEENESARIAARLALDANNVRSAIGDRISVIVQNTALMLVACTAGFVLQWRLALVLVAVFPVVVAATVLQKMFMTGFSGDLEAAHAKGTQLAGEAIANVRTVAAFNSEAKIVRLYTANLEPPLKRCFWKGQIAGSGYGVAQFCLYASYALGLWYASWLVKHGISDFSKTIRVFMVLMVSANGAAETLTLAPDFIKGGQAMRSVFELLDRKTEIEPDDPDTTPVPDRLRGEVELKHIDFSYPSRPDIQIFRDLSLRARAGKTLALVGPSGCGKSSVISLIQRFYEPSSGRVMIDGKDIRKYNLKAIRKHIAIVPQEPCLFGTTIYENIAYGHECATEAEIIQAATLASAHKFISALPEGYKTYVGERGVQLSGGQKQRIAIARALVRKAEIMLLDEATSALDAESERSVQEALDQACSGRTSIVVAHRLSTIRNAHVIAVIDDGKVAEQGSHSHLLKNHPDGIYARMIQLQRFTHTQVIGMTSGSSSRVKEDDA

SEQ ID NO: 99172 - protein, 1205 aa, Arabidopsis thaliana
  peptide (1)..(1205): Ceres Seq. ID no. 13602338
  misc_feature (1)..(243): Pfam Name: ABC transporter transmembrane region Pfam Description: ABC transporter transmembrane region
  misc_feature (1)..(1181): Homolog of NCBI NO: 14715462 NR Description: CjMDR1 [Coptis japonica]
  misc_feature (447)..(1181): Homolog of NCBI NO: 15234323 NR Description: multidrug resistance P-glycoprotein, putative
  misc_feature (1)..(553): Homolog of NCBI NO: 15234323 NR Description: multidrug resistance P-glycoprotein, putative
  misc_feature (1)..(561): Homolog of NCBI NO: 27368853 NR Description: MDR-like ABC transporter [Oryza sativa (japonica
  misc_feature (524)..(1185): Homolog of NCBI NO: 27368853 NR Description: MDR-like ABC transporter [Oryza sativa (japonica
  misc_feature (544)..(1180): Homolog of NCBI NO: 15233244 NR Description: multidrug resistance P-glycoprotein, putative
  misc_feature (1)..(564): Homolog of NCBI NO: 15233244 NR Description: multidrug resistance P-glycoprotein, putative
  misc_feature (1)..(716): Homolog of NCBI NO: 25407562 NR Description: hypothetical protein AT4g18050 [imported] -
  misc_feature (720)..(1166): Homolog of NCBI NO: 25407562 NR Description: hypothetical protein AT4g18050 [imported] -
  misc_feature (1)..(875): Homolog of NCBI NO: 18496818 NR Description: ABC transporter AbcB3 [Dictyostelium discoideum]
MMEEVLKYALYFLVVGAAIWASSWAEISCWMWSGERQTTKMRIKYLEAALNQDIQFFDTEVRTSDVVFAINTDAVMVQDAISEKLGNFIHYMATFVSGFIVGFTAVWQLALVTLAVVPLIAVIGGIHTTTLSKLSNKSQESLSQAGNIVEQTVVQIRVVMAFVGESRASQAYSSALKIAQKLGYKTGLAKGMGLGATYFVVFCCYALLLWYGGYLVRHHLTNGGLAIATMFAVMIGGLALGQSAPSMAAFAKAKVAAAKIFRIIDHKPTIERNSESGVELDSVTGLVELKNVDFSYPSRPDVKILNNFCLSVPAGKTIALVGSSGSGKSTVVSLIERFYDPNSGQVLLDGQDLKTLKLRWLRQQIGLVSQEPALFATSIKENILLGRPDADQVEIEEAARVANAHSFIIKLPDGFDTQVGERGLQLSGGQKQRIAIARAMLKNPAILLLDEATSALDSESEKLVQEALDRFMIGRTTLIIAHRLSTIRKADLVAVLQQGSVSEIGTHDELFSKGENGVYAKLIKMQEAAHETAMSNARKSSARPSSARNSVSSPIMTRNSSYGRSPYSRRLSDFSTSDFSLSIDASSYPNYRNEKLAFKDQANSFWRLAKMNSPEWKYALLGSVGSVICGSLSAFFAYVLSAVLSVYYNPDHEYMIKQIDKYCYLLIGLSSAALVFNTLQHSFWDIVGENLTKRVREKMLSAVLKNEMAWFDQEENESARIAARLALDANNVRSAIGDRISVIVQNTALMLVACTAGFVLQWRLALVLVAVFPVVVAATVLQKMFMTGFSGDLEAAHAKGTQLAGEAIANVRTVAAFNSEAKIVRLYTANLEPPLKRCFWKGQIAGSGYGVAQFCLYASYALGLWYASWLVKHGISDFSKTIRVFMVLMVSANGAAETLTLAPDFIKGGQAMRSVFELLDRKTEIEPDDPDTTPVPDRLRGEVELKHIDFSYPSRPDIQIFRDLSLRARAGKTLALVGPSGCGKSSVISLIQRFYEPSSGRVMIDGKDIRKYNLKAIRKHIAIVPQEPCLFGTTIYENIAYGHECATEAEIIQAATLASAHKFISALPEGYKTYVGERGVQLSGGQKQRIAIARALVRKAEIMLLDEATSALDAESERSVQEALDQACSGRTSIVVAHRLSTIRNAHVIAVIDDGKVAEQGSHSHLLKNHPDGIYARMIQLQRFTHTQVIGMTSGSSSRVKEDDA

SEQ ID NO: 99173 - DNA, 1340 bp, Arabidopsis thaliana
  misc_feature (1)..(1340): Ceres Seq. ID no. 13602339
  misc_feature: MA Experiment ID: 108434 Result: Down-regulated in Transcription
  misc_feature: MA Experiment 108434 PARAMETER Experiment Name: At_Root_Tips_cDNA_P Parameter: Tissue Value: Root Tips
  misc_feature: MA Experiment ID: 108435 Result: Down-regulated in Transcription
  misc_feature: MA Experiment 108435 PARAMETER Experiment Name: At_stm_Mutants_cDNA_P Parameter: Plant Line Value: wt Landsburg vs stm
  misc_feature: MA Experiment 108435 PARAMETER Experiment Name: At_stm_Mutants_cDNA_P Parameter: Tissue Value: Shoot Apical Meristem Region
  misc_feature: MA Experiment ID: 108464 Result: Up-regulated in Transcription
  misc_feature: MA Experiment 108464 PARAMETER Experiment Name: At_Germinating_Seeds_cDNA_P Parameter: Age (day) Value: 4 vs. 0
  misc_feature: MA Experiment 108464 PARAMETER Experiment Name: At_Germinating_Seeds_cDNA_P Parameter: Tissue Value: Germinating Seeds
  misc_feature: MA Experiment ID: 108488 Result: Down-regulated in Transcription
  misc_feature: MA Experiment ID: 108489 Result: Up-regulated in Transcription
  misc_feature: MA Experiment ID: 108561 Result: Up-regulated in Transcription
  misc_feature: MA Experiment 108561 PARAMETER Experiment Name: At_100uM_ABA_cDNA_P Parameter: Timepoint (hr) Value: 6
  misc_feature: MA Experiment 108561 PARAMETER Experiment Name: At_100uM_ABA_cDNA_P Parameter: Tissue Value: Aerial
  misc_feature: MA Experiment 108561 PARAMETER Experiment Name: At_100uM_ABA_cDNA_P Parameter: Treatment Value: 100uM ABA vs. No Treatment
  misc_feature: MA Experiment ID: 108576 Result: Up-regulated in Transcription
  misc_feature: MA Experiment 108576 PARAMETER Experiment Name: At_42deg_Heat_cDNA_P Parameter: Temperature (deg C) Value: 42 vs. 22
  misc_feature: MA Experiment 108576 PARAMETER Experiment Name: At_42deg_Heat_cDNA_P Parameter: Timepoint (hr) Value: 1
  misc_feature: MA Experiment 108576 PARAMETER Experiment Name: At_42deg_Heat_cDNA_P Parameter: Tissue Value: Aerial
  misc_feature: MA Experiment ID: 108585 Result: Up-regulated in Transcription
  misc_feature: MA Experiment 108585 PARAMETER Experiment Name: At_5mM_NaNP_cDNA_P Parameter: Timepoint (hr) Value: 6
  misc_feature: MA Experiment 108585 PARAMETER Experiment Name: At_5mM_NaNP_cDNA_P Parameter: Tissue Value: Aerial
  misc_feature: MA Experiment 108585 PARAMETER Experiment Name: At_5mM_NaNP_cDNA_P Parameter: Treatment Value: null
  misc_feature: MA Experiment ID: 108667 Result: Up-regulated in Transcription
  misc_feature: MA Experiment 108667 PARAMETER Experiment Name: At_2mM_SA_cDNA_P Parameter: Plant Line Value: WS
  misc_feature: MA Experiment 108667 PARAMETER Experiment Name: At_2mM_SA_cDNA_P Parameter: Timepoint (hr) Value: 1
  misc_feature: MA Experiment 108667 PARAMETER Experiment Name: At_2mM_SA_cDNA_P Parameter: Treatment Value: 2mM SA vs. No Treatment
  misc_feature: MA Experiment ID: 20000090 Result: Down-regulated in Transcription
  misc_feature: MA Experiment ID: 20000112 Result: Up-regulated in Transcription
  misc_feature: MA Experiment 20000112 PARAMETER Experiment Name: At_42deg_Heat_cDNA_P Parameter: Temperature (deg C) Value: 42 vs. 22
  misc_feature: MA Experiment 20000112 PARAMETER Experiment Name: At_42deg_Heat_cDNA_P Parameter: Timepoint (hr) Value: 2
  misc_feature: MA Experiment 20000112 PARAMETER Experiment Name: At_42deg_Heat_cDNA_P Parameter: Tissue Value: Aerial
  misc_feature: MA Experiment ID: 20000113 Result: Up-regulated in Transcription
  misc_feature: MA Experiment 20000113 PARAMETER Experiment Name: At_42deg_Heat_cDNA_P Parameter: Temperature (deg C) Value: 42 vs. 22
  misc_feature: MA Experiment 20000113 PARAMETER Experiment Name: At_42deg_Heat_cDNA_P Parameter: Timepoint (hr) Value: 8
  misc_feature: MA Experiment 20000113 PARAMETER Experiment Name: At_42deg_Heat_cDNA_P Parameter: Tissue Value: Aerial
  misc_feature: MA Experiment ID: 20000224 Result: Up-regulated in Transcription
  misc_feature: MA Experiment ID: 20000328 Result: Up-regulated in Transcription
  misc_feature: MA Experiment 20000328 PARAMETER Experiment Name: At_42deg_Heat_Sub_P Parameter: Age (day) Value: 14
  misc_feature: MA Experiment 20000328 PARAMETER Experiment Name: At_42deg_Heat_Sub_P Parameter: Organism Value: A. thaliana
  misc_feature: MA Experiment 20000328 PARAMETER Experiment Name: At_42deg_Heat_Sub_P Parameter: Plant Line Value: WS
  misc_feature: MA Experiment 20000328 PARAMETER Experiment Name: At_42deg_Heat_Sub_P Parameter: Temperature (deg C) Value: 42 vs. 22
  misc_feature: MA Experiment 20000328 PARAMETER Experiment Name: At_42deg_Heat_Sub_P Parameter: Timepoint (hr) Value: 6
  misc_feature: MA Experiment 20000328 PARAMETER Experiment Name: At_42deg_Heat_Sub_P Parameter: Tissue Value: Aerial
  misc_feature: MA Experiment ID: 20000346 Result: Up-regulated in Transcription
  misc_feature: MA Experiment 20000346 PARAMETER Experiment Name: At_2mM_SA_Sub_P Parameter: Age (day) Value: 14
  misc_feature: MA Experiment 20000346 PARAMETER Experiment Name: At_2mM_SA_Sub_P Parameter: Organism Value: A. thaliana
  misc_feature: MA Experiment 20000346 PARAMETER Experiment Name: At_2mM_SA_Sub_P Parameter: Plant Line Value: WS
  misc_feature: MA Experiment 20000346 PARAMETER Experiment Name: At_2mM_SA_Sub_P Parameter: Timepoint (hr) Value: 1
  misc_feature: MA Experiment 20000346 PARAMETER Experiment Name: At_2mM_SA_Sub_P Parameter: Tissue Value: Aerial
  misc_feature: MA Experiment 20000346 PARAMETER Experiment Name: At_2mM_SA_Sub_P Parameter: Treatment Value: 2mM SA vs. No Treatment
  misc_feature: MA Experiment ID: 20000355 Result: Down-regulated in Transcription
  misc_feature: MA Experiment 20000355 PARAMETER Experiment Name: At_Siliques_Sub_P Parameter: Age (day) Value: 21
  misc_feature: MA Experiment 20000355 PARAMETER Experiment Name: At_Siliques_Sub_P Parameter: Organism Value: A. thaliana
  misc_feature: MA Experiment 20000355 PARAMETER Experiment Name: At_Siliques_Sub_P Parameter: Plant Line Value: WS
  misc_feature: MA Experiment 20000355 PARAMETER Experiment Name: At_Siliques_Sub_P Parameter: Tissue Value: Less Than 5mm Siliques vs. Whole Plant
  misc_feature: MA Experiment ID: 20000440 Result: Down-regulated in Transcription
  misc_feature: MA Experiment 20000440 PARAMETER Experiment Name: At_Closed-Flower__Sub_P Parameter: Tissue Value: Closed Flower vs. Whole Plant
gttcaaacaattcttcgtcctattaaatacaaaaaataaaaatccttaaaaatatatccttatcttcaaccaagaatgggagaggtccaagaaggtcccaaagttgaacaagagaagaagccggctgccaccgtagtcccagttgagactactgacggcaagccaaagagcggcggaggagattccgcggcagcagcagcaccaccggtcgccgcggttgtctctgcctttgtttacaaagtggatatgcactgtgaaggctgcgctaagaagataaagcgaatggttaagcactttgatggagtgaaagatgtgacggcagatactggtggaaataagcttttggtggtcggaaagattgatccagtgaaactccaggagaagttggaggagaaaaccaagagaaaggtggttctcgcgaatccaccgccaaaggtagagggacctgttgctgccgccgttggagagaagaaagccgatggtggagataaggaggcggctcctcctgctcctgctccggcagctccaaaagagagcgtggtgcctttaaagatcagactacattgcgaaggatgtattcagaaaatcaagaaaataatattgaaaatcaaaggagtcgaaacagtggctattgacggagctaaagacgtggtgacggttaaaggaacgatagacgttaaagaacttgtgcctctactcactaagaagctcaaaagaaccgtcgagcctcttgttcccgccaaaaaagatgacggagccgccgagaataagaagacggaagctgccgctcctgacgcaaagaaagaggctccgtccgccggagttaacgaagcaaagaaggaaggaagtgacggtggagagaagaaaaaagaggttggagacggcggagagaagaagaaagaaggtggtgacggcggagagaaaaagaaagaagccggagacggaggagagaagaagaaagatggcggaggtgtgccggccccggtggcgatggtgaataagatggattattatgggtactcagcttatccaacggctcctatgcattggcaagaaggacacgtgtacggtcagagttattcgatgacaggtcagaattatccagtgggaggtcagagttatccaggttcaggatacaactacgcaagtgagagttacgtgccgtacgcgcagccaaacgtgaacgctcctggaatgttcagcgacgagaatcccaatggttgctctgttatgtaataatggggttaaactgtaaatataagaaactataagggtttaaaacataattgtgggaacacaaaacttatgttaaaattttgaaagtctactttgagccagcg

SEQ ID NO: 99174 - protein, 386 aa, Arabidopsis thaliana
  peptide (1)..(386): Ceres Seq. ID no. 13602340
  misc_feature (1)..(386): Homolog of NCBI NO: 18404283 NR Description: heavy-metal-associated domain-containing protein thaliana] >gi|20197942|gb|AAD31580.2| putative farnesylated
  misc_feature (58)..(386): Homolog of NCBI NO: 25408515 NR Description: probable farnesylated protein [imported] -
  misc_feature (142)..(386): Homolog of NCBI NO: 4097545 NR Description: ATFP2 [Arabidopsis thaliana]
  misc_feature (77)..(386): Homolog of NCBI NO: 15242741 NR Description: heavy-metal-associated domain-containing protein
  misc_feature (1)..(350): Homolog of NCBI NO: 38344582 NR Description: OSJNBa0053B21.14 [Oryza sativa (japonica
  misc_feature (27)..(262): Homolog of NCBI NO: 22327990 NR Description: heavy-metal-associated domain-containing protein thaliana] >gi|10176908|dbj|BAB10101.1| to unknown protein [Arabidopsis thaliana]
  misc_feature (28)..(362): Homolog of NCBI NO: 15242741 NR Description: heavy-metal-associated domain-containing protein
  misc_feature (1)..(331): Homolog of NCBI NO: 18424719 NR Description: copper chaperone (CCH)-related [Arabidopsis >gi|13430830|gb|AAK26037.1|AF360327_1 unknown protein thaliana] >gi|15810597|gb|AAL07186.1| unknown protein
  misc_feature (1)..(331): Homolog of NCBI NO: 9758294 NR Description: contains similarity to ATFP3~gene_id:MLE2.16
  misc_feature (38)..(324): Homolog of NCBI NO: 4097547 NR Description: ATFP3 [Arabidopsis thaliana]
MGEVQEGPKVEQEKKPAATVVPVETTDGKPKSGGGDSAAAAAPPVAAVVSAFVYKVDMHCEGCAKKIKRMVKHFDGVKDVTADTGGNKLLVVGKIDPVKLQEKLEEKTKRKVVLANPPPKVEGPVAAAVGEKKADGGDKEAAPPAPAPAAPKESVVPLKIRLHCEGCIQKIKKIILKIKGVETVAIDGAKDVVTVKGTIDVKELVPLLTKKLKRTVEPLVPAKKDDGAAENKKTEAAAPDAKKEAPSAGVNEAKKEGSDGGEKKKEVGDGGEKKKEGGDGGEKKKEAGDGGEKKKDGGGVPAPVAMVNKMDYYGYSAYPTAPMHWQEGHVYGQSYSMTGQNYPVGGQSYPGSGYNYASESYVPYAQPNVNAPGMFSDENPNGCSVM

SEQ ID NO: 99175 - protein, 329 aa, Arabidopsis thaliana
  peptide (1)..(329): Ceres Seq. ID no. 13602341
  misc_feature (1)..(329): Homolog of NCBI NO: 18404283 NR Description: heavy-metal-associated domain-containing protein thaliana] >gi|20197942|gb|AAD31580.2| putative farnesylated
  misc_feature (1)..(329): Homolog of NCBI NO: 25408515 NR Description: probable farnesylated protein [imported] -
  misc_feature (85)..(329): Homolog of NCBI NO: 4097545 NR Description: ATFP2 [Arabidopsis thaliana]
  misc_feature (20)..(329): Homolog of NCBI NO: 15242741 NR Description: heavy-metal-associated domain-containing protein
  misc_feature (1)..(293): Homolog of NCBI NO: 38344582 NR Description: OSJNBa0053B21.14 [Oryza sativa (japonica
  misc_feature (1)..(205): Homolog of NCBI NO: 22327990 NR Description: heavy-metal-associated domain-containing protein thaliana] >gi|10176908|dbj|BAB10101.1| to unknown protein [Arabidopsis thaliana]
  misc_feature (1)..(305): Homolog of NCBI NO: 15242741 NR Description: heavy-metal-associated domain-containing protein
  misc_feature (1)..(274): Homolog of NCBI NO: 18424719 NR Description: copper chaperone (CCH)-related [Arabidopsis >gi|13430830|gb|AAK26037.1|AF360327_1 unknown protein thaliana] >gi|15810597|gb|AAL07186.1| unknown protein
  misc_feature (1)..(274): Homolog of NCBI NO: 9758294 NR Description: contains similarity to ATFP3~gene_id:MLE2.16
  misc_feature (1)..(267): Homolog of NCBI NO: 4097547 NR Description: ATFP3 [Arabidopsis thaliana]
MHCEGCAKKIKRMVKHFDGVKDVTADTGGNKLLVVGKIDPVKLQEKLEEKTKRKVVLANPPPKVEGPVAAAVGEKKADGGDKEAAPPAPAPAAPKESVVPLKIRLHCEGCIQKIKKIILKIKGVETVAIDGAKDVVTVKGTIDVKELVPLLTKKLKRTVEPLVPAKKDDGAAENKKTEAAAPDAKKEAPSAGVNEAKKEGSDGGEKKKEVGDGGEKKKEGGDGGEKKKEAGDGGEKKKDGGGVPAPVAMVNKMDYYGYSAYPTAPMHWQEGHVYGQSYSMTGQNYPVGGQSYPGSGYNYASESYVPYAQPNVNAPGMFSDENPNGCSVM

SEQ ID NO: 99176 - protein, 317 aa, Arabidopsis thaliana
  peptide (1)..(317): Ceres Seq. ID no. 13602342
  misc_feature (1)..(317): Homolog of NCBI NO: 18404283 NR Description: heavy-metal-associated domain-containing protein thaliana] >gi|20197942|gb|AAD31580.2| putative farnesylated
  misc_feature (1)..(317): Homolog of NCBI NO: 25408515 NR Description: probable farnesylated protein [imported] -
  misc_feature (73)..(317): Homolog of NCBI NO: 4097545 NR Description: ATFP2 [Arabidopsis thaliana]
  misc_feature (8)..(317): Homolog of NCBI NO: 15242741 NR Description: heavy-metal-associated domain-containing protein
  misc_feature (1)..(281): Homolog of NCBI NO: 38344582 NR Description: OSJNBa0053B21.14 [Oryza sativa (japonica
  misc_feature (1)..(193): Homolog of NCBI NO: 22327990 NR Description: heavy-metal-associated domain-containing protein thaliana] >gi|10176908|dbj|BAB10101.1| to unknown protein [Arabidopsis thaliana]
  misc_feature (1)..(293): Homolog of NCBI NO: 15242741 NR Description: heavy-metal-associated domain-containing protein
  misc_feature (1)..(262): Homolog of NCBI NO: 18424719 NR Description: copper chaperone (CCH)-related [Arabidopsis >gi|13430830|gb|AAK26037.1|AF360327_1 unknown protein thaliana] >gi|15810597|gb|AAL07186.1| unknown protein
  misc_feature (1)..(262): Homolog of NCBI NO: 9758294 NR Description: contains similarity to ATFP3~gene_id:MLE2.16
  misc_feature (1)..(255): Homolog of NCBI NO: 4097547 NR Description: ATFP3 [Arabidopsis thaliana]
MVKHFDGVKDVTADTGGNKLLVVGKIDPVKLQEKLEEKTKRKVVLANPPPKVEGPVAAAVGEKKADGGDKEAAPPAPAPAAPKESVVPLKIRLHCEGCIQKIKKIILKIKGVETVAIDGAKDVVTVKGTIDVKELVPLLTKKLKRTVEPLVPAKKDDGAAENKKTEAAAPDAKKEAPSAGVNEAKKEGSDGGEKKKEVGDGGEKKKEGGDGGEKKKEAGDGGEKKKDGGGVPAPVAMVNKMDYYGYSAYPTAPMHWQEGHVYGQSYSMTGQNYPVGGQSYPGSGYNYASESYVPYAQPNVNAPGMFSDENPNGCSVM

SEQ ID NO: 99177 - DNA, 4432 bp, Arabidopsis thaliana
  misc_feature (1)..(4432): Ceres Seq. ID no. 13602347
  misc_feature: MA Experiment ID: 108433 Result: Down-regulated in Transcription
  misc_feature: MA Experiment 108433 PARAMETER Experiment Name: At_rhl_Mutant2_cDNA_P Parameter: Age (day) Value: 7
  misc_feature: MA Experiment 108433 PARAMETER Experiment Name: At_rhl_Mutant2_cDNA_P Parameter: Organism Value: A. thaliana
  misc_feature: MA Experiment 108433 PARAMETER Experiment Name: At_rhl_Mutant2_cDNA_P Parameter: Plant Line Value: rhl Mutant vs. wt landsburg
  misc_feature: MA Experiment 108433 PARAMETER Experiment Name: At_rhl_Mutant2_cDNA_P Parameter: Tissue Value: Roots
  misc_feature: MA Experiment ID: 108434 Result: Up-regulated in Transcription
  misc_feature: MA Experiment 108434 PARAMETER Experiment Name: At_Root_Tips_cDNA_P Parameter: Tissue Value: Root Tips
  misc_feature: MA Experiment ID: 108461 Result: Down-regulated in Transcription
  misc_feature: MA Experiment 108461 PARAMETER Experiment Name: At_Germinating_Seeds_cDNA_P Parameter: Age (day) Value: 1 vs. 0
  misc_feature: MA Experiment 108461 PARAMETER Experiment Name: At_Germinating_Seeds_cDNA_P Parameter: Tissue Value: Germinating Seeds
  misc_feature: MA Experiment ID: 108462 Result: Down-regulated in Transcription
  misc_feature: MA Experiment 108462 PARAMETER Experiment Name: At_Germinating_Seeds_cDNA_P Parameter: Age (day) Value: 2 vs. 0
  misc_feature: MA Experiment 108462 PARAMETER Experiment Name: At_Germinating_Seeds_cDNA_P Parameter: Tissue Value: Germinating Seeds
  misc_feature: MA Experiment ID: 108463 Result: Down-regulated in Transcription
  misc_feature: MA Experiment 108463 PARAMETER Experiment Name: At_Germinating_Seeds_cDNA_P Parameter: Age (day) Value: 3 vs. 0
  misc_feature: MA Experiment 108463 PARAMETER Experiment Name: At_Germinating_Seeds_cDNA_P Parameter: Tissue Value: Germinating Seeds
  misc_feature: MA Experiment ID: 108464 Result: Down-regulated in Transcription
  misc_feature: MA Experiment 108464 PARAMETER Experiment Name: At_Germinating_Seeds_cDNA_P Parameter: Age (day) Value: 4 vs. 0
  misc_feature: MA Experiment 108464 PARAMETER Experiment Name: At_Germinating_Seeds_cDNA_P Parameter: Tissue Value: Germinating Seeds
  misc_feature: MA Experiment ID: 20000180 Result: Down-regulated in Transcription
  misc_feature: MA Experiment 20000180 PARAMETER Experiment Name: At_Germinating_Seeds_P Parameter: Age (hr) Value: 24 vs. 0
  misc_feature: MA Experiment 20000180 PARAMETER Experiment Name: At_Germinating_Seeds_P Parameter: Tissue Value: Germinating Seeds
atgagagttagggttgatgtttgttggacacaacacatcttcttgttctttgtttttggcttgagttttatgtcatttgcactatctctggatggagatgattacagcaaaacagggaacccaaaagctcttgtttcggttacaaaccttatctatactcgacttcagaatctaaagactgttttaaaggctgacgttgatcgagatttaggttattgcatcaagaatttgaagggcgattggaatgaagcatttaattttgataaaaatctggacttcttaagcaattgtgtcaagaaaaatgatggtgacctcacacttagactatgttcagctgcggagataaagttctactttagtagttttgttagaagagatgaagcaacaacggttcatgtaaagcctaacatcaactgcaatttagctaaatgggtttccggatgtgagcctggatggagttgcaatgcagatgatgaaaaaagatttgatctcaacaatggaaaaattcttccatctagaactcgtaaatgtcaaccttgttgtgagggtttcttttgtccacaaggtcttgcttgcatgataccgtgtccgttaggcgcatattgcccgcttgccaagcttaataaaacaacaggattttgtgagccatataactaccaaattcctccgggaaagttgaatcatacatgtggttctgcagatagttgggttgatgctgagagtagtggtgatatgttttgttcaccaggttcatattgcccaacaacgattcgaaaagtcacttgtagtagtggacattactgcagacaaggttctacgtcacagaaaccatgttttaagctcgcaacatgcaatccgaataccgcaaaccaaaatattcatgcctatggagcgatcttaattgcatcactaagtcttctcatgatcatggtttataactgttctgatcaagttctcgccactcgagaaaaaagacaagcaaagtcgagagaagctgcagcgagacatgcaaaagaaacaacacaagctcgagaaaggtggaaaaccgcaaaaggtgttgccaagaaccaaaagatgggattgtctgcacaactatctcaaacattttctcgcatgaaatctgctagaaaggatgccacaccagttaaagcatcgggaaagtcaaaagacaagaaaaaagaaccgagtaatttaaccaagatgatgaaatcaatggaggagaacccgagtaacaacgaaggattcaatgtaggaaccggtagtaaacctgggaagaagccacaagctccaaagggtaaacaactacatacccaaagccagatttttaagtatgcatatggtcagattgagaaggagaaagctatggaacaaaacaacaagaacttgacattctcgggagttatttcaatggctactgacactgagatgaggactagacctgttatagaagtcgcgtttaaggatctaactcttacattgaagggtaaacataagcatatattgagatctgtcaccggaaagatcatgccaggtcgtgtttctgcggtcatgggtccatcaggagctggaaaaactacatttctttctgccttggcaggaaaagcaactggatgtacgaggacgggtctaatccttataaatggtagaaatgactctataaactcgtataagaagatcactggatttgtgccacaagatgatgttgtgcatggcaatcttaccgtcgaagagaaccttcgatttagcgcaagatgcagattaagtgcttatatgtcaaaagcagacaaagttttgatcattgaaagagtgattgaaagcttaggattacaacatgtaagagactcgttggttggtacgatagaaaaaagaggaatctctggaggacaaagaaaacgtgtgaacgttggtgttgaaatggtcatggaaccttctctattgatattagatgaacccactacaggtttagatagtgcatcttcacaattacttcttagagcacttcgacgtgaagcacttgaaggtgttaacatttgtatggtcgtccatcaacccagttatacaatgtacaaaatgttcgatgacatgataatactagcaaaaggtggtcttaccgtgtaccatggatcagtcaaaaaaatagaagaatattttgctgatatcggaatcacggttcccgatcgtgtcaatcctcctgatcattatatagatattcttgaaggcattgtgaaaccagatggtgatataactatagaacaacttcctgtgagatggatgctgcacaatggttaccctgtgcctcacgatatgttgaaattttgtgatggacttccttcctcgtcaactggatcagctcaagaggattccactcataattcttttagtaatgatctatggcaagatgtgaaaactaatgtggagattacaaaagatcagttacaacacaattactcgaattctcatgacaattctaatcgagtaactcctaccgtaggtcgacaatatagatattttgttggaagggttggaaaacaacggcttagagaagcaagactacaagcgttagatttcctaatattattagttgcgggagcttgtttaggaactcttgcgaaggtgaacgacgagacaatcgatacacttggctacacatacaccataatagctgtctctcttttgtgtaagatctcggcattgagatcattctctgtagataaattacaatattggagagaaagtgccgctggaattagcagtttggcacattttatggctaaagacacaatggaccatttaaacacaattatgaaacctttagtgtacttgtccatgttctacttcttcaacaacccgagatctagtttcgaagacaactacattgtactagtatgcttggtctactgtgtaacaggcatggcttacatttttgccatattgtacagtcctagcgccgcacaattgttgtcggtgttagtccccgttgttatgactcttatcgctaatcaagataaagaaagcatggtccttaagtatctcggaagcttttgctaccccaaatggactctcgaagcctttgtcctttccaatgctcaaaggtactctggagtgtgggtggtgactagatgcagttcattgtctcaaaacggatatgatcttagtgattggatattgtgtctcattgttctcgttctcatgggactaatatgccgattcatagcttatttctgcatgggaagcggcgtaactaaaaaacacgacacgatgatgaattcggcgtttcgaaacgttcacatcactgcgtctcgtttgataaaccctaagcccttttcttcttcgattctccattttcttcctctctgttccggcgacgcttctcctcgccgttccaatcctctccggcatagaaactcggtgtctccttcatcttcctttcccttctgttcgacttcttccttttcttctttctacattcctatggcgggaggagatggtcaggtgtctcattcgcttgagaagcagttcgagagtttccgtgttcaattggaagaatctgcagctttgagagagcagattcgtgctgtggttatggagattgagtctgctactaggcttattcaagctaatcttcttctcgttcatcaatcgcgtcctattcctgaggttatcgagaaagctaaggaaaaaatcgttgatttgaagcagtattatggtcggcttgctgaaattcttgaggagtgtcctggacaatactataggtaccatggagactggagaagtgaaacacaggcagtggtctcccagcttgcttttatgcactggctagaaactggaactcttctcgtgcataccgaagctgaagaaaaacttgggttgaacagtttggagtttggattggagacagaagattatctcactggaatttgtttcatgtcaaacgatttgcctaggtacgtggttaatcgagtgacagcaggagactatgactgcccaagaaaggtgatgaatttcctgacagatcttcatgcagcctttcgcatgctcaatctcaggaacgatttcctgcgcaagaaattcgacagtatgaagtacgacctaagaagagtggaagaagtttactatgatgtcaagatccgaggtttgatttccggcggagatcctcctggcgtccaagcagtccaaggccaatcctaaatgtcctcggctctttttaagtttttatgtataactttgtttagctagcatgaaaacgtcaaggagtgttcttctctaaaccaaaaacggcaaggaaaatagagagactgtagtttttaggtgtagtttgcaattactgaaaacggcaagtattccttttgtgggccttgaaagcccacattttagtcacaactttactgttatccgaagtcagcagcttaatagtataacagtagatgttcat

SEQ ID NO: 99178 - protein, 1395 aa, Arabidopsis thaliana
  peptide (1)..(1395): Ceres Seq. ID no. 13602348
  misc_feature (1184)..(1379): Pfam Name: Translin family Pfam Description: Translin family
  misc_feature (34)..(1076): Homolog of NCBI NO: 30695493 NR Description: ABC transporter family protein [Arabidopsis
  misc_feature (281)..(1076): Homolog of NCBI NO: 7769862 NR Description: F12M16.28 [Arabidopsis thaliana]
  misc_feature (34)..(194): Homolog of NCBI NO: 7769862 NR Description: F12M16.28 [Arabidopsis thaliana]
  misc_feature (359)..(840): Homolog of NCBI NO: 30686990 NR Description: ABC transporter family protein [Arabidopsis
  misc_feature (304)..(1076): Homolog of NCBI NO: 38346538 NR Description: OSJNBa0040D17.13 [Oryza sativa (japonica
  misc_feature (196)..(251): Homolog of NCBI NO: 38346538 NR Description: OSJNBa0040D17.13 [Oryza sativa (japonica
  misc_feature (73)..(98): Homolog of NCBI NO: 38346538 NR Description: OSJNBa0040D17.13 [Oryza sativa (japonica
  misc_feature (373)..(1072): Homolog of NCBI NO: 37534776 NR Description: putative ABC transporter [Oryza sativa (japonica group)] >gi|31432334|gb|AAP53977.1| putative ABC transporter
  misc_feature (291)..(393): Homolog of NCBI NO: 37534776 NR Description: putative ABC transporter [Oryza sativa (japonica group)] >gi|31432334|gb|AAP53977.1| putative ABC transporter
  misc_feature (41)..(134): Homolog of NCBI NO: 37534776 NR Description: putative ABC transporter [Oryza sativa (japonica group)] >gi|31432334|gb|AAP53977.1| putative ABC transporter
MRVRVDVCWTQHIFLFFVFGLSFMSFALSLDGDDYSKTGNPKALVSVTNLIYTRLQNLKTVLKADVDRDLGYCIKNLKGDWNEAFNFDKNLDFLSNCVKKNDGDLTLRLCSAAEIKFYFSSFVRRDEATTVHVKPNINCNLAKWVSGCEPGWSCNADDEKRFDLNNGKILPSRTRKCQPCCEGFFCPQGLACMIPCPLGAYCPLAKLNKTTGFCEPYNYQIPPGKLNHTCGSADSWVDAESSGDMFCSPGSYCPTTIRKVTCSSGHYCRQGSTSQKPCFKLATCNPNTANQNIHAYGAILIASLSLLMIMVYNCSDQVLATREKRQAKSREAAARHAKETTQARERWKTAKGVAKNQKMGLSAQLSQTFSRMKSARKDATPVKASGKSKDKKKEPSNLTKMMKSMEENPSNNEGFNVGTGSKPGKKPQAPKGKQLHTQSQIFKYAYGQIEKEKAMEQNNKNLTFSGVISMATDTEMRTRPVIEVAFKDLTLTLKGKHKHILRSVTGKIMPGRVSAVMGPSGAGKTTFLSALAGKATGCTRTGLILINGRNDSINSYKKITGFVPQDDVVHGNLTVEENLRFSARCRLSAYMSKADKVLIIERVIESLGLQHVRDSLVGTIEKRGISGGQRKRVNVGVEMVMEPSLLILDEPTTGLDSASSQLLLRALRREALEGVNICMVVHQPSYTMYKMFDDMIILAKGGLTVYHGSVKKIEEYFADIGITVPDRVNPPDHYIDILEGIVKPDGDITIEQLPVRWMLHNGYPVPHDMLKFCDGLPSSSTGSAQEDSTHNSFSNDLWQDVKTNVEITKDQLQHNYSNSHDNSNRVTPTVGRQYRYFVGRVGKQRLREARLQALDFLILLVAGACLGTLAKVNDETIDTLGYTYTIIAVSLLCKISALRSFSVDKLQYWRESAAGISSLAHFMAKDTMDHLNTIMKPLVYLSMFYFFNNPRSSFEDNYIVLVCLVYCVTGMAYIFAILYSPSAAQLLSVLVPVVMTLIANQDKESMVLKYLGSFCYPKWTLEAFVLSNAQRYSGVWVVTRCSSLSQNGYDLSDWILCLIVLVLMGLICRFIAYFCMGSGVTKKHDTMMNSAFRNVHITASRLINPKPFSSSILHFLPLCSGDASPRRSNPLRHRNSVSPSSSFPFCSTSSFSSFYIPMAGGDGQVSHSLEKQFESFRVQLEESAALREQIRAVVMEIESATRLIQANLLLVHQSRPIPEVIEKAKEKIVDLKQYYGRLAEILEECPGQYYRYHGDWRSETQAVVSQLAFMHWLETGTLLVHTEAEEKLGLNSLEFGLETEDYLTGICFMSNDLPRYVVNRVTAGDYDCPRKVMNFLTDLHAAFRMLNLRNDFLRKKFDSMKYDLRRVEEVYYDVKIRGLISGGDPPGVQAVQGQS

SEQ ID NO: 99179 - protein, 1372 aa, Arabidopsis thaliana
  peptide (1)..(1372): Ceres Seq. ID no. 13602349
  misc_feature (1161)..(1356): Pfam Name: Translin family Pfam Description: Translin family
  misc_feature (11)..(1053): Homolog of NCBI NO: 30695493 NR Description: ABC transporter family protein [Arabidopsis
  misc_feature (258)..(1053): Homolog of NCBI NO: 7769862 NR Description: F12M16.28 [Arabidopsis thaliana]
  misc_feature (11)..(171): Homolog of NCBI NO: 7769862 NR Description: F12M16.28 [Arabidopsis thaliana]
  misc_feature (336)..(817): Homolog of NCBI NO: 30686990 NR Description: ABC transporter family protein [Arabidopsis
  misc_feature (281)..(1053): Homolog of NCBI NO: 38346538 NR Description: OSJNBa0040D17.13 [Oryza sativa (japonica
  misc_feature (173)..(228): Homolog of NCBI NO: 38346538 NR Description: OSJNBa0040D17.13 [Oryza sativa (japonica
  misc_feature (50)..(75): Homolog of NCBI NO: 38346538 NR Description: OSJNBa0040D17.13 [Oryza sativa (japonica
  misc_feature (350)..(1049): Homolog of NCBI NO: 37534776 NR Description: putative ABC transporter [Oryza sativa (japonica group)] >gi|31432334|gb|AAP53977.1| putative ABC transporter
  misc_feature (268)..(370): Homolog of NCBI NO: 37534776 NR Description: putative ABC transporter [Oryza sativa (japonica group)] >gi|31432334|gb|AAP53977.1| putative ABC transporter
  misc_feature (18)..(111): Homolog of NCBI NO: 37534776 NR Description: putative ABC transporter [Oryza sativa (japonica group)] >gi|31432334|gb|AAP53977.1| putative ABC transporter
MSFALSLDGDDYSKTGNPKALVSVTNLIYTRLQNLKTVLKADVDRDLGYCIKNLKGDWNEAFNFDKNLDFLSNCVKKNDGDLTLRLCSAAEIKFYFSSFVRRDEATTVHVKPNINCNLAKWVSGCEPGWSCNADDEKRFDLNNGKILPSRTRKCQPCCEGFFCPQGLACMIPCPLGAYCPLAKLNKTTGFCEPYNYQIPPGKLNHTCGSADSWVDAESSGDMFCSPGSYCPTTIRKVTCSSGHYCRQGSTSQKPCFKLATCNPNTANQNIHAYGAILIASLSLLMIMVYNCSDQVLATREKRQAKSREAAARHAKETTQARERWKTAKGVAKNQKMGLSAQLSQTFSRMKSARKDATPVKASGKSKDKKKEPSNLTKMMKSMEENPSNNEGFNVGTGSKPGKKPQAPKGKQLHTQSQIFKYAYGQIEKEKAMEQNNKNLTFSGVISMATDTEMRTRPVIEVAFKDLTLTLKGKHKHILRSVTGKIMPGRVSAVMGPSGAGKTTFLSALAGKATGCTRTGLILINGRNDSINSYKKITGFVPQDDVVHGNLTVEENLRFSARCRLSAYMSKADKVLIIERVIESLGLQHVRDSLVGTIEKRGISGGQRKRVNVGVEMVMEPSLLILDEPTTGLDSASSQLLLRALRREALEGVNICMVVHQPSYTMYKMFDDMIILAKGGLTVYHGSVKKIEEYFADIGITVPDRVNPPDHYIDILEGIVKPDGDITIEQLPVRWMLHNGYPVPHDMLKFCDGLPSSSTGSAQEDSTHNSFSNDLWQDVKTNVEITKDQLQHNYSNSHDNSNRVTPTVGRQYRYFVGRVGKQRLREARLQALDFLILLVAGACLGTLAKVNDETIDTLGYTYTIIAVSLLCKISALRSFSVDKLQYWRESAAGISSLAHFMAKDTMDHLNTIMKPLVYLSMFYFFNNPRSSFEDNYIVLVCLVYCVTGMAYIFAILYSPSAAQLLSVLVPVVMTLIANQDKESMVLKYLGSFCYPKWTLEAFVLSNAQRYSGVWVVTRCSSLSQNGYDLSDWILCLIVLVLMGLICRFIAYFCMGSGVTKKHDTMMNSAFRNVHITASRLINPKPFSSSILHFLPLCSGDASPRRSNPLRHRNSVSPSSSFPFCSTSSFSSFYIPMAGGDGQVSHSLEKQFESFRVQLEESAALREQIRAVVMEIESATRLIQANLLLVHQSRPIPEVIEKAKEKIVDLKQYYGRLAEILEECPGQYYRYHGDWRSETQAVVSQLAFMHWLETGTLLVHTEAEEKLGLNSLEFGLETEDYLTGICFMSNDLPRYVVNRVTAGDYDCPRKVMNFLTDLHAAFRMLNLRNDFLRKKFDSMKYDLRRVEEVYYDVKIRGLISGGDPPGVQAVQGQS

SEQ ID NO: 99180 - protein, 1203 aa, Arabidopsis thaliana
  peptide (1)..(1203): Ceres Seq. ID no. 13602350
  misc_feature (992)..(1187): Pfam Name: Translin family Pfam Description: Translin family
  misc_feature (1)..(884): Homolog of NCBI NO: 30695493 NR Description: ABC transporter family protein [Arabidopsis
  misc_feature (89)..(884): Homolog of NCBI NO: 7769862 NR Description: F12M16.28 [Arabidopsis thaliana]
  misc_feature (167)..(648): Homolog of NCBI NO: 30686990 NR Description: ABC transporter family protein [Arabidopsis
  misc_feature (112)..(884): Homolog of NCBI NO: 38346538 NR Description: OSJNBa0040D17.13 [Oryza sativa (japonica
  misc_feature (4)..(59): Homolog of NCBI NO: 38346538 NR Description: OSJNBa0040D17.13 [Oryza sativa (japonica
  misc_feature (181)..(880): Homolog of NCBI NO: 37534776 NR Description: putative ABC transporter [Oryza sativa (japonica group)] >gi|31432334|gb|AAP53977.1| putative ABC transporter
  misc_feature (99)..(201): Homolog of NCBI NO: 37534776 NR Description: putative ABC transporter [Oryza sativa (japonica group)] >gi|31432334|gb|AAP53977.1| putative ABC transporter
  misc_feature (284)..(648): Homolog of NCBI NO: 25408523 NR Description: probable ABC transporter [imported] - Arabidopsis >gi|4883617|gb|AAD31586.1| putative ABC transporter [Arabidopsis
  misc_feature (966)..(1203): Homolog of NCBI NO: 18404301 NR Description: translin-related protein [Arabidopsis thaliana]
  misc_feature (966)..(1113): Homolog of NCBI NO: 25408524 NR Description: translin-like protein [imported] - Arabidopsis
MIPCPLGAYCPLAKLNKTTGFCEPYNYQIPPGKLNHTCGSADSWVDAESSGDMFCSPGSYCPTTIRKVTCSSGHYCRQGSTSQKPCFKLATCNPNTANQNIHAYGAILIASLSLLMIMVYNCSDQVLATREKRQAKSREAAARHAKETTQARERWKTAKGVAKNQKMGLSAQLSQTFSRMKSARKDATPVKASGKSKDKKKEPSNLTKMMKSMEENPSNNEGFNVGTGSKPGKKPQAPKGKQLHTQSQIFKYAYGQIEKEKAMEQNNKNLTFSGVISMATDTEMRTRPVIEVAFKDLTLTLKGKHKHILRSVTGKIMPGRVSAVMGPSGAGKTTFLSALAGKATGCTRTGLILINGRNDSINSYKKITGFVPQDDVVHGNLTVEENLRFSARCRLSAYMSKADKVLIIERVIESLGLQHVRDSLVGTIEKRGISGGQRKRVNVGVEMVMEPSLLILDEPTTGLDSASSQLLLRALRREALEGVNICMVVHQPSYTMYKMFDDMIILAKGGLTVYHGSVKKIEEYFADIGITVPDRVNPPDHYIDILEGIVKPDGDITIEQLPVRWMLHNGYPVPHDMLKFCDGLPSSSTGSAQEDSTHNSFSNDLWQDVKTNVEITKDQLQHNYSNSHDNSNRVTPTVGRQYRYFVGRVGKQRLREARLQALDFLILLVAGACLGTLAKVNDETIDTLGYTYTIIAVSLLCKISALRSFSVDKLQYWRESAAGISSLAHFMAKDTMDHLNTIMKPLVYLSMFYFFNNPRSSFEDNYIVLVCLVYCVTGMAYIFAILYSPSAAQLLSVLVPVVMTLIANQDKESMVLKYLGSFCYPKWTLEAFVLSNAQRYSGVWVVTRCSSLSQNGYDLSDWILCLIVLVLMGLICRFIAYFCMGSGVTKKHDTMMNSAFRNVHITASRLINPKPFSSSILHFLPLCSGDASPRRSNPLRHRNSVSPSSSFPFCSTSSFSSFYIPMAGGDGQVSHSLEKQFESFRVQLEESAALREQIRAVVMEIESATRLIQANLLLVHQSRPIPEVIEKAKEKIVDLKQYYGRLAEILEECPGQYYRYHGDWRSETQAVVSQLAFMHWLETGTLLVHTEAEEKLGLNSLEFGLETEDYLTGICFMSNDLPRYVVNRVTAGDYDCPRKVMNFLTDLHAAFRMLNLRNDFLRKKFDSMKYDLRRVEEVYYDVKIRGLISGGDPPGVQAVQGQS

SEQ ID NO: 99181 - DNA, 1768 bp, Arabidopsis thaliana
  misc_feature (1)..(1768): Ceres Seq. ID no. 13602351
  misc_feature: MA Experiment ID: 20000184 Result: Up-regulated in Transcription
  misc_feature: MA Experiment 20000184 PARAMETER Experiment Name: At_Shoots__P Parameter: Age (day) Value: 7
  misc_feature: MA Experiment 20000184 PARAMETER Experiment Name: At_Shoots__P Parameter: Tissue Value: Shoots vs. Whole Plant
  misc_feature: MA Experiment ID: 20000224 Result: Down-regulated in Transcription
  misc_feature: MA Experiment ID: 20001558 Result: Down-regulated in Transcription
  misc_feature: MA Experiment 20001558 PARAMETER Experiment Name: At_Drought_Soil_Dry_P Parameter: Age (day) Value: 27
  misc_feature: MA Experiment 20001558 PARAMETER Experiment Name: At_Drought_Soil_Dry_P Parameter: Organism Value: A. thaliana
  misc_feature: MA Experiment 20001558 PARAMETER Experiment Name: At_Drought_Soil_Dry_P Parameter: Plant Line Value: WS
  misc_feature: MA Experiment 20001558 PARAMETER Experiment Name: At_Drought_Soil_Dry_P Parameter: Post Timepoint (hr) Value: 6
  misc_feature: MA Experiment 20001558 PARAMETER Experiment Name: At_Drought_Soil_Dry_P Parameter: Post-Treatment Value: Re-Water vs. No Drought
  misc_feature: MA Experiment 20001558 PARAMETER Experiment Name: At_Drought_Soil_Dry_P Parameter: Timepoint (day) Value: 13
  misc_feature: MA Experiment 20001558 PARAMETER Experiment Name: At_Drought_Soil_Dry_P Parameter: Treatment Value: Drought vs. No Drought
acaaaatagaattgatctctcttcttcattctctctcttctcgatctacccaaagtagcgggagcgaatagtaaaacaatgaccgatcaccaccaccaccaccataaccaccacgcgcggctgagccgcctccgtacaacaacacagctcctccgtcaaacaacatcttctttctcttcccaccctctcactttcatcttcctcactttcctcctcttctctttccattctctcgtcgatcattgctctctcctcttaacatctttcgtcgacagtgacccttctcttcgctctctcctctctcgactccctcttaactctcgctcccataccccgacgcgcttcaatcatcaccgacgtgctccgtttcttcagctcacgcgccttggtaccctcgacgacgacttcttctccacagacgaacacgatcctcatcgccgatcgcttcaaggctcttcctttcgttcacccatcaacgccaccactgtattcctctccggatttgagagcatttctggcttctctcgtcctatcatcgataacggacttctccttcctcagatcattcgctccggtgtcgttttgcggcagcttgagaaggaagaccatggcggcgatgaagacgagacggaattggatgaatctgagctcgatcgtgaaagtgagaagaaagataaagactttgagagttttgtggatctgaagatgatttttaaaggattggagctaggacgtagtgacgcagcggctctgttcttcttggtgagctttttatcagctgcgtatggatgggtgattctagggtttacaactgtttactcattggtgttggcgattatgtttgttactgtaatcaacgatttgcttggtaggtttccttcgtttcttggggttgtttggagaggttcaagattggggtttaagagagttacaggatttgttttaatgagatgggcagtgagagatgctttgacacagcttcttggtttatggtacttcggagaggttgaagatcagtactcgtttttcaggctctttgtgaggttaaagctgatgcctttcactgttatgccgccatggattagaggttttgagaaggagatatctggtttcttgttcgcttggtttctacttgatacacttgttggtttgatattagctgttgatgcgtttgttgctattgtggattcgagaaggagaggaagggagatagtgaaggaaggtttatatttgatatctcttttgttgcatcaggctgtgcagctgaagtgtcttgaagcgattctttgtgggtctttcttcagatgggttctgattcgaatggtagggaaaagctttgcttctgtgatccaatctgcgttggaagtttacttcatggcggcttggttagtgttctacttagcagctaagtgtaaagatgcacacgcagatggtaggaggtttgggagaagagaaatggagagcttgatcgatgggctgagatgataatgaattgtggatctgtaggatgagctttttgtttccaaaggagcaaaccttggcttcgatgcttaatgccagtggcgacatctctgtgctactagttgtcatgacttaggttcctttggttttagaattacagttgattgataagaattgctagcaattcgatgtatgtacgcacctaggattacttgggagctgtgaaagagggagaatgatacaactactgtgtataatcatttgcaagattttcctttgtatatatcttgctgcagtttttgatatc

SEQ ID NO: 99182 - protein, 468 aa, Arabidopsis thaliana
  peptide (1)..(468): Ceres Seq. ID no. 13602352
  misc_feature (1)..(403): Homolog of NCBI NO: 30687010 NR Description: expressed protein [Arabidopsis thaliana]
  misc_feature (417)..(468): Homolog of NCBI NO: 30687010 NR Description: expressed protein [Arabidopsis thaliana]
  misc_feature (215)..(447): Homolog of NCBI NO: 37535392 NR Description: hypothetical protein [Oryza sativa (japonica group)] >gi|10140744|gb|AAG13576.1| hypothetical protein [Oryza >gi|31432680|gb|AAP54285.1| hypothetical protein [Oryza sativa
MTDHHHHHHNHHARLSRLRTTTQLLRQTTSSFSSHPLTFIFLTFLLFSFHSLVDHCSLLLTSFVDSDPSLRSLLSRLPLNSRSHTPTRFNHHRRAPFLQLTRLGTLDDDFFSTDEHDPHRRSLQGSSFRSPINATTVFLSGFESISGFSRPIIDNGLLLPQIIRSGVVLRQLEKEDHGGDEDETELDESELDRESEKKDKDFESFVDLKMIFKGLELGRSDAAALFFLVSFLSAAYGWVILGFTTVYSLVLAIMFVTVINDLLGRFPSFLGVVWRGSRLGFKRVTGFVLMRWAVRDALTQLLGLWYFGEVEDQYSFFRLFVRLKLMPFTVMPPWIRGFEKEISGFLFAWFLLDTLVGLILAVDAFVAIVDSRRRGREIVKEGLYLISLLLHQAVQLKCLEAILCGSFFRWVLIRMVGKSFASVIQSALEVYFMAAWLVFYLAAKCKDAHADGRRFGRREMESLIDGLR

SEQ ID NO: 99183 - protein, 259 aa, Arabidopsis thaliana
  peptide (1)..(259): Ceres Seq. ID no. 13602353
  misc_feature (1)..(194): Homolog of NCBI NO: 30687010 NR Description: expressed protein [Arabidopsis thaliana]
  misc_feature (208)..(259): Homolog of NCBI NO: 30687010 NR Description: expressed protein [Arabidopsis thaliana]
  misc_feature (6)..(238): Homolog of NCBI NO: 37535392 NR Description: hypothetical protein [Oryza sativa (japonica group)] >gi|10140744|gb|AAG13576.1| hypothetical protein [Oryza >gi|31432680|gb|AAP54285.1| hypothetical protein [Oryza sativa
MIFKGLELGRSDAAALFFLVSFLSAAYGWVILGFTTVYSLVLAIMFVTVINDLLGRFPSFLGVVWRGSRLGFKRVTGFVLMRWAVRDALTQLLGLWYFGEVEDQYSFFRLFVRLKLMPFTVMPPWIRGFEKEISGFLFAWFLLDTLVGLILAVDAFVAIVDSRRRGREIVKEGLYLISLLLHQAVQLKCLEAILCGSFFRWVLIRMVGKSFASVIQSALEVYFMAAWLVFYLAAKCKDAHADGRRFGRREMESLIDGLR

SEQ ID NO: 99184 - DNA, 1236 bp, Arabidopsis thaliana
  misc_feature (1)..(1236): Ceres Seq. ID no. 13602358
  misc_feature: MA Experiment ID: 20000184 Result: Up-regulated in Transcription
  misc_feature: MA Experiment 20000184 PARAMETER Experiment Name: At_Shoots__P Parameter: Age (day) Value: 7
  misc_feature: MA Experiment 20000184 PARAMETER Experiment Name: At_Shoots__P Parameter: Tissue Value: Shoots vs. Whole Plant
  misc_feature: MA Experiment ID: 20000437 Result: Down-regulated in Transcription
  misc_feature: MA Experiment 20000437 PARAMETER Experiment Name: At_Drought_P Parameter: Age (day) Value: 8
  misc_feature: MA Experiment 20000437 PARAMETER Experiment Name: At_Drought_P Parameter: Organism Value: A. thaliana
  misc_feature: MA Experiment 20000437 PARAMETER Experiment Name: At_Drought_P Parameter: Plant Line Value: WS
  misc_feature: MA Experiment 20000437 PARAMETER Experiment Name: At_Drought_P Parameter: Timepoint (hr) Value: 24
  misc_feature: MA Experiment 20000437 PARAMETER Experiment Name: At_Drought_P Parameter: Tissue Value: Whole Plant
  misc_feature: MA Experiment 20000437 PARAMETER Experiment Name: At_Drought_P Parameter: Treatment Value: Drought vs. No Drought
  misc_feature: MA Experiment ID: 20000438 Result: Up-regulated in Transcription
  misc_feature: MA Experiment 20000438 PARAMETER Experiment Name: At_Shoots__P Parameter: Age (day) Value: 14
  misc_feature: MA Experiment 20000438 PARAMETER Experiment Name: At_Shoots__P Parameter: Tissue Value: Shoots vs. Whole Plant
  misc_feature: MA Experiment ID: 20000496 Result: Down-regulated in Transcription
  misc_feature: MA Experiment 20000496 PARAMETER Experiment Name: At_Guard_Cells_P Parameter: Harvest Date Value: 7/19/2002
  misc_feature: MA Experiment 20000496 PARAMETER Experiment Name: At_Guard_Cells_P Parameter: Organism Value: Canola
  misc_feature: MA Experiment 20000496 PARAMETER Experiment Name: At_Guard_Cells_P Parameter: Tissue Value: Guard Cells vs. Leaves
  misc_feature: MA Experiment ID: 20001247 Result: Up-regulated in Transcription
  misc_feature: MA Experiment 20001247 PARAMETER Experiment Name: At_Far-red-induction_P Parameter: Age (day) Value: 7
  misc_feature: MA Experiment 20001247 PARAMETER Experiment Name: At_Far-red-induction_P Parameter: Light Value: Far-red vs. White
  misc_feature: MA Experiment 20001247 PARAMETER Experiment Name: At_Far-red-induction_P Parameter: Organism Value: A. thaliana
  misc_feature: MA Experiment 20001247 PARAMETER Experiment Name: At_Far-red-induction_P Parameter: Plant Line Value: Columbia
  misc_feature: MA Experiment 20001247 PARAMETER Experiment Name: At_Far-red-induction_P Parameter: Timepoint (hr) Value: 1
  misc_feature: MA Experiment 20001247 PARAMETER Experiment Name: At_Far-red-induction_P Parameter: Tissue Value: Whole Plant
  misc_feature: MA Experiment ID: 20001248 Result: Down-regulated in Transcription
  misc_feature: MA Experiment 20001248 PARAMETER Experiment Name: At_Far-red-induction_P Parameter: Age (day) Value: 7
  misc_feature: MA Experiment 20001248 PARAMETER Experiment Name: At_Far-red-induction_P Parameter: Light Value: Far-red vs. White
  misc_feature: MA Experiment 20001248 PARAMETER Experiment Name: At_Far-red-induction_P Parameter: Organism Value: A. thaliana
  misc_feature: MA Experiment 20001248 PARAMETER Experiment Name: At_Far-red-induction_P Parameter: Plant Line Value: Columbia
  misc_feature: MA Experiment 20001248 PARAMETER Experiment Name: At_Far-red-induction_P Parameter: Timepoint (hr) Value: 4
  misc_feature: MA Experiment 20001248 PARAMETER Experiment Name: At_Far-red-induction_P Parameter: Tissue Value: Whole Plant
  misc_feature: MA Experiment ID: 20001504 Result: Down-regulated in Transcription
  misc_feature: MA Experiment 20001504 PARAMETER Experiment Name: At_Far-red-enriched_P Parameter: Age (day) Value: 10
  misc_feature: MA Experiment 20001504 PARAMETER Experiment Name: At_Far-red-enriched_P Parameter: Light Value: Far-red enriched vs. White
  misc_feature: MA Experiment 20001504 PARAMETER Experiment Name: At_Far-red-enriched_P Parameter: Organism Value: A. thaliana
  misc_feature: MA Experiment 20001504 PARAMETER Experiment Name: At_Far-red-enriched_P Parameter: Plant Line Value: Columbia
  misc_feature: MA Experiment 20001504 PARAMETER Experiment Name: At_Far-red-enriched_P Parameter: Timepoint (day) Value: 6
  misc_feature: MA Experiment 20001504 PARAMETER Experiment Name: At_Far-red-enriched_P Parameter: Tissue Value: Whole Plant
  misc_feature: MA Experiment ID: 20001558 Result: Up-regulated in Transcription
  misc_feature: MA Experiment 20001558 PARAMETER Experiment Name: At_Drought_Soil_Dry_P Parameter: Age (day) Value: 27
  misc_feature: MA Experiment 20001558 PARAMETER Experiment Name: At_Drought_Soil_Dry_P Parameter: Organism Value: A. thaliana
  misc_feature: MA Experiment 20001558 PARAMETER Experiment Name: At_Drought_Soil_Dry_P Parameter: Plant Line Value: WS
  misc_feature: MA Experiment 20001558 PARAMETER Experiment Name: At_Drought_Soil_Dry_P Parameter: Post Timepoint (hr) Value: 6
  misc_feature: MA Experiment 20001558 PARAMETER Experiment Name: At_Drought_Soil_Dry_P Parameter: Post-Treatment Value: Re-Water vs. No Drought
  misc_feature: MA Experiment 20001558 PARAMETER Experiment Name: At_Drought_Soil_Dry_P Parameter: Timepoint (day) Value: 13
  misc_feature: MA Experiment 20001558 PARAMETER Experiment Name: At_Drought_Soil_Dry_P Parameter: Treatment Value: Drought vs. No Drought
gcgacagagattttctccgaccaatccatgtcggaaaacatggtgaatctaccggattctttgtacgaggactacagtaaactcaagttgacttcaccctccaacgcttcttcatcctcctcagctcctccgcccaggctcagcgtcgtagctcatccaacggtagagatgattatccagtgggtctgtgatattcataaaccgaagtcatacatgtctgattttgcgctgcataatctcgcctatcataggaacgactttgagttcttgccgagtctgttatgggaatctaaaaatactgtgtacatcatgttgcaggaggtttttgaagcctacagacacctcgcaggacacatctcacttcgattgttccctcatccgttgaatccacttcgagtgtacaatgtttttcttttgttccagagcatggcttgtcacccagacacaagccgtcagtttcttagggctaagatgccaaattatttctatcctctgatggacactggtctcattgataaaagtgacgaatgcatgaggcttgctgcgttgggtgtcattgctcatatgttgaaggcgtctgaagatggagctgttaatcgttacctaatggaaagtggtgttgttggtttctgcgttaaacccattgagtttggctctacagaaacaaaaaaagttgctttatacatactcgacaagattatgtcgacggatcaggggctttattactgctgcgtcttggctgatcggttttacgttatcgatgagctccttaagaaggtgctcttctatctttctaacatggtcagacctccttcatccttgttcagccttgttactggttgctacgtcaagctctcccagaactccagggctcgtaacggaataaggcgatacacgcctttcttgctgtttgacggcaccttttccagattatatgctgaggatccagtggctgctaacaatcgaattcagctgcttcagaatctggacaactaaagcaatgaagtactcgagacactgttttcaatgaggcaatgaaaacagaacagcccccacngagtacgggtttagtacgcctacgcgtaaacgctaagtaataatttactaaagacataaaaactctangaaaagtcttatgttgttgttnggtttaatatctttgggatgactctcgttactctttcaacattgttttctctcttttggaatacatttcaatgcactttgccattttcc

SEQ ID NO: 99185 - protein, 331 aa, Arabidopsis thaliana
  peptide (1)..(331): Ceres Seq. ID no. 13602359
  misc_feature (60)..(279): Pfam Name: Cell differentiation family, Rcd1-like Pfam Description: Cell differentiation family, Rcd1-like
  misc_feature (10)..(331): Homolog of NCBI NO: 30685342 NR Description: expressed protein [Arabidopsis thaliana]
  misc_feature (10)..(279): Homolog of NCBI NO: 21805678 NR Description: hypothetical protein [Arabidopsis thaliana]
  misc_feature (107)..(270): Homolog of NCBI NO: 7487430 NR Description: hypothetical protein At2g32550 [imported] - thaliana >gi|3298543|gb|AAC25937.1| hypothetical protein
  misc_feature (14)..(82): Homolog of NCBI NO: 7487430 NR Description: hypothetical protein At2g32550 [imported] - thaliana >gi|3298543|gb|AAC25937.1| hypothetical protein
  misc_feature (314)..(331): Homolog of NCBI NO: 7487430 NR Description: hypothetical protein At2g32550 [imported] - thaliana >gi|3298543|gb|AAC25937.1| hypothetical protein
  misc_feature (14)..(329): Homolog of NCBI NO: 34897134 NR Description: putative cell differentiation protein [Oryza >gi|14718319|gb|AAK72897.1| putative cell differentiation protein
  misc_feature (14)..(329): Homolog of NCBI NO: 21537250 NR Description: putative cell differentiation protein
  misc_feature (37)..(329): Homolog of NCBI NO: 4885579 NR Description: RCD1 required for cell differentiation1 homolog; involved in sexual development; rcd1 (required for cell S.pombe) homolog 1 [Homo sapiens] >gi|1620898|dbj|BAA13508.1|
  misc_feature (37)..(329): Homolog of NCBI NO: 10946722 NR Description: rcd1 (required for cell differentiation) homolog FL10; rcd1 (required for cell differentiation) homolog 1 [Mus musculus] >gi|7385111|gb|AAF61701.1|AF221849_1 FL10 [Mus
  misc_feature (37)..(329): Homolog of NCBI NO: 38174128 NR Description: Unknown (protein for MGC:76003) [Silurana
ATEIFSDQSMSENMVNLPDSLYEDYSKLKLTSPSNASSSSSAPPPRLSVVAHPTVEMIIQWVCDIHKPKSYMSDFALHNLAYHRNDFEFLPSLLWESKNTVYIMLQEVFEAYRHLAGHISLRLFPHPLNPLRVYNVFLLFQSMACHPDTSRQFLRAKMPNYFYPLMDTGLIDKSDECMRLAALGVIAHMLKASEDGAVNRYLMESGVVGFCVKPIEFGSTETKKVALYILDKIMSTDQGLYYCCVLADRFYVIDELLKKVLFYLSNMVRPPSSLFSLVTGCYVKLSQNSRARNGIRRYTPFLLFDGTFSRLYAEDPVAANNRIQLLQNLDN

SEQ ID NO: 99186 - protein, 322 aa, Arabidopsis thaliana
  peptide (1)..(322): Ceres Seq. ID no. 13602360
  misc_feature (51)..(270): Pfam Name: Cell differentiation family, Rcd1-like Pfam Description: Cell differentiation family, Rcd1-like
  misc_feature (1)..(322): Homolog of NCBI NO: 30685342 NR Description: expressed protein [Arabidopsis thaliana]
  misc_feature (1)..(270): Homolog of NCBI NO: 21805678 NR Description: hypothetical protein [Arabidopsis thaliana]
  misc_feature (98)..(261): Homolog of NCBI NO: 7487430 NR Description: hypothetical protein At2g32550 [imported] - thaliana >gi|3298543|gb|AAC25937.1| hypothetical protein
  misc_feature (5)..(73): Homolog of NCBI NO: 7487430 NR Description: hypothetical protein At2g32550 [imported] - thaliana >gi|3298543|gb|AAC25937.1| hypothetical protein
  misc_feature (305)..(322): Homolog of NCBI NO: 7487430 NR Description: hypothetical protein At2g32550 [imported] - thaliana >gi|3298543|gb|AAC25937.1| hypothetical protein
  misc_feature (5)..(320): Homolog of NCBI NO: 34897134 NR Description: putative cell differentiation protein [Oryza >gi|14718319|gb|AAK72897.1| putative cell differentiation protein
  misc_feature (5)..(320): Homolog of NCBI NO: 21537250 NR Description: putative cell differentiation protein
  misc_feature (28)..(320): Homolog of NCBI NO: 4885579 NR Description: RCD1 required for cell differentiation1 homolog; involved in sexual development; rcd1 (required for cell S.pombe) homolog 1 [Homo sapiens] >gi|1620898|dbj|BAA13508.1|
  misc_feature (28)..(320): Homolog of NCBI NO: 10946722 NR Description: rcd1 (required for cell differentiation) homolog FL10; rcd1 (required for cell differentiation) homolog 1 [Mus musculus] >gi|7385111|gb|AAF61701.1|AF221849_1 FL10 [Mus
  misc_feature (28)..(320): Homolog of NCBI NO: 38174128 NR Description: Unknown (protein for MGC:76003) [Silurana
MSENMVNLPDSLYEDYSKLKLTSPSNASSSSSAPPPRLSVVAHPTVEMIIQWVCDIHKPKSYMSDFALHNLAYHRNDFEFLPSLLWESKNTVYIMLQEVFEAYRHLAGHISLRLFPHPLNPLRVYNVFLLFQSMACHPDTSRQFLRAKMPNYFYPLMDTGLIDKSDECMRLAALGVIAHMLKASEDGAVNRYLMESGVVGFCVKPIEFGSTETKKVALYILDKIMSTDQGLYYCCVLADRFYVIDELLKKVLFYLSNMVRPPSSLFSLVTGCYVKLSQNSRARNGIRRYTPFLLFDGTFSRLYAEDPVAANNRIQLLQNLDN

SEQ ID NO: 99187 - protein, 318 aa, Arabidopsis thaliana
  peptide (1)..(318): Ceres Seq. ID no. 13602361
  misc_feature (47)..(266): Pfam Name: Cell differentiation family, Rcd1-like Pfam Description: Cell differentiation family, Rcd1-like
  misc_feature (1)..(318): Homolog of NCBI NO: 30685342 NR Description: expressed protein [Arabidopsis thaliana]
  misc_feature (1)..(266): Homolog of NCBI NO: 21805678 NR Description: hypothetical protein [Arabidopsis thaliana]
  misc_feature (94)..(257): Homolog of NCBI NO: 7487430 NR Description: hypothetical protein At2g32550 [imported] - thaliana >gi|3298543|gb|AAC25937.1| hypothetical protein
  misc_feature (1)..(69): Homolog of NCBI NO: 7487430 NR Description: hypothetical protein At2g32550 [imported] - thaliana >gi|3298543|gb|AAC25937.1| hypothetical protein
  misc_feature (301)..(318): Homolog of NCBI NO: 7487430 NR Description: hypothetical protein At2g32550 [imported] - thaliana >gi|3298543|gb|AAC25937.1| hypothetical protein
  misc_feature (1)..(316): Homolog of NCBI NO: 34897134 NR Description: putative cell differentiation protein [Oryza >gi|14718319|gb|AAK72897.1| putative cell differentiation protein
  misc_feature (1)..(316): Homolog of NCBI NO: 21537250 NR Description: putative cell differentiation protein
  misc_feature (24)..(316): Homolog of NCBI NO: 4885579 NR Description: RCD1 required for cell differentiation1 homolog; involved in sexual development; rcd1 (required for cell S.pombe) homolog 1 [Homo sapiens] >gi|1620898|dbj|BAA13508.1|
  misc_feature (24)..(316): Homolog of NCBI NO: 10946722 NR Description: rcd1 (required for cell differentiation) homolog FL10; rcd1 (required for cell differentiation) homolog 1 [Mus musculus] >gi|7385111|gb|AAF61701.1|AF221849_1 FL10 [Mus
  misc_feature (24)..(316): Homolog of NCBI NO: 38174128 NR Description: Unknown (protein for MGC:76003) [Silurana
MVNLPDSLYEDYSKLKLTSPSNASSSSSAPPPRLSVVAHPTVEMIIQWVCDIHKPKSYMSDFALHNLAYHRNDFEFLPSLLWESKNTVYIMLQEVFEAYRHLAGHISLRLFPHPLNPLRVYNVFLLFQSMACHPDTSRQFLRAKMPNYFYPLMDTGLIDKSDECMRLAALGVIAHMLKASEDGAVNRYLMESGVVGFCVKPIEFGSTETKKVALYILDKIMSTDQGLYYCCVLADRFYVIDELLKKVLFYLSNMVRPPSSLFSLVTGCYVKLSQNSRARNGIRRYTPFLLFDGTFSRLYAEDPVAANNRIQLLQNLDN

SEQ ID NO: 99188 - DNA, 708 bp, Arabidopsis thaliana
  misc_feature (1)..(708): Ceres Seq. ID no. 13602365
  misc_feature: MA Experiment ID: 108434 Result: Up-regulated in Transcription
  misc_feature: MA Experiment 108434 PARAMETER Experiment Name: At_Root_Tips_cDNA_P Parameter: Tissue Value: Root Tips
  misc_feature: MA Experiment ID: 108462 Result: Down-regulated in Transcription
  misc_feature: MA Experiment 108462 PARAMETER Experiment Name: At_Germinating_Seeds_cDNA_P Parameter: Age (day) Value: 2 vs. 0
  misc_feature: MA Experiment 108462 PARAMETER Experiment Name: At_Germinating_Seeds_cDNA_P Parameter: Tissue Value: Germinating Seeds
  misc_feature: MA Experiment ID: 108463 Result: Down-regulated in Transcription
  misc_feature: MA Experiment 108463 PARAMETER Experiment Name: At_Germinating_Seeds_cDNA_P Parameter: Age (day) Value: 3 vs. 0
  misc_feature: MA Experiment 108463 PARAMETER Experiment Name: At_Germinating_Seeds_cDNA_P Parameter: Tissue Value: Germinating Seeds
  misc_feature: MA Experiment ID: 108488 Result: Up-regulated in Transcription
  misc_feature: MA Experiment ID: 108561 Result: Down-regulated in Transcription
  misc_feature: MA Experiment 108561 PARAMETER Experiment Name: At_100uM_ABA_cDNA_P Parameter: Timepoint (hr) Value: 6
  misc_feature: MA Experiment 108561 PARAMETER Experiment Name: At_100uM_ABA_cDNA_P Parameter: Tissue Value: Aerial
  misc_feature: MA Experiment 108561 PARAMETER Experiment Name: At_100uM_ABA_cDNA_P Parameter: Treatment Value: 100uM ABA vs. No Treatment
  misc_feature: MA Experiment ID: 108573 Result: Down-regulated in Transcription
  misc_feature: MA Experiment 108573 PARAMETER Experiment Name: At_Drought_cDNA_P Parameter: Timepoint (hr) Value: 6
  misc_feature: MA Experiment 108573 PARAMETER Experiment Name: At_Drought_cDNA_P Parameter: Tissue Value: Aerial
  misc_feature: MA Experiment 108573 PARAMETER Experiment Name: At_Drought_cDNA_P Parameter: Treatment Value: Drought vs. No Drought
  misc_feature: MA Experiment ID: 108585 Result: Down-regulated in Transcription
  misc_feature: MA Experiment 108585 PARAMETER Experiment Name: At_5mM_NaNP_cDNA_P Parameter: Timepoint (hr) Value: 6
  misc_feature: MA Experiment 108585 PARAMETER Experiment Name: At_5mM_NaNP_cDNA_P Parameter: Tissue Value: Aerial
  misc_feature: MA Experiment 108585 PARAMETER Experiment Name: At_5mM_NaNP_cDNA_P Parameter: Treatment Value: null
  misc_feature: MA Experiment ID: 108595 Result: Down-regulated in Transcription
  misc_feature: MA Experiment 108595 PARAMETER Experiment Name: At_Ler-pi_Ovule_cDNA_P Parameter: Plant Line Value: null
  misc_feature: MA Experiment ID: 108607 Result: Down-regulated in Transcription
  misc_feature: MA Experiment 108607 PARAMETER Experiment Name: At_100uM_ABA_cDNA_P Parameter: Timepoint (hr) Value: 4
  misc_feature: MA Experiment 108607 PARAMETER Experiment Name: At_100uM_ABA_cDNA_P Parameter: Tissue Value: Aerial
  misc_feature: MA Experiment 108607 PARAMETER Experiment Name: At_100uM_ABA_cDNA_P Parameter: Treatment Value: 100uM ABA vs. No Treatment
  misc_feature: MA Experiment ID: 108668 Result: Down-regulated in Transcription
  misc_feature: MA Experiment 108668 PARAMETER Experiment Name: At_2mM_SA_cDNA_P Parameter: Plant Line Value: WS
  misc_feature: MA Experiment 108668 PARAMETER Experiment Name: At_2mM_SA_cDNA_P Parameter: Timepoint (hr) Value: 6
  misc_feature: MA Experiment 108668 PARAMETER Experiment Name: At_2mM_SA_cDNA_P Parameter: Treatment Value: 2mM SA vs. No Treatment
  misc_feature: MA Experiment ID: 20000089 Result: Up-regulated in Transcription
  misc_feature: MA Experiment ID: 20000224 Result: Down-regulated in Transcription
gttctaaaattaaaacaaatctaaatgttagtatcgtttctgtaatatttattatatcctcttcttcttttttactgattcatcaaatcggggatcggataagcctgactgcttcagggtttaagggttactctcactcacacttccgctggtttcacaagattggatagaagcagccatggcaagtctgataatgactacaccattcccaggttctgtcactgcatgtaagaagacaaataacctgtctgttcagagagcctttaaggtgacttgtatgcagacagagaaaccattagaggagctatacaatgttaaagtggaacggaaagtttcacagaaacggttggaggaactcggggtttcgagatggtcagtttggaagacagggaaatgcaaattgccatgggattggcaggtggatcagttggtttacattgaacaaggagaggttcgagtagttcccgaaggaagcaagaggtatatgcagtttttagctggagatcttgttcggtatccgaaatggttggaagctgatcttttctttaacgctccttatattgagcggtattgtttcaaggcctatggtgatgattgatccaacttagacttttgagtttttagtagagccaagaaactttacacttgttgtgtgttgttgtagcctgatggatctttttgtgataatataagaaaacaagttctctc

SEQ ID NO: 99189 - protein, 139 aa, Arabidopsis thaliana
  peptide (1)..(139): Ceres Seq. ID no. 13602366
  misc_feature (54)..(130): Pfam Name: Protein of unknown function (DUF861) Pfam Description: Protein of unknown function (DUF861)
  misc_feature (1)..(139): Homolog of NCBI NO: 18403036 NR Description: expressed protein [Arabidopsis thaliana]
  misc_feature (1)..(139): Homolog of NCBI NO: 15225202 NR Description: expressed protein [Arabidopsis thaliana]
  misc_feature (1)..(139): Homolog of NCBI NO: 21592432 NR Description: unknown [Arabidopsis thaliana]
  misc_feature (6)..(57): Homolog of NCBI NO: 26451964 NR Description: unknown protein [Arabidopsis thaliana]
  misc_feature (23)..(115): Homolog of NCBI NO: 38344542 NR Description: OSJNBa0027P08.10 [Oryza sativa (japonica
  misc_feature (24)..(134): Homolog of NCBI NO: 21553516 NR Description: unknown [Arabidopsis thaliana]
  misc_feature (42)..(134): Homolog of NCBI NO: 15235021 NR Description: expressed protein [Arabidopsis thaliana]
  misc_feature (46)..(114): Homolog of NCBI NO: 23127631 NR Description: hypothetical protein [Nostoc punctiforme]
  misc_feature (45)..(127): Homolog of NCBI NO: 15229267 NR Description: hypothetical protein [Arabidopsis thaliana]
  misc_feature (20)..(115): Homolog of NCBI NO: 15234988 NR Description: expressed protein [Arabidopsis thaliana]
MASLIMTTPFPGSVTACKKTNNLSVQRAFKVTCMQTEKPLEELYNVKVERKVSQKRLEELGVSRWSVWKTGKCKLPWDWQVDQLVYIEQGEVRVVPEGSKRYMQFLAGDLVRYPKWLEADLFFNAPYIERYCFKAYGDD

SEQ ID NO: 99190 - protein, 134 aa, Arabidopsis thaliana
  peptide (1)..(134): Ceres Seq. ID no. 13602367
  misc_feature (49)..(125): Pfam Name: Protein of unknown function (DUF861) Pfam Description: Protein of unknown function (DUF861)
  misc_feature (1)..(134): Homolog of NCBI NO: 18403036 NR Description: expressed protein [Arabidopsis thaliana]
  misc_feature (1)..(134): Homolog of NCBI NO: 15225202 NR Description: expressed protein [Arabidopsis thaliana]
  misc_feature (1)..(134): Homolog of NCBI NO: 21592432 NR Description: unknown [Arabidopsis thaliana]
  misc_feature (1)..(52): Homolog of NCBI NO: 26451964 NR Description: unknown protein [Arabidopsis thaliana]
  misc_feature (18)..(110): Homolog of NCBI NO: 38344542 NR Description: OSJNBa0027P08.10 [Oryza sativa (japonica
  misc_feature (19)..(129): Homolog of NCBI NO: 21553516 NR Description: unknown [Arabidopsis thaliana]
  misc_feature (37)..(129): Homolog of NCBI NO: 15235021 NR Description: expressed protein [Arabidopsis thaliana]
  misc_feature (41)..(109): Homolog of NCBI NO: 23127631 NR Description: hypothetical protein [Nostoc punctiforme]
  misc_feature (40)..(122): Homolog of NCBI NO: 15229267 NR Description: hypothetical protein [Arabidopsis thaliana]
  misc_feature (15)..(110): Homolog of NCBI NO: 15234988 NR Description: expressed protein [Arabidopsis thaliana]
MTTPFPGSVTACKKTNNLSVQRAFKVTCMQTEKPLEELYNVKVERKVSQKRLEELGVSRWSVWKTGKCKLPWDWQVDQLVYIEQGEVRVVPEGSKRYMQFLAGDLVRYPKWLEADLFFNAPYIERYCFKAYGDD

SEQ ID NO: 99191 - protein, 106 aa, Arabidopsis thaliana; identical to SEQ ID NO: 20994
  peptide (1)..(106): Ceres Seq. ID no. 13602368
  misc_feature (21)..(97): Pfam Name: Protein of unknown function (DUF861) Pfam Description: Protein of unknown function (DUF861)
  misc_feature (1)..(106): Homolog of NCBI NO: 18403036 NR Description: expressed protein [Arabidopsis thaliana]
  misc_feature (1)..(106): Homolog of NCBI NO: 15225202 NR Description: expressed protein [Arabidopsis thaliana]
  misc_feature (1)..(106): Homolog of NCBI NO: 21592432 NR Description: unknown [Arabidopsis thaliana]
  misc_feature (1)..(24): Homolog of NCBI NO: 26451964 NR Description: unknown protein [Arabidopsis thaliana]
  misc_feature (1)..(82): Homolog of NCBI NO: 38344542 NR Description: OSJNBa0027P08.10 [Oryza sativa (japonica
  misc_feature (1)..(101): Homolog of NCBI NO: 21553516 NR Description: unknown [Arabidopsis thaliana]
  misc_feature (9)..(101): Homolog of NCBI NO: 15235021 NR Description: expressed protein [Arabidopsis thaliana]
  misc_feature (13)..(81): Homolog of NCBI NO: 23127631 NR Description: hypothetical protein [Nostoc punctiforme]
  misc_feature (12)..(94): Homolog of NCBI NO: 15229267 NR Description: hypothetical protein [Arabidopsis thaliana]
  misc_feature (1)..(82): Homolog of NCBI NO: 15234988 NR Description: expressed protein [Arabidopsis thaliana]

SEQ ID NO: 99192 - DNA, 798 bp, Arabidopsis thaliana
  misc_feature (1)..(798): Ceres Seq. ID no. 13602383
  misc_feature: MA Experiment ID: 108434 Result: Down-regulated in Transcription
  misc_feature: MA Experiment 108434 PARAMETER Experiment Name: At_Root_Tips_cDNA_P Parameter: Tissue Value: Root Tips
  misc_feature: MA Experiment ID: 108435 Result: Down-regulated in Transcription
  misc_feature: MA Experiment 108435 PARAMETER Experiment Name: At_stm_Mutants_cDNA_P Parameter: Plant Line Value: wt Landsburg vs stm
  misc_feature: MA Experiment 108435 PARAMETER Experiment Name: At_stm_Mutants_cDNA_P Parameter: Tissue Value: Shoot Apical Meristem Region
  misc_feature: MA Experiment ID: 108501 Result: Down-regulated in Transcription
  misc_feature: MA Experiment 108501 PARAMETER Experiment Name: At_ap2_floral_buds_cDNA_P Parameter: Plant Line Value: ap2 (Ler.)
  misc_feature: MA Experiment 108501 PARAMETER Experiment Name: At_ap2_floral_buds_cDNA_P Parameter: Tissue Value: Closed Flower
  misc_feature: MA Experiment ID: 108573 Result: Up-regulated in Transcription
  misc_feature: MA Experiment 108573 PARAMETER Experiment Name: At_Drought_cDNA_P Parameter: Timepoint (hr) Value: 6
  misc_feature: MA Experiment 108573 PARAMETER Experiment Name: At_Drought_cDNA_P Parameter: Tissue Value: Aerial
  misc_feature: MA Experiment 108573 PARAMETER Experiment Name: At_Drought_cDNA_P Parameter: Treatment Value: Drought vs. No Drought
  misc_feature: MA Experiment ID: 108579 Result: Up-regulated in Transcription
  misc_feature: MA Experiment 108579 PARAMETER Experiment Name: At_4deg_Cold_cDNA_P Parameter: Temperature (deg C) Value: 4 vs. 22
  misc_feature: MA Experiment 108579 PARAMETER Experiment Name: At_4deg_Cold_cDNA_P Parameter: Timepoint (hr) Value: 6
  misc_feature: MA Experiment 108579 PARAMETER Experiment Name: At_4deg_Cold_cDNA_P Parameter: Tissue Value: Aerial
  misc_feature: MA Experiment ID: 108668 Result: Up-regulated in Transcription
  misc_feature: MA Experiment 108668 PARAMETER Experiment Name: At_2mM_SA_cDNA_P Parameter: Plant Line Value: WS
  misc_feature: MA Experiment 108668 PARAMETER Experiment Name: At_2mM_SA_cDNA_P Parameter: Timepoint (hr) Value: 6
  misc_feature: MA Experiment 108668 PARAMETER Experiment Name: At_2mM_SA_cDNA_P Parameter: Treatment Value: 2mM SA vs. No Treatment
  misc_feature: MA Experiment ID: 20000068 Result: Down-regulated in Transcription
  misc_feature: MA Experiment ID: 20000069 Result: Up-regulated in Transcription
  misc_feature: MA Experiment 20000069 PARAMETER Experiment Name: At_100uM_ABA_Mutants_cDNA_P Parameter: Plant Line Value: CS23
  misc_feature: MA Experiment 20000069 PARAMETER Experiment Name: At_100uM_ABA_Mutants_cDNA_P Parameter: Timepoint (hr) Value: 6
  misc_feature: MA Experiment 20000069 PARAMETER Experiment Name: At_100uM_ABA_Mutants_cDNA_P Parameter: Tissue Value: Aerial
  misc_feature: MA Experiment 20000069 PARAMETER Experiment Name: At_100uM_ABA_Mutants_cDNA_P Parameter: Treatment Value: 100uM ABA vs. No Treatment
  misc_feature: MA Experiment ID: 20000070 Result: Up-regulated in Transcription
  misc_feature: MA Experiment 20000070 PARAMETER Experiment Name: At_100uM_ABA_Mutants_cDNA_P Parameter: Plant Line Value: CS24
  misc_feature: MA Experiment 20000070 PARAMETER Experiment Name: At_100uM_ABA_Mutants_cDNA_P Parameter: Timepoint (hr) Value: 6
  misc_feature: MA Experiment 20000070 PARAMETER Experiment Name: At_100uM_ABA_Mutants_cDNA_P Parameter: Tissue Value: Aerial
  misc_feature: MA Experiment 20000070 PARAMETER Experiment Name: At_100uM_ABA_Mutants_cDNA_P Parameter: Treatment Value: 100uM ABA vs. No Treatment
  misc_feature: MA Experiment ID: 20000071 Result: Up-regulated in Transcription
  misc_feature: MA Experiment 20000071 PARAMETER Experiment Name: At_100uM_ABA_Mutants_cDNA_P Parameter: Plant Line Value: CS8104
  misc_feature: MA Experiment 20000071 PARAMETER Experiment Name: At_100uM_ABA_Mutants_cDNA_P Parameter: Timepoint (hr) Value: 6
  misc_feature: MA Experiment 20000071 PARAMETER Experiment Name: At_100uM_ABA_Mutants_cDNA_P Parameter: Tissue Value: Aerial
  misc_feature: MA Experiment 20000071 PARAMETER Experiment Name: At_100uM_ABA_Mutants_cDNA_P Parameter: Treatment Value: 100uM ABA vs. No Treatment
  misc_feature: MA Experiment ID: 20000072 Result: Up-regulated in Transcription
  misc_feature: MA Experiment 20000072 PARAMETER Experiment Name: At_100uM_ABA_Mutants_cDNA_P Parameter: Plant Line Value: CS8105
  misc_feature: MA Experiment 20000072 PARAMETER Experiment Name: At_100uM_ABA_Mutants_cDNA_P Parameter: Timepoint (hr) Value: 6
  misc_feature: MA Experiment 20000072 PARAMETER Experiment Name: At_100uM_ABA_Mutants_cDNA_P Parameter: Tissue Value: Aerial
  misc_feature: MA Experiment 20000072 PARAMETER Experiment Name: At_100uM_ABA_Mutants_cDNA_P Parameter: Treatment Value: 100uM ABA vs. No Treatment
  misc_feature: MA Experiment ID: 20000087 Result: Up-regulated in Transcription
  misc_feature: MA Experiment 20000087 PARAMETER Experiment Name: At_100uM_ABA_Mutants_cDNA_P Parameter: Plant Line Value: WS
  misc_feature: MA Experiment 20000087 PARAMETER Experiment Name: At_100uM_ABA_Mutants_cDNA_P Parameter: Timepoint (hr) Value: 6
  misc_feature: MA Experiment 20000087 PARAMETER Experiment Name: At_100uM_ABA_Mutants_cDNA_P Parameter: Tissue Value: Aerial
  misc_feature: MA Experiment 20000087 PARAMETER Experiment Name: At_100uM_ABA_Mutants_cDNA_P Parameter: Treatment Value: 100uM ABA vs. No Treatment
  misc_feature: MA Experiment ID: 20000088 Result: Up-regulated in Transcription
  misc_feature: MA Experiment 20000088 PARAMETER Experiment Name: At_100uM_ABA_Mutants_cDNA_P Parameter: Plant Line Value: Landsberg
  misc_feature: MA Experiment 20000088 PARAMETER Experiment Name: At_100uM_ABA_Mutants_cDNA_P Parameter: Timepoint (hr) Value: 6
  misc_feature: MA Experiment 20000088 PARAMETER Experiment Name: At_100uM_ABA_Mutants_cDNA_P Parameter: Tissue Value: Aerial
  misc_feature: MA Experiment 20000088 PARAMETER Experiment Name: At_100uM_ABA_Mutants_cDNA_P Parameter: Treatment Value: 100uM ABA vs. No Treatment
  misc_feature: MA Experiment ID: 20000089 Result: Up-regulated in Transcription
  misc_feature: MA Experiment ID: 20000093 Result: Down-regulated in Transcription
  misc_feature: MA Experiment 20000093 PARAMETER Experiment Name: At_42deg_Heat_cDNA_P Parameter: Temperature (deg C) Value: 42 vs. 22
  misc_feature: MA Experiment 20000093 PARAMETER Experiment Name: At_42deg_Heat_cDNA_P Parameter: Timepoint (hr) Value: 0.5
  misc_feature: MA Experiment 20000093 PARAMETER Experiment Name: At_42deg_Heat_cDNA_P Parameter: Tissue Value: Aerial
  misc_feature: MA Experiment ID: 20000111 Result: Down-regulated in Transcription
  misc_feature: MA Experiment 20000111 PARAMETER Experiment Name: At_42deg_Heat_cDNA_P Parameter: Temperature (deg C) Value: 42 vs. 22
  misc_feature: MA Experiment 20000111 PARAMETER Experiment Name: At_42deg_Heat_cDNA_P Parameter: Timepoint (hr) Value: 6
  misc_feature: MA Experiment 20000111 PARAMETER Experiment Name: At_42deg_Heat_cDNA_P Parameter: Tissue Value: Aerial
  misc_feature: MA Experiment ID: 20000113 Result: Down-regulated in Transcription
  misc_feature: MA Experiment 20000113 PARAMETER Experiment Name: At_42deg_Heat_cDNA_P Parameter: Temperature (deg C) Value: 42 vs. 22
  misc_feature: MA Experiment 20000113 PARAMETER Experiment Name: At_42deg_Heat_cDNA_P Parameter: Timepoint (hr) Value: 8
  misc_feature: MA Experiment 20000113 PARAMETER Experiment Name: At_42deg_Heat_cDNA_P Parameter: Tissue Value: Aerial
  misc_feature: MA Experiment ID: 20000117 Result: Up-regulated in Transcription
  misc_feature: MA Experiment 20000117 PARAMETER Experiment Name: At_100uM_ABA_Mutants_cDNA_P Parameter: Plant Line Value: Columbia
  misc_feature: MA Experiment 20000117 PARAMETER Experiment Name: At_100uM_ABA_Mutants_cDNA_P Parameter: Timepoint (hr) Value: 6
  misc_feature: MA Experiment 20000117 PARAMETER Experiment Name: At_100uM_ABA_Mutants_cDNA_P Parameter: Tissue Value: Aerial
  misc_feature: MA Experiment 20000117 PARAMETER Experiment Name: At_100uM_ABA_Mutants_cDNA_P Parameter: Treatment Value: 100uM ABA vs. No Treatment
  misc_feature: MA Experiment ID: 20000173 Result: Down-regulated in Transcription
  misc_feature: MA Experiment 20000173 PARAMETER Experiment Name: At_42deg_Heat_P Parameter: Age (day) Value: 14
  misc_feature: MA Experiment 20000173 PARAMETER Experiment Name: At_42deg_Heat_P Parameter: Organism Value: A. thaliana
  misc_feature: MA Experiment 20000173 PARAMETER Experiment Name: At_42deg_Heat_P Parameter: Plant Line Value: WS
  misc_feature: MA Experiment 20000173 PARAMETER Experiment Name: At_42deg_Heat_P Parameter: Temperature (deg C) Value: 42 vs. 22
  misc_feature: MA Experiment 20000173 PARAMETER Experiment Name: At_42deg_Heat_P Parameter: Timepoint (hr) Value: 6
  misc_feature: MA Experiment 20000173 PARAMETER Experiment Name: At_42deg_Heat_P Parameter: Tissue Value: Aerial
  misc_feature: MA Experiment ID: 20000182 Result: Up-regulated in Transcription
  misc_feature: MA Experiment 20000182 PARAMETER Experiment Name: At_2mM_SA_P Parameter: Age (day) Value: 14
  misc_feature: MA Experiment 20000182 PARAMETER Experiment Name: At_2mM_SA_P Parameter: Organism Value: A. thaliana
  misc_feature: MA Experiment 20000182 PARAMETER Experiment Name: At_2mM_SA_P Parameter: Plant Line Value: WS
  misc_feature: MA Experiment 20000182 PARAMETER Experiment Name: At_2mM_SA_P Parameter: Timepoint (hr) Value: 6
  misc_feature: MA Experiment 20000182 PARAMETER Experiment Name: At_2mM_SA_P Parameter: Tissue Value: Aerial
  misc_feature: MA Experiment 20000182 PARAMETER Experiment Name: At_2mM_SA_P Parameter: Treatment Value: 2mM SA vs. No Treatment
  misc_feature: MA Experiment ID: 20000184 Result: Down-regulated in Transcription
  misc_feature: MA Experiment 20000184 PARAMETER Experiment Name: At_Shoots__P Parameter: Age (day) Value: 7
  misc_feature: MA Experiment 20000184 PARAMETER Experiment Name: At_Shoots__P Parameter: Tissue Value: Shoots vs. Whole Plant
  misc_feature: MA Experiment ID: 20000185 Result: Down-regulated in Transcription
  misc_feature: MA Experiment 20000185 PARAMETER Experiment Name: At_Roots__P Parameter: Age (day) Value: 7 vs. 21
  misc_feature: MA Experiment 20000185 PARAMETER Experiment Name: At_Roots__P Parameter: Organism Value: A. thaliana
  misc_feature: MA Experiment 20000185 PARAMETER Experiment Name: At_Roots__P Parameter: Tissue Value: Roots vs. Whole Plant
  misc_feature: MA Experiment ID: 20000227 Result: Down-regulated in Transcription
  misc_feature: MA Experiment 20000227 PARAMETER Experiment Name: At_Root-Tips-vs-Tops_P Parameter: Tissue Value: Root Tips vs. Root Tops
  misc_feature: MA Experiment ID: 20000234 Result: Down-regulated in Transcription
  misc_feature: MA Experiment 20000234 PARAMETER Experiment Name: At_Siliques_P Parameter: Age (day) Value: 21
  misc_feature: MA Experiment 20000234 PARAMETER Experiment Name: At_Siliques_P Parameter: Organism Value: A. thaliana
  misc_feature: MA Experiment 20000234 PARAMETER Experiment Name: At_Siliques_P Parameter: Plant Line Value: WS
  misc_feature: MA Experiment 20000234 PARAMETER Experiment Name: At_Siliques_P Parameter: Tissue Value: Less Than 5mm Siliques vs. Whole Plant
  misc_feature: MA Experiment ID: 20000265 Result: Down-regulated in Transcription
  misc_feature: MA Experiment 20000265 PARAMETER Experiment Name: At_Open_Flower_P Parameter: Age (day) Value: 21
  misc_feature: MA Experiment 20000265 PARAMETER Experiment Name: At_Open_Flower_P Parameter: Plant Line Value: WS
  misc_feature: MA Experiment 20000265 PARAMETER Experiment Name: At_Open_Flower_P Parameter: Tissue Value: Closed Flower vs. Whole Plant
  misc_feature: MA Experiment ID: 20000437 Result: Up-regulated in Transcription
  misc_feature: MA Experiment 20000437 PARAMETER Experiment Name: At_Drought_P Parameter: Age (day) Value: 8
  misc_feature: MA Experiment 20000437 PARAMETER Experiment Name: At_Drought_P Parameter: Organism Value: A. thaliana
  misc_feature: MA Experiment 20000437 PARAMETER Experiment Name: At_Drought_P Parameter: Plant Line Value: WS
  misc_feature: MA Experiment 20000437 PARAMETER Experiment Name: At_Drought_P Parameter: Timepoint (hr) Value: 24
  misc_feature: MA Experiment 20000437 PARAMETER Experiment Name: At_Drought_P Parameter: Tissue Value: Whole Plant
  misc_feature: MA Experiment 20000437 PARAMETER Experiment Name: At_Drought_P Parameter: Treatment Value: Drought vs. No Drought
  misc_feature: MA Experiment ID: 20000438 Result: Down-regulated in Transcription
  misc_feature: MA Experiment 20000438 PARAMETER Experiment Name: At_Shoots__P Parameter: Age (day) Value: 14
  misc_feature: MA Experiment 20000438 PARAMETER Experiment Name: At_Shoots__P Parameter: Tissue Value: Shoots vs. Whole Plant
  misc_feature: MA Experiment ID: 20000451 Result: Down-regulated in Transcription
  misc_feature: MA Experiment 20000451 PARAMETER Experiment Name: At_CS6879_Shoots-Roots_P Parameter: Age (day) Value: 14
  misc_feature: MA Experiment 20000451 PARAMETER Experiment Name: At_CS6879_Shoots-Roots_P Parameter: Organism Value: A. thaliana
  misc_feature: MA Experiment 20000451 PARAMETER Experiment Name: At_CS6879_Shoots-Roots_P Parameter: Plant Line Value: CS6879 vs. WS
  misc_feature: MA Experiment 20000451 PARAMETER Experiment Name: At_CS6879_Shoots-Roots_P Parameter: Tissue Value: Roots
  misc_feature: MA Experiment ID: 20000573 Result: Up-regulated in Transcription
  misc_feature: MA Experiment 20000573 PARAMETER Experiment Name: At_100uM_ABA_Mutants__P Parameter: Organism Value: A. thaliana
  misc_feature: MA Experiment 20000573 PARAMETER Experiment Name: At_100uM_ABA_Mutants__P Parameter: Plant Line Value: CS22 vs. Ler wt
  misc_feature: MA Experiment 20000573 PARAMETER Experiment Name: At_100uM_ABA_Mutants__P Parameter: Timepoint (hr) Value: N/A
  misc_feature: MA Experiment 20000573 PARAMETER Experiment Name: At_100uM_ABA_Mutants__P Parameter: Tissue Value: Whole Plant
  misc_feature: MA Experiment 20000573 PARAMETER Experiment Name: At_100uM_ABA_Mutants__P Parameter: Treatment Value: None
  misc_feature: MA Experiment ID: 20000574 Result: Up-regulated in Transcription
  misc_feature: MA Experiment 20000574 PARAMETER Experiment Name: At_100uM_ABA_Mutants__P Parameter: Organism Value: A. thaliana
  misc_feature: MA Experiment 20000574 PARAMETER Experiment Name: At_100uM_ABA_Mutants__P Parameter: Plant Line Value: CS23 vs. Ler wt
  misc_feature: MA Experiment 20000574 PARAMETER Experiment Name: At_100uM_ABA_Mutants__P Parameter: Timepoint (hr) Value: N/A
  misc_feature: MA Experiment 20000574 PARAMETER Experiment Name: At_100uM_ABA_Mutants__P Parameter: Tissue Value: Whole Plant
  misc_feature: MA Experiment 20000574 PARAMETER Experiment Name: At_100uM_ABA_Mutants__P Parameter: Treatment Value: None
  misc_feature: MA Experiment ID: 20001904 Result: Up-regulated in Transcription
  misc_feature: MA Experiment 20001904 PARAMETER Experiment Name: At_Drought_Reproduction_P Parameter: Age (day) Value: 37
  misc_feature: MA Experiment 20001904 PARAMETER Experiment Name: At_Drought_Reproduction_P Parameter: Organism Value: A. thaliana
  misc_feature: MA Experiment 20001904 PARAMETER Experiment Name: At_Drought_Reproduction_P Parameter: Plant Line Value: WS
  misc_feature: MA Experiment 20001904 PARAMETER Experiment Name: At_Drought_Reproduction_P Parameter: Timepoint (day) Value: 7
  misc_feature: MA Experiment 20001904 PARAMETER Experiment Name: At_Drought_Reproduction_P Parameter: Tissue Value: Rosettes
  misc_feature: MA Experiment 20001904 PARAMETER Experiment Name: At_Drought_Reproduction_P Parameter: Treatment Value: Drought vs. No Drought
  misc_feature: MA Experiment ID: 20001905 Result: Up-regulated in Transcription
  misc_feature: MA Experiment 20001905 PARAMETER Experiment Name: At_Drought_Reproduction_P Parameter: Age (day) Value: 40
  misc_feature: MA Experiment 20001905 PARAMETER Experiment Name: At_Drought_Reproduction_P Parameter: Organism Value: A. thaliana
  misc_feature: MA Experiment 20001905 PARAMETER Experiment Name: At_Drought_Reproduction_P Parameter: Plant Line Value: WS
  misc_feature: MA Experiment 20001905 PARAMETER Experiment Name: At_Drought_Reproduction_P Parameter: Timepoint (day) Value: 10
  misc_feature: MA Experiment 20001905 PARAMETER Experiment Name: At_Drought_Reproduction_P Parameter: Tissue Value: Rosettes
  misc_feature: MA Experiment 20001905 PARAMETER Experiment Name: At_Drought_Reproduction_P Parameter: Treatment Value: Drought vs. No Drought
  misc_feature: MA Experiment ID: 20001911 Result: Up-regulated in Transcription
  misc_feature: MA Experiment 20001911 PARAMETER Experiment Name: At_Drought_Reproduction_P Parameter: Age (day) Value: 40
  misc_feature: MA Experiment 20001911 PARAMETER Experiment Name: At_Drought_Reproduction_P Parameter: Organism Value: A. thaliana
  misc_feature: MA Experiment 20001911 PARAMETER Experiment Name: At_Drought_Reproduction_P Parameter: Plant Line Value: WS
  misc_feature: MA Experiment 20001911 PARAMETER Experiment Name: At_Drought_Reproduction_P Parameter: Timepoint (day) Value: 10
  misc_feature: MA Experiment 20001911 PARAMETER Experiment Name: At_Drought_Reproduction_P Parameter: Tissue Value: Flowers
  misc_feature: MA Experiment 20001911 PARAMETER Experiment Name: At_Drought_Reproduction_P Parameter: Treatment Value: Drought vs. No Drought
acagaaaaaagctctccacgcctaaaaaaaaagaaaaaagagacagaagaagaaaaagataaagaagaatcaaactttgtaaccctttagcagcaatggcgatggctttcaagatggcgacgacggggatgcgtgtgacggatgagtgtacgagttcattcatggacatgaaatggaagaaagttcatagatacatcgttttcaagatcgaagagaagtcacgtaaagtcaccgtcgataaagtcggcggcgccggtgaaagctaccacgatctcgaagattctttaccggtggatgattgtcgctacgctgtctttgatttcgactttgtcaccgtcgataactgccgcaagagcaagatcttcttcattgcatggtcaccggaggcatcaaagataagggcaaagatattgtacgcaacgtcgaaagatgggctgaggagagtgttggaagggattcactatgaacttcaagctactgatccgacggagatgggtttcgatattatccaagaccgtgccaaatagattgatcacttaagagaatatgatttgactcactttgtcaataattaacattaattaggtcatcggttaatgtttaattattgctggttagtgcttactcttttttgagtttattatccttgatcagtcttaccggcactatcctttaattatgacgtttgtgttttgattgtgttgttaaaatatttttttgtcggttaagcaaacataaaaagctacgaatttgtcctacgagtaacggatattatacatttatgagagattttatttt

SEQ ID NO: 99193 - protein, 143 aa, Arabidopsis thaliana; identical to SEQ ID NO: 36262
  peptide (1)..(143): Ceres Seq. ID no. 13602384
  misc_feature (16)..(143): Pfam Name: Cofilin/tropomyosin-type actin-binding protein Pfam Description: Cofilin/tropomyosin-type actin-binding protein
  misc_feature (1)..(143): Homolog of NCBI NO: 18398187 NR Description: actin depolymerizing factor 5 [Arabidopsis
  misc_feature (12)..(143): Homolog of NCBI NO: 25295742 NR Description: actin depolymerizing factor 5 [imported] -
  misc_feature (14)..(143): Homolog of NCBI NO: 15236233 NR Description: actin depolymerizing factor - like protein
  misc_feature (7)..(143): Homolog of NCBI NO: 7330254 NR Description: actin depolymerizing factor [Elaeis guineensis]
  misc_feature (8)..(142): Homolog of NCBI NO: 4566614 NR Description: actin depolymerizing factor [Populus x canescens]
  misc_feature (3)..(142): Homolog of NCBI NO: 32363121 NR Description: Actin-depolymerizing factor (ADF)
  misc_feature (8)..(142): Homolog of NCBI NO: 24745620 NR Description: actin depolymerizing factor 6 [Solanum tuberosum]
  misc_feature (8)..(142): Homolog of NCBI NO: 18402587 NR Description: actin depolymerizing factor 6 [Arabidopsis
  misc_feature (8)..(142): Homolog of NCBI NO: 17366768 NR Description: Actin-depolymerizing factor 1 (ADF 1)
  misc_feature (8)..(142): Homolog of NCBI NO: 21554405 NR Description: Actin-depolymerizing factor ADF-6 [Arabidopsis

SEQ ID NO: 99194 - protein, 141 aa, Arabidopsis thaliana; identical to SEQ ID NO: 36263
  peptide (1)..(141): Ceres Seq. ID no. 13602385
  misc_feature (14)..(141): Pfam Name: Cofilin/tropomyosin-type actin-binding protein Pfam Description: Cofilin/tropomyosin-type actin-binding protein
  misc_feature (1)..(141): Homolog of NCBI NO: 18398187 NR Description: actin depolymerizing factor 5 [Arabidopsis
  misc_feature (10)..(141): Homolog of NCBI NO: 25295742 NR Description: actin depolymerizing factor 5 [imported] -
  misc_feature (12)..(141): Homolog of NCBI NO: 15236233 NR Description: actin depolymerizing factor - like protein
  misc_feature (5)..(141): Homolog of NCBI NO: 7330254 NR Description: actin depolymerizing factor [Elaeis guineensis]
  misc_feature (6)..(140): Homolog of NCBI NO: 4566614 NR Description: actin depolymerizing factor [Populus x canescens]
  misc_feature (1)..(140): Homolog of NCBI NO: 32363121 NR Description: Actin-depolymerizing factor (ADF)
  misc_feature (6)..(140): Homolog of NCBI NO: 24745620 NR Description: actin depolymerizing factor 6 [Solanum tuberosum]
  misc_feature (6)..(140): Homolog of NCBI NO: 18402587 NR Description: actin depolymerizing factor 6 [Arabidopsis
  misc_feature (6)..(140): Homolog of NCBI NO: 17366768 NR Description: Actin-depolymerizing factor 1 (ADF 1)
  misc_feature (6)..(140): Homolog of NCBI NO: 21554405 NR Description: Actin-depolymerizing factor ADF-6 [Arabidopsis

SEQ ID NO: 99195 - protein, 137 aa, Arabidopsis thaliana; identical to SEQ ID NO: 36264
  peptide (1)..(137): Ceres Seq. ID no. 13602386
  misc_feature (10)..(137): Pfam Name: Cofilin/tropomyosin-type actin-binding protein Pfam Description: Cofilin/tropomyosin-type actin-binding protein
  misc_feature (1)..(137): Homolog of NCBI NO: 18398187 NR Description: actin depolymerizing factor 5 [Arabidopsis
  misc_feature (6)..(137): Homolog of NCBI NO: 25295742 NR Description: actin depolymerizing factor 5 [imported] -
  misc_feature (8)..(137): Homolog of NCBI NO: 15236233 NR Description: actin depolymerizing factor - like protein
  misc_feature (1)..(137): Homolog of NCBI NO: 7330254 NR Description: actin depolymerizing factor [Elaeis guineensis]
  misc_feature (2)..(136): Homolog of NCBI NO: 4566614 NR Description: actin depolymerizing factor [Populus x canescens]
  misc_feature (1)..(136): Homolog of NCBI NO: 32363121 NR Description: Actin-depolymerizing factor (ADF)
  misc_feature (2)..(136): Homolog of NCBI NO: 24745620 NR Description: actin depolymerizing factor 6 [Solanum tuberosum]
  misc_feature (2)..(136): Homolog of NCBI NO: 18402587 NR Description: actin depolymerizing factor 6 [Arabidopsis
  misc_feature (2)..(136): Homolog of NCBI NO: 17366768 NR Description: Actin-depolymerizing factor 1 (ADF 1)
  misc_feature (2)..(136): Homolog of NCBI NO: 21554405 NR Description: Actin-depolymerizing factor ADF-6 [Arabidopsis

SEQ ID NO: 99196 - DNA, 780 bp, Arabidopsis thaliana
  misc_feature (1)..(780): Ceres Seq. ID no. 13602387
  misc_feature: MA Experiment ID: 108434 Result: Down-regulated in Transcription
  misc_feature: MA Experiment 108434 PARAMETER Experiment Name: At_Root_Tips_cDNA_P Parameter: Tissue Value: Root Tips
  misc_feature: MA Experiment ID: 108561 Result: Up-regulated in Transcription
  misc_feature: MA Experiment 108561 PARAMETER Experiment Name: At_100uM_ABA_cDNA_P Parameter: Timepoint (hr) Value: 6
  misc_feature: MA Experiment 108561 PARAMETER Experiment Name: At_100uM_ABA_cDNA_P Parameter: Tissue Value: Aerial
  misc_feature: MA Experiment 108561 PARAMETER Experiment Name: At_100uM_ABA_cDNA_P Parameter: Treatment Value: 100uM ABA vs. No Treatment
  misc_feature: MA Experiment ID: 108595 Result: Down-regulated in Transcription
  misc_feature: MA Experiment 108595 PARAMETER Experiment Name: At_Ler-pi_Ovule_cDNA_P Parameter: Plant Line Value: null
  misc_feature: MA Experiment ID: 108668 Result: Up-regulated in Transcription
  misc_feature: MA Experiment 108668 PARAMETER Experiment Name: At_2mM_SA_cDNA_P Parameter: Plant Line Value: WS
  misc_feature: MA Experiment 108668 PARAMETER Experiment Name: At_2mM_SA_cDNA_P Parameter: Timepoint (hr) Value: 6
  misc_feature: MA Experiment 108668 PARAMETER Experiment Name: At_2mM_SA_cDNA_P Parameter: Treatment Value: 2mM SA vs. No Treatment
  misc_feature: MA Experiment ID: 20000069 Result: Up-regulated in Transcription
  misc_feature: MA Experiment 20000069 PARAMETER Experiment Name: At_100uM_ABA_Mutants_cDNA_P Parameter: Plant Line Value: CS23
  misc_feature: MA Experiment 20000069 PARAMETER Experiment Name: At_100uM_ABA_Mutants_cDNA_P Parameter: Timepoint (hr) Value: 6
  misc_feature: MA Experiment 20000069 PARAMETER Experiment Name: At_100uM_ABA_Mutants_cDNA_P Parameter: Tissue Value: Aerial
  misc_feature: MA Experiment 20000069 PARAMETER Experiment Name: At_100uM_ABA_Mutants_cDNA_P Parameter: Treatment Value: 100uM ABA vs. No Treatment
  misc_feature: MA Experiment ID: 20000071 Result: Up-regulated in Transcription
  misc_feature: MA Experiment 20000071 PARAMETER Experiment Name: At_100uM_ABA_Mutants_cDNA_P Parameter: Plant Line Value: CS8104
  misc_feature: MA Experiment 20000071 PARAMETER Experiment Name: At_100uM_ABA_Mutants_cDNA_P Parameter: Timepoint (hr) Value: 6
  misc_feature: MA Experiment 20000071 PARAMETER Experiment Name: At_100uM_ABA_Mutants_cDNA_P Parameter: Tissue Value: Aerial
  misc_feature: MA Experiment 20000071 PARAMETER Experiment Name: At_100uM_ABA_Mutants_cDNA_P Parameter: Treatment Value: 100uM ABA vs. No Treatment
  misc_feature: MA Experiment ID: 20000087 Result: Up-regulated in Transcription
  misc_feature: MA Experiment 20000087 PARAMETER Experiment Name: At_100uM_ABA_Mutants_cDNA_P Parameter: Plant Line Value: WS
  misc_feature: MA Experiment 20000087 PARAMETER Experiment Name: At_100uM_ABA_Mutants_cDNA_P Parameter: Timepoint (hr) Value: 6
  misc_feature: MA Experiment 20000087 PARAMETER Experiment Name: At_100uM_ABA_Mutants_cDNA_P Parameter: Tissue Value: Aerial
  misc_feature: MA Experiment 20000087 PARAMETER Experiment Name: At_100uM_ABA_Mutants_cDNA_P Parameter: Treatment Value: 100uM ABA vs. No Treatment
  misc_feature: MA Experiment ID: 20000089 Result: Up-regulated in Transcription
  misc_feature: MA Experiment ID: 20000090 Result: Up-regulated in Transcription
  misc_feature: MA Experiment ID: 20000117 Result: Up-regulated in Transcription
  misc_feature: MA Experiment 20000117 PARAMETER Experiment Name: At_100uM_ABA_Mutants_cDNA_P Parameter: Plant Line Value: Columbia
  misc_feature: MA Experiment 20000117 PARAMETER Experiment Name: At_100uM_ABA_Mutants_cDNA_P Parameter: Timepoint (hr) Value: 6
  misc_feature: MA Experiment 20000117 PARAMETER Experiment Name: At_100uM_ABA_Mutants_cDNA_P Parameter: Tissue Value: Aerial
  misc_feature: MA Experiment 20000117 PARAMETER Experiment Name: At_100uM_ABA_Mutants_cDNA_P Parameter: Treatment Value: 100uM ABA vs. No Treatment
  misc_feature: MA Experiment ID: 20000180 Result: Down-regulated in Transcription
  misc_feature: MA Experiment 20000180 PARAMETER Experiment Name: At_Germinating_Seeds_P Parameter: Age (hr) Value: 24 vs. 0
  misc_feature: MA Experiment 20000180 PARAMETER Experiment Name: At_Germinating_Seeds_P Parameter: Tissue Value: Germinating Seeds
  misc_feature: MA Experiment ID: 20000182 Result: Up-regulated in Transcription
  misc_feature: MA Experiment 20000182 PARAMETER Experiment Name: At_2mM_SA_P Parameter: Age (day) Value: 14
  misc_feature: MA Experiment 20000182 PARAMETER Experiment Name: At_2mM_SA_P Parameter: Organism Value: A. thaliana
  misc_feature: MA Experiment 20000182 PARAMETER Experiment Name: At_2mM_SA_P Parameter: Plant Line Value: WS
  misc_feature: MA Experiment 20000182 PARAMETER Experiment Name: At_2mM_SA_P Parameter: Timepoint (hr) Value: 6
  misc_feature: MA Experiment 20000182 PARAMETER Experiment Name: At_2mM_SA_P Parameter: Tissue Value: Aerial
  misc_feature: MA Experiment 20000182 PARAMETER Experiment Name: At_2mM_SA_P Parameter: Treatment Value: 2mM SA vs. No Treatment
  misc_feature: MA Experiment ID: 20000184 Result: Down-regulated in Transcription
  misc_feature: MA Experiment 20000184 PARAMETER Experiment Name: At_Shoots__P Parameter: Age (day) Value: 7
  misc_feature: MA Experiment 20000184 PARAMETER Experiment Name: At_Shoots__P Parameter: Tissue Value: Shoots vs. Whole Plant
  misc_feature: MA Experiment ID: 20000437 Result: Up-regulated in Transcription
  misc_feature: MA Experiment 20000437 PARAMETER Experiment Name: At_Drought_P Parameter: Age (day) Value: 8
  misc_feature: MA Experiment 20000437 PARAMETER Experiment Name: At_Drought_P Parameter: Organism Value: A. thaliana
  misc_feature: MA Experiment 20000437 PARAMETER Experiment Name: At_Drought_P Parameter: Plant Line Value: WS
  misc_feature: MA Experiment 20000437 PARAMETER Experiment Name: At_Drought_P Parameter: Timepoint (hr) Value: 24
  misc_feature: MA Experiment 20000437 PARAMETER Experiment Name: At_Drought_P Parameter: Tissue Value: Whole Plant
  misc_feature: MA Experiment 20000437 PARAMETER Experiment Name: At_Drought_P Parameter: Treatment Value: Drought vs. No Drought
  misc_feature: MA Experiment ID: 20000438 Result: Down-regulated in Transcription
  misc_feature: MA Experiment 20000438 PARAMETER Experiment Name: At_Shoots__P Parameter: Age (day) Value: 14
  misc_feature: MA Experiment 20000438 PARAMETER Experiment Name: At_Shoots__P Parameter: Tissue Value: Shoots vs. Whole Plant
  misc_feature: MA Experiment ID: 20001247 Result: Down-regulated in Transcription
  misc_feature: MA Experiment 20001247 PARAMETER Experiment Name: At_Far-red-induction_P Parameter: Age (day) Value: 7
  misc_feature: MA Experiment 20001247 PARAMETER Experiment Name: At_Far-red-induction_P Parameter: Light Value: Far-red vs. White
  misc_feature: MA Experiment 20001247 PARAMETER Experiment Name: At_Far-red-induction_P Parameter: Organism Value: A. thaliana
  misc_feature: MA Experiment 20001247 PARAMETER Experiment Name: At_Far-red-induction_P Parameter: Plant Line Value: Columbia
  misc_feature: MA Experiment 20001247 PARAMETER Experiment Name: At_Far-red-induction_P Parameter: Timepoint (hr) Value: 1
  misc_feature: MA Experiment 20001247 PARAMETER Experiment Name: At_Far-red-induction_P Parameter: Tissue Value: Whole Plant
  misc_feature: MA Experiment ID: 20001451 Result: Down-regulated in Transcription
  misc_feature: MA Experiment 20001451 PARAMETER Experiment Name: At_Far-red-induction_P Parameter: Age (day) Value: 7
  misc_feature: MA Experiment 20001451 PARAMETER Experiment Name: At_Far-red-induction_P Parameter: Light Value: Far-red vs. White
  misc_feature: MA Experiment 20001451 PARAMETER Experiment Name: At_Far-red-induction_P Parameter: Organism Value: A. thaliana
  misc_feature: MA Experiment 20001451 PARAMETER Experiment Name: At_Far-red-induction_P Parameter: Plant Line Value: Columbia
  misc_feature: MA Experiment 20001451 PARAMETER Experiment Name: At_Far-red-induction_P Parameter: Timepoint (hr) Value: 24
  misc_feature: MA Experiment 20001451 PARAMETER Experiment Name: At_Far-red-induction_P Parameter: Tissue Value: Whole Plant
  misc_feature: MA Experiment ID: 20001904 Result: Up-regulated in Transcription
  misc_feature: MA Experiment 20001904 PARAMETER Experiment Name: At_Drought_Reproduction_P Parameter: Age (day) Value: 37
  misc_feature: MA Experiment 20001904 PARAMETER Experiment Name: At_Drought_Reproduction_P Parameter: Organism Value: A. thaliana
  misc_feature: MA Experiment 20001904 PARAMETER Experiment Name: At_Drought_Reproduction_P Parameter: Plant Line Value: WS
  misc_feature: MA Experiment 20001904 PARAMETER Experiment Name: At_Drought_Reproduction_P Parameter: Timepoint (day) Value: 7
  misc_feature: MA Experiment 20001904 PARAMETER Experiment Name: At_Drought_Reproduction_P Parameter: Tissue Value: Rosettes
  misc_feature: MA Experiment 20001904 PARAMETER Experiment Name: At_Drought_Reproduction_P Parameter: Treatment Value: Drought vs. No Drought
aacttcggtttagaaaaaaaaaaggagacgtcgtcgtcttctagcttctgattaagtctgataaattatgcccctaaatctgtaattctccaaggattcggattcgatcgatgaaagcttctcaaattttggcggctgcagcggcgagggttggaccggcgttaaggaagcaagtattaaccttaacggacgaagctgcttctagggttcatcatctcttgcaacagcgtcaaaaaccttttctccgattaggcgttaaggctcgtggctgcaacggcttgtcgtacactctcaattacgccgatgagaaaggtaaatttgacgagttggtagaagagaaaggtgtgaggatccttgttgaaccaaaggccttaatgcatgtgattggaacaaagatggattttgtagatgataaactcagatcagagtttgtgtttatcaatcctaactcacaaggacaatgcgggtgtggtgaatcgtttatgacaacatctacctctagtgctaagcagagtgctagttaacacacagtgatgcgtttacatttgtgattacactcatatattatactgttactggaattggcgttaatgagaaacaaatactttttaataagaattgagttttatgtttgtgcgctactttcaggcattagattggtcactttattgcatatacacattagaagctcatgttgttgcttagagatatttctgaagctatgtatttagtggaacggataatcttgagattaattaatgtattccttatccccaaagt

SEQ ID NO: 99197 - protein, 137 aa, Arabidopsis thaliana
  peptide (1)..(137): Ceres Seq. ID no. 13602388
  misc_feature (22)..(125): Pfam Name: HesB-like domain Pfam Description: HesB-like domain
  misc_feature (1)..(137): Homolog of NCBI NO: 15227287 NR Description: HesB protein -related [Arabidopsis thaliana]
  misc_feature (1)..(137): Homolog of NCBI NO: 21592728 NR Description: putative HesB-like protein [Arabidopsis thaliana]
  misc_feature (18)..(127): Homolog of NCBI NO: 15227614 NR Description: expressed protein [Arabidopsis thaliana]
  misc_feature (18)..(127): Homolog of NCBI NO: 21805702 NR Description: hypothetical protein [Arabidopsis thaliana]
  misc_feature (1)..(126): Homolog of NCBI NO: 16798390 NR Description: iron-sulfur cluster assembly protein IscA
  misc_feature (23)..(124): Homolog of NCBI NO: 23013039 NR Description: hypothetical protein [Magnetospirillum
  misc_feature (20)..(124): Homolog of NCBI NO: 15892651 NR Description: hesB protein [Rickettsia conorii]
  misc_feature (20)..(124): Homolog of NCBI NO: 25146411 NR Description: Protein Neurospora crassa like [Caenorhabditis
  misc_feature (20)..(124): Homolog of NCBI NO: 15604345 NR Description: HESB PROTEIN (hesB2) [Rickettsia prowazekii]
  misc_feature (19)..(125): Homolog of NCBI NO: 6323001 NR Description: Iron Sulfur Assembly -- IscA/NifA homolog; Isa1p
MKASQILAAAAARVGPALRKQVLTLTDEAASRVHHLLQQRQKPFLRLGVKARGCNGLSYTLNYADEKGKFDELVEEKGVRILVEPKALMHVIGTKMDFVDDKLRSEFVFINPNSQGQCGCGESFMTTSTSSAKQSAS

SEQ ID NO: 99198 - DNA, 807 bp, Arabidopsis thaliana
  misc_feature (1)..(807): Ceres Seq. ID no. 13602389
  misc_feature: MA Experiment ID: 108433 Result: Up-regulated in Transcription
  misc_feature: MA Experiment 108433 PARAMETER Experiment Name: At_rhl_Mutant2_cDNA_P Parameter: Age (day) Value: 7
  misc_feature: MA Experiment 108433 PARAMETER Experiment Name: At_rhl_Mutant2_cDNA_P Parameter: Organism Value: A. thaliana
  misc_feature: MA Experiment 108433 PARAMETER Experiment Name: At_rhl_Mutant2_cDNA_P Parameter: Plant Line Value: rhl Mutant vs. wt landsburg
  misc_feature: MA Experiment 108433 PARAMETER Experiment Name: At_rhl_Mutant2_cDNA_P Parameter: Tissue Value: Roots
  misc_feature: MA Experiment ID: 108434 Result: Down-regulated in Transcription
  misc_feature: MA Experiment 108434 PARAMETER Experiment Name: At_Root_Tips_cDNA_P Parameter: Tissue Value: Root Tips
  misc_feature: MA Experiment ID: 108462 Result: Up-regulated in Transcription
  misc_feature: MA Experiment 108462 PARAMETER Experiment Name: At_Germinating_Seeds_cDNA_P Parameter: Age (day) Value: 2 vs. 0
  misc_feature: MA Experiment 108462 PARAMETER Experiment Name: At_Germinating_Seeds_cDNA_P Parameter: Tissue Value: Germinating Seeds
  misc_feature: MA Experiment ID: 108463 Result: Up-regulated in Transcription
  misc_feature: MA Experiment 108463 PARAMETER Experiment Name: At_Germinating_Seeds_cDNA_P Parameter: Age (day) Value: 3 vs. 0
  misc_feature: MA Experiment 108463 PARAMETER Experiment Name: At_Germinating_Seeds_cDNA_P Parameter: Tissue Value: Germinating Seeds
  misc_feature: MA Experiment ID: 108464 Result: Up-regulated in Transcription
  misc_feature: MA Experiment 108464 PARAMETER Experiment Name: At_Germinating_Seeds_cDNA_P Parameter: Age (day) Value: 4 vs. 0
  misc_feature: MA Experiment 108464 PARAMETER Experiment Name: At_Germinating_Seeds_cDNA_P Parameter: Tissue Value: Germinating Seeds
  misc_feature: MA Experiment ID: 108488 Result: Down-regulated in Transcription
  misc_feature: MA Experiment ID: 20000111 Result: Down-regulated in Transcription
  misc_feature: MA Experiment 20000111 PARAMETER Experiment Name: At_42deg_Heat_cDNA_P Parameter: Temperature (deg C) Value: 42 vs. 22
  misc_feature: MA Experiment 20000111 PARAMETER Experiment Name: At_42deg_Heat_cDNA_P Parameter: Timepoint (hr) Value: 6
  misc_feature: MA Experiment 20000111 PARAMETER Experiment Name: At_42deg_Heat_cDNA_P Parameter: Tissue Value: Aerial
  misc_feature: MA Experiment ID: 20000227 Result: Down-regulated in Transcription
  misc_feature: MA Experiment 20000227 PARAMETER Experiment Name: At_Root-Tips-vs-Tops_P Parameter: Tissue Value: Root Tips vs. Root Tops
  misc_feature: MA Experiment ID: 20001557 Result: Down-regulated in Transcription
  misc_feature: MA Experiment 20001557 PARAMETER Experiment Name: At_Drought_Soil_Dry_P Parameter: Age (day) Value: 27
  misc_feature: MA Experiment 20001557 PARAMETER Experiment Name: At_Drought_Soil_Dry_P Parameter: Organism Value: A. thaliana
  misc_feature: MA Experiment 20001557 PARAMETER Experiment Name: At_Drought_Soil_Dry_P Parameter: Plant Line Value: WS
  misc_feature: MA Experiment 20001557 PARAMETER Experiment Name: At_Drought_Soil_Dry_P Parameter: Post Timepoint (hr) Value: 3
  misc_feature: MA Experiment 20001557 PARAMETER Experiment Name: At_Drought_Soil_Dry_P Parameter: Post-Treatment Value: Re-Water vs. No Drought
  misc_feature: MA Experiment 20001557 PARAMETER Experiment Name: At_Drought_Soil_Dry_P Parameter: Timepoint (day) Value: 13
  misc_feature: MA Experiment 20001557 PARAMETER Experiment Name: At_Drought_Soil_Dry_P Parameter: Treatment Value: Drought vs. No Drought
agcattcctgtttgcaagagaatcacaaatctttgcttacggttcacgctttaaaaacacaactctcattctccttctcttcacaaaccactcatattttttttcacatacttctttgtagtgctactttccattatatcaaacactcagcaacctgatggcaacgagacggatattgaaagaattgaaggagttgcaaagagaccctcctgtatcatgcagtgcaggtccaacaggagaagatatgttccactggcaagctactataatgggtccgaatgaaagtccttactccggaggtgttttccttgtcaatattcatttccctcctgattatccttttaaacctcccaaggttgtattcagaaccaaagtgtttcacccaaacatcaacagtaatggaaacatatgtttggacattctcaaagaccaatggagccctgcccttaccatttctaaggtgcttctctctatatgctctcttctaacagatccaaaccctgacgaccctctggtgccagagatagctcacatatacaaaactgacaagaccaaatatgaagccatggctcgaagctggacccagaagtatgccttgttttaaagctcacaattcctctttttttcctttttattttggtttggtcttatttgtaataaaaaaagaagaagaagaaattgttataattttaatacaaacatatataatatataaagtagagttttcaaagttgttaactcatatgattgatgagatatcgacatgtattaaatctaattttgttaatatataaaaaatcttctaac

SEQ ID NO: 99199 - protein, 148 aa, Arabidopsis thaliana; identical to SEQ ID NO: 20896
  peptide (1)..(148): Ceres Seq. ID no. 13602390
  misc_feature (1)..(148): Homolog of NCBI NO: 18398199 NR Description: ubiquitin-conjugating enzyme, putative
  misc_feature (1)..(147): Homolog of NCBI NO: 18423494 NR Description: ubiquitin-conjugating enzyme 10 (UBC10)
  misc_feature (1)..(147): Homolog of NCBI NO: 32488376 NR Description: OSJNBa0043A12.6 [Oryza sativa (japonica
  misc_feature (1)..(147): Homolog of NCBI NO: 40287554 NR Description: ubiquitin-conjugating enzyme 8 [Capsicum annuum]
  misc_feature (1)..(147): Homolog of NCBI NO: 5762457 NR Description: ubiquitin-conjugating enzyme UBC2
  misc_feature (1)..(147): Homolog of NCBI NO: 2668744 NR Description: ubiquitin conjugating enzyme [Zea mays]
  misc_feature (1)..(147): Homolog of NCBI NO: 30687803 NR Description: ubiquitin-conjugating enzyme 9 (UBC9)
  misc_feature (1)..(147): Homolog of NCBI NO: 30693863 NR Description: ubiquitin-conjugating enzyme 8 (UBC8)
  misc_feature (1)..(147): Homolog of NCBI NO: 18417097 NR Description: ubiquitin-conjugating enzyme 9 (UBC9)
  misc_feature (1)..(147): Homolog of NCBI NO: 11762186 NR Description: AT4g27960 [Arabidopsis thaliana]

SEQ ID NO: 99200 - protein, 119 aa, Arabidopsis thaliana; identical to SEQ ID NO: 20897
  peptide (1)..(119): Ceres Seq. ID no. 13602391
  misc_feature (1)..(119): Homolog of NCBI NO: 18398199 NR Description: ubiquitin-conjugating enzyme, putative
  misc_feature (1)..(118): Homolog of NCBI NO: 18423494 NR Description: ubiquitin-conjugating enzyme 10 (UBC10)
  misc_feature (1)..(118): Homolog of NCBI NO: 32488376 NR Description: OSJNBa0043A12.6 [Oryza sativa (japonica
  misc_feature (1)..(118): Homolog of NCBI NO: 40287554 NR Description: ubiquitin-conjugating enzyme 8 [Capsicum annuum]
  misc_feature (1)..(118): Homolog of NCBI NO: 5762457 NR Description: ubiquitin-conjugating enzyme UBC2
  misc_feature (1)..(118): Homolog of NCBI NO: 2668744 NR Description: ubiquitin conjugating enzyme [Zea mays]
  misc_feature (1)..(118): Homolog of NCBI NO: 30693863 NR Description: ubiquitin-conjugating enzyme 8 (UBC8)
  misc_feature (1)..(118): Homolog of NCBI NO: 11762186 NR Description: AT4g27960 [Arabidopsis thaliana]
  misc_feature (1)..(118): Homolog of NCBI NO: 30687803 NR Description: ubiquitin-conjugating enzyme 9 (UBC9)
  misc_feature (1)..(118): Homolog of NCBI NO: 18417097 NR Description: ubiquitin-conjugating enzyme 9 (UBC9)

SEQ ID NO: 99201 - protein, 111 aa, Arabidopsis thaliana; identical to SEQ ID NO: 20898
  peptide (1)..(111): Ceres Seq. ID no. 13602392
  misc_feature (1)..(111): Homolog of NCBI NO: 18398199 NR Description: ubiquitin-conjugating enzyme, putative
  misc_feature (1)..(110): Homolog of NCBI NO: 18423494 NR Description: ubiquitin-conjugating enzyme 10 (UBC10)
  misc_feature (1)..(110): Homolog of NCBI NO: 32488376 NR Description: OSJNBa0043A12.6 [Oryza sativa (japonica
  misc_feature (1)..(110): Homolog of NCBI NO: 40287554 NR Description: ubiquitin-conjugating enzyme 8 [Capsicum annuum]
  misc_feature (1)..(110): Homolog of NCBI NO: 5762457 NR Description: ubiquitin-conjugating enzyme UBC2
  misc_feature (1)..(110): Homolog of NCBI NO: 2668744 NR Description: ubiquitin conjugating enzyme [Zea mays]
  misc_feature (1)..(110): Homolog of NCBI NO: 11762186 NR Description: AT4g27960 [Arabidopsis thaliana]
  misc_feature (1)..(110): Homolog of NCBI NO: 30687803 NR Description: ubiquitin-conjugating enzyme 9 (UBC9)
  misc_feature (1)..(110): Homolog of NCBI NO: 18417097 NR Description: ubiquitin-conjugating enzyme 9 (UBC9)
  misc_feature (1)..(110): Homolog of NCBI NO: 30693863 NR Description: ubiquitin-conjugating enzyme 8 (UBC8)

SEQ ID NO: 99202 - DNA, 1333 bp, Arabidopsis thaliana
  misc_feature (1)..(1333): Ceres Seq. ID no. 13602401
  misc_feature: MA Experiment ID: 108434 Result: Up-regulated in Transcription
  misc_feature: MA Experiment 108434 PARAMETER Experiment Name: At_Root_Tips_cDNA_P Parameter: Tissue Value: Root Tips
  misc_feature: MA Experiment ID: 108462 Result: Down-regulated in Transcription
  misc_feature: MA Experiment 108462 PARAMETER Experiment Name: At_Germinating_Seeds_cDNA_P Parameter: Age (day) Value: 2 vs. 0
  misc_feature: MA Experiment 108462 PARAMETER Experiment Name: At_Germinating_Seeds_cDNA_P Parameter: Tissue Value: Germinating Seeds
  misc_feature: MA Experiment ID: 108463 Result: Down-regulated in Transcription
  misc_feature: MA Experiment 108463 PARAMETER Experiment Name: At_Germinating_Seeds_cDNA_P Parameter: Age (day) Value: 3 vs. 0
  misc_feature: MA Experiment 108463 PARAMETER Experiment Name: At_Germinating_Seeds_cDNA_P Parameter: Tissue Value: Germinating Seeds
  misc_feature: MA Experiment ID: 108464 Result: Down-regulated in Transcription
  misc_feature: MA Experiment 108464 PARAMETER Experiment Name: At_Germinating_Seeds_cDNA_P Parameter: Age (day) Value: 4 vs. 0
  misc_feature: MA Experiment 108464 PARAMETER Experiment Name: At_Germinating_Seeds_cDNA_P Parameter: Tissue Value: Germinating Seeds
  misc_feature: MA Experiment ID: 20000184 Result: Up-regulated in Transcription
  misc_feature: MA Experiment 20000184 PARAMETER Experiment Name: At_Shoots__P Parameter: Age (day) Value: 7
  misc_feature: MA Experiment 20000184 PARAMETER Experiment Name: At_Shoots__P Parameter: Tissue Value: Shoots vs. Whole Plant
  misc_feature: MA Experiment ID: 20000794 Result: Down-regulated in Transcription
  misc_feature: MA Experiment 20000794 PARAMETER Experiment Name: At_Petals_P Parameter: Age (day) Value: 23-25 days
  misc_feature: MA Experiment 20000794 PARAMETER Experiment Name: At_Petals_P Parameter: Plant Line Value: WS
  misc_feature: MA Experiment 20000794 PARAMETER Experiment Name: At_Petals_P Parameter: Tissue Value: Petals vs. Whole plant
gattgagagcaaagtctcactctcttccttaagctctgagaaacctccgataagcttatcggacaaaaagagaagtagacgccgccatggataggcttttgcaacctccttcttctcactcaattgctccctccaaattccaatcaagaccatctcccttattactccaccgtctccactcaacgaatcttagtacttttccctcctctcgccgtctcgagtcacgccgaatcagctccatttcctgcttcttccgtcagaatccatcgccggatacatctccaggattgaatcagagtagtaatttcttgattgcttcttctcaaaccgatgcgtcgaaacctaatccaggatttatccaacggatcgtgagcagttttgagcaacgcaagaccatatcggcaggaatggttatattagtctctgctatagctgcgcttttgcttaatcccattcttgtgccgcctgctttcgctagctttcaaacggctactaattctggtggagctgctgtggttggtggaaaactcctcaggactgaagtattgacaagtgcttggactggtttctttgctggttgcttacacacgttatctggacctgatcaccttgctgctttggctccactttcgattggacggacgagaatggagagtgctgcggttggagctctttggggatgtggtcatgacgctggtcagctcatctttggtttattgtttctgcttctaaaagataggctccacattgaagttataagaacttggggtacaagagttgttggtttgactctccttgtgattggtgctatgggaatcaaagaagcttctgagatgccggaaccatgtgttgttactttggagaatggggaaacagatgagaaaagcttaaagaagaaaaagatagggtttgcgacatttgcgactgggattgttcatggcctgcaaccggatgctctgatgatggtattgcctgcattggctcttccttctcggatagccggtgcttcgtttctcatcatgttcttgattgggacggtgattgcgatgggaagctacacagtttttattgggtcgtgtagcgaagcgttgaaagagaaagttcctaggatcactgagaaactaacgtgggcatcttctcttgtggccattggacttggattggcaattattgtcagccagttctttggattcagcctgtattgaagaaaacatcgtcaagtctttgtagctctctctgtaggataagattttttgcatgtaccaacaaaatttgtatctttgcttcagaatctttttcttcaatcaaatacaagtttgagtttggctccccc

SEQ ID NO: 99203 - protein, 372 aa, Arabidopsis thaliana
  peptide (1)..(372): Ceres Seq. ID no. 13602402
  misc_feature (1)..(372): Homolog of NCBI NO: 18398217 NR Description: expressed protein [Arabidopsis thaliana]
  misc_feature (1)..(372): Homolog of NCBI NO: 15724154 NR Description: At2g16800/T24I21.21 [Arabidopsis thaliana]
  misc_feature (1)..(372): Homolog of NCBI NO: 21592431 NR Description: unknown [Arabidopsis thaliana]
  misc_feature (1)..(372): Homolog of NCBI NO: 18418571 NR Description: expressed protein [Arabidopsis thaliana] AT4g35080/M4E13_135 [Arabidopsis thaliana]
  misc_feature (102)..(372): Homolog of NCBI NO: 7486794 NR Description: hypothetical protein M4E13.135 - Arabidopsis >gi|3115852|emb|CAA17779.1| putative protein [Arabidopsis >gi|7270459|emb|CAB80225.1| putative protein [Arabidopsis
  misc_feature (101)..(372): Homolog of NCBI NO: 34897966 NR Description: hypothetical protein~similar to Arabidopsis
  misc_feature (102)..(372): Homolog of NCBI NO: 21397272 NR Description: Hypothetical protein [Oryza sativa (japonica
  misc_feature (153)..(321): Homolog of NCBI NO: 33866162 NR Description: cyanobacterial conserved hypothetical protein sp. WH 8102] >gi|33639137|emb|CAE08143.1| cyanobacterial
  misc_feature (153)..(321): Homolog of NCBI NO: 33862611 NR Description: marine cyanobacterial conserved hypothetical marinus str. MIT 9313] >gi|33634527|emb|CAE20513.1| marine
  misc_feature (153)..(323): Homolog of NCBI NO: 33240819 NR Description: Hydrogenase accessory protein or high-affinity transport protein homolog, membrane protein [Prochlorococcus subsp. marinus str. CCMP1375] >gi|33238348|gb|AAQ00414.1|
MDRLLQPPSSHSIAPSKFQSRPSPLLLHRLHSTNLSTFPSSRRLESRRISSISCFFRQNPSPDTSPGLNQSSNFLIASSQTDASKPNPGFIQRIVSSFEQRKTISAGMVILVSAIAALLLNPILVPPAFASFQTATNSGGAAVVGGKLLRTEVLTSAWTGFFAGCLHTLSGPDHLAALAPLSIGRTRMESAAVGALWGCGHDAGQLIFGLLFLLLKDRLHIEVIRTWGTRVVGLTLLVIGAMGIKEASEMPEPCVVTLENGETDEKSLKKKKIGFATFATGIVHGLQPDALMMVLPALALPSRIAGASFLIMFLIGTVIAMGSYTVFIGSCSEALKEKVPRITEKLTWASSLVAIGLGLAIIVSQFFGFSLY

SEQ ID NO: 99204 - protein, 265 aa, Arabidopsis thaliana; identical to SEQ ID NO: 35535
  peptide (1)..(265): Ceres Seq. ID no. 13602403
  misc_feature (1)..(265): Homolog of NCBI NO: 18398217 NR Description: expressed protein [Arabidopsis thaliana]
  misc_feature (1)..(265): Homolog of NCBI NO: 15724154 NR Description: At2g16800/T24I21.21 [Arabidopsis thaliana]
  misc_feature (1)..(265): Homolog of NCBI NO: 21592431 NR Description: unknown [Arabidopsis thaliana]
  misc_feature (1)..(265): Homolog of NCBI NO: 18418571 NR Description: expressed protein [Arabidopsis thaliana] AT4g35080/M4E13_135 [Arabidopsis thaliana]
  misc_feature (1)..(265): Homolog of NCBI NO: 7486794 NR Description: hypothetical protein M4E13.135 - Arabidopsis >gi|3115852|emb|CAA17779.1| putative protein [Arabidopsis >gi|7270459|emb|CAB80225.1| putative protein [Arabidopsis
  misc_feature (1)..(265): Homolog of NCBI NO: 34897966 NR Description: hypothetical protein~similar to Arabidopsis
  misc_feature (1)..(265): Homolog of NCBI NO: 21397272 NR Description: Hypothetical protein [Oryza sativa (japonica
  misc_feature (46)..(214): Homolog of NCBI NO: 33866162 NR Description: cyanobacterial conserved hypothetical protein sp. WH 8102] >gi|33639137|emb|CAE08143.1| cyanobacterial
  misc_feature (46)..(214): Homolog of NCBI NO: 33862611 NR Description: marine cyanobacterial conserved hypothetical marinus str. MIT 9313] >gi|33634527|emb|CAE20513.1| marine
  misc_feature (46)..(216): Homolog of NCBI NO: 33240819 NR Description: Hydrogenase accessory protein or high-affinity transport protein homolog, membrane protein [Prochlorococcus subsp. marinus str. CCMP1375] >gi|33238348|gb|AAQ00414.1|

SEQ ID NO: 99205 - DNA, 1156 bp, Arabidopsis thaliana
  misc_feature (1)..(1156): Ceres Seq. ID no. 13602404
  misc_feature: MA Experiment ID: 20000180 Result: Up-regulated in Transcription
  misc_feature: MA Experiment 20000180 PARAMETER Experiment Name: At_Germinating_Seeds_P Parameter: Age (hr) Value: 24 vs. 0
  misc_feature: MA Experiment 20000180 PARAMETER Experiment Name: At_Germinating_Seeds_P Parameter: Tissue Value: Germinating Seeds
  misc_feature: MA Experiment ID: 20000184 Result: Up-regulated in Transcription
  misc_feature: MA Experiment 20000184 PARAMETER Experiment Name: At_Shoots__P Parameter: Age (day) Value: 7
  misc_feature: MA Experiment 20000184 PARAMETER Experiment Name: At_Shoots__P Parameter: Tissue Value: Shoots vs. Whole Plant
  misc_feature: MA Experiment ID: 20000495 Result: Up-regulated in Transcription
  misc_feature: MA Experiment 20000495 PARAMETER Experiment Name: At_Guard_Cells_P Parameter: Harvest Date Value: 8/2/2002
  misc_feature: MA Experiment 20000495 PARAMETER Experiment Name: At_Guard_Cells_P Parameter: Organism Value: A. thaliana
  misc_feature: MA Experiment 20000495 PARAMETER Experiment Name: At_Guard_Cells_P Parameter: Tissue Value: Guard Cells vs. Leaves
  misc_feature: MA Experiment ID: 20001558 Result: Up-regulated in Transcription
  misc_feature: MA Experiment 20001558 PARAMETER Experiment Name: At_Drought_Soil_Dry_P Parameter: Age (day) Value: 27
  misc_feature: MA Experiment 20001558 PARAMETER Experiment Name: At_Drought_Soil_Dry_P Parameter: Organism Value: A. thaliana
  misc_feature: MA Experiment 20001558 PARAMETER Experiment Name: At_Drought_Soil_Dry_P Parameter: Plant Line Value: WS
  misc_feature: MA Experiment 20001558 PARAMETER Experiment Name: At_Drought_Soil_Dry_P Parameter: Post Timepoint (hr) Value: 6
  misc_feature: MA Experiment 20001558 PARAMETER Experiment Name: At_Drought_Soil_Dry_P Parameter: Post-Treatment Value: Re-Water vs. No Drought
  misc_feature: MA Experiment 20001558 PARAMETER Experiment Name: At_Drought_Soil_Dry_P Parameter: Timepoint (day) Value: 13
  misc_feature: MA Experiment 20001558 PARAMETER Experiment Name: At_Drought_Soil_Dry_P Parameter: Treatment Value: Drought vs. No Drought
  misc_feature: MA Experiment ID: 20001911 Result: Down-regulated in Transcription
  misc_feature: MA Experiment 20001911 PARAMETER Experiment Name: At_Drought_Reproduction_P Parameter: Age (day) Value: 40
  misc_feature: MA Experiment 20001911 PARAMETER Experiment Name: At_Drought_Reproduction_P Parameter: Organism Value: A. thaliana
  misc_feature: MA Experiment 20001911 PARAMETER Experiment Name: At_Drought_Reproduction_P Parameter: Plant Line Value: WS
  misc_feature: MA Experiment 20001911 PARAMETER Experiment Name: At_Drought_Reproduction_P Parameter: Timepoint (day) Value: 10
  misc_feature: MA Experiment 20001911 PARAMETER Experiment Name: At_Drought_Reproduction_P Parameter: Tissue Value: Flowers
  misc_feature: MA Experiment 20001911 PARAMETER Experiment Name: At_Drought_Reproduction_P Parameter: Treatment Value: Drought vs. No Drought
ataactagagagagaaactaatctttttagtgagagagaaatcttagagctgagctaagaaaaatgtcaaaagaagtgagtgaagaaggaagacatggcaaagactacgtggatccacctccagctccacttctagacatggctgagcttaagctctggtctttttacagagctatcatcgcagagttcatcgccactctcctcttcctctatgtaaccgtagctacagtcattggccacaagaaccaaaccggtccttgtggcggtgttggtttactcggcattgcgtgggcctttggtggcatgatctttgtcctcgtctattgcaccgccggtatctccggaggtcacattaacccagctgtgacatttggtctgttcttggctcgtaaagtgtcgctccctagagcagttgcttacatggtggctcagtgtcttggagccatttgtggagttggactcgttaaggcctttatgatgactccatataaacgtctcggaggcggagctaacaccgtagctgatggttatagcaccggaactgctcttggtgctgagattattggcacatttgtcttggtttacactgtcttctccgccactgaccccaaaagaagtgcccgtgactctcacgtcccggttttggctccgttacctatagggtttgctgtgttcatggtgcatttggctactatccccataactggaactgggattaatccagccagaagctttggtgctgctgttatctacaacaatgagaaagcttgggacgaccattggatcttttgggttggaccattcgtgggagcattagcagcagcagcataccatcaatatatcttgagagctgcagcaatcaaagctttggcttcattccgcagcaacccaaccaattgatgattcatgagacttcttagaacaatttgagatctttttttttgtgtgcttaatgagagatatttgtgtgttttaatttgatgtaatcggatttattcattttcatagtttaatttggtttaattcatctttgtccgttgctttctttcatgtagggcatcttatgattcacttttatactttagtacgaattaaaacatttgttacaagtttatatgaacccacatgcatgttcgtataaaacattccttggtgt

SEQ ID NO: 99206 - protein, 278 aa, Arabidopsis thaliana
  peptide (1)..(278): Ceres Seq. ID no. 13602405
  misc_feature (28)..(257): Pfam Name: Major intrinsic protein Pfam Description: Major intrinsic protein
  misc_feature (1)..(278): Homolog of NCBI NO: 15227302 NR Description: putative plasma membrane intrinsic protein
  misc_feature (1)..(278): Homolog of NCBI NO: 11119335 NR Description: aquaporin [Brassica oleracea]
  misc_feature (1)..(278): Homolog of NCBI NO: 15236267 NR Description: aquaporin, putative [Arabidopsis thaliana]
  misc_feature (1)..(278): Homolog of NCBI NO: 1688296 NR Description: plasma membrane intrinsic protein PIP3
  misc_feature (1)..(278): Homolog of NCBI NO: 2306917 NR Description: plasma membrane intrinsic protein [Arabidopsis
  misc_feature (1)..(278): Homolog of NCBI NO: 8071628 NR Description: putative aquaporin PIP2-2 [Vitis berlandieri x
  misc_feature (1)..(278): Homolog of NCBI NO: 17940742 NR Description: aquaporin-like protein [Petunia x hybrida]
  misc_feature (1)..(278): Homolog of NCBI NO: 7441266 NR Description: plasma membrane major intrinsic protein 2 - beet
  misc_feature (1)..(278): Homolog of NCBI NO: 7441276 NR Description: mipE protein - common ice plant
  misc_feature (1)..(278): Homolog of NCBI NO: 1168480 NR Description: AQUAPORIN >gi|604477|gb|AAA86991.1| aquaporin
MSKEVSEEGRHGKDYVDPPPAPLLDMAELKLWSFYRAIIAEFIATLLFLYVTVATVIGHKNQTGPCGGVGLLGIAWAFGGMIFVLVYCTAGISGGHINPAVTFGLFLARKVSLPRAVAYMVAQCLGAICGVGLVKAFMMTPYKRLGGGANTVADGYSTGTALGAEIIGTFVLVYTVFSATDPKRSARDSHVPVLAPLPIGFAVFMVHLATIPITGTGINPARSFGAAVIYNNEKAWDDHWIFWVGPFVGALAAAAYHQYILRAAAIKALASFRSNPTN

SEQ ID NO: 99207 - protein, 253 aa, Arabidopsis thaliana
  peptide (1)..(253): Ceres Seq. ID no. 13602406
  misc_feature (3)..(232): Pfam Name: Major intrinsic protein Pfam Description: Major intrinsic protein
  misc_feature (1)..(253): Homolog of NCBI NO: 15227302 NR Description: putative plasma membrane intrinsic protein
  misc_feature (1)..(253): Homolog of NCBI NO: 11119335 NR Description: aquaporin [Brassica oleracea]
  misc_feature (1)..(253): Homolog of NCBI NO: 15236267 NR Description: aquaporin, putative [Arabidopsis thaliana]
  misc_feature (1)..(253): Homolog of NCBI NO: 1688296 NR Description: plasma membrane intrinsic protein PIP3
  misc_feature (1)..(253): Homolog of NCBI NO: 2306917 NR Description: plasma membrane intrinsic protein [Arabidopsis
  misc_feature (1)..(253): Homolog of NCBI NO: 8071628 NR Description: putative aquaporin PIP2-2 [Vitis berlandieri x
  misc_feature (1)..(253): Homolog of NCBI NO: 17940742 NR Description: aquaporin-like protein [Petunia x hybrida]
  misc_feature (1)..(253): Homolog of NCBI NO: 7441266 NR Description: plasma membrane major intrinsic protein 2 - beet
  misc_feature (1)..(253): Homolog of NCBI NO: 7441276 NR Description: mipE protein - common ice plant
  misc_feature (1)..(253): Homolog of NCBI NO: 1168480 NR Description: AQUAPORIN >gi|604477|gb|AAA86991.1| aquaporin
MAELKLWSFYRAIIAEFIATLLFLYVTVATVIGHKNQTGPCGGVGLLGIAWAFGGMIFVLVYCTAGISGGHINPAVTFGLFLARKVSLPRAVAYMVAQCLGAICGVGLVKAFMMTPYKRLGGGANTVADGYSTGTALGAEIIGTFVLVYTVFSATDPKRSARDSHVPVLAPLPIGFAVFMVHLATIPITGTGINPARSFGAAVIYNNEKAWDDHWIFWVGPFVGALAAAAYHQYILRAAAIKALASFRSNPTN

SEQ ID NO: 99208 - protein, 198 aa, Arabidopsis thaliana; identical to SEQ ID NO: 23386
  peptide (1)..(198): Ceres Seq. ID no. 13602407
  misc_feature (1)..(177): Pfam Name: Major intrinsic protein Pfam Description: Major intrinsic protein
  misc_feature (1)..(198): Homolog of NCBI NO: 15227302 NR Description: putative plasma membrane intrinsic protein
  misc_feature (1)..(198): Homolog of NCBI NO: 11119335 NR Description: aquaporin [Brassica oleracea]
  misc_feature (1)..(198): Homolog of NCBI NO: 15236267 NR Description: aquaporin, putative [Arabidopsis thaliana]
  misc_feature (1)..(198): Homolog of NCBI NO: 1688296 NR Description: plasma membrane intrinsic protein PIP3
  misc_feature (1)..(198): Homolog of NCBI NO: 2306917 NR Description: plasma membrane intrinsic protein [Arabidopsis
  misc_feature (1)..(198): Homolog of NCBI NO: 8071628 NR Description: putative aquaporin PIP2-2 [Vitis berlandieri x
  misc_feature (1)..(198): Homolog of NCBI NO: 17940742 NR Description: aquaporin-like protein [Petunia x hybrida]
  misc_feature (1)..(198): Homolog of NCBI NO: 7441266 NR Description: plasma membrane major intrinsic protein 2 - beet
  misc_feature (1)..(198): Homolog of NCBI NO: 7441276 NR Description: mipE protein - common ice plant
  misc_feature (1)..(198): Homolog of NCBI NO: 1168480 NR Description: AQUAPORIN >gi|604477|gb|AAA86991.1| aquaporin

SEQ ID NO: 99209 - DNA, 1334 bp, Arabidopsis thaliana
  misc_feature (1)..(1334): Ceres Seq. ID no. 13602415
  misc_feature: MA Experiment ID: 108434 Result: Up-regulated in Transcription
  misc_feature: MA Experiment 108434 PARAMETER Experiment Name: At_Root_Tips_cDNA_P Parameter: Tissue Value: Root Tips
  misc_feature: MA Experiment ID: 108577 Result: Down-regulated in Transcription
  misc_feature: MA Experiment 108577 PARAMETER Experiment Name: At_42deg_Heat_cDNA_P Parameter: Temperature (deg C) Value: 42 vs. 22
  misc_feature: MA Experiment 108577 PARAMETER Experiment Name: At_42deg_Heat_cDNA_P Parameter: Timepoint (hr) Value: 6
  misc_feature: MA Experiment 108577 PARAMETER Experiment Name: At_42deg_Heat_cDNA_P Parameter: Tissue Value: Aerial
  misc_feature: MA Experiment ID: 108595 Result: Down-regulated in Transcription
  misc_feature: MA Experiment 108595 PARAMETER Experiment Name: At_Ler-pi_Ovule_cDNA_P Parameter: Plant Line Value: null
  misc_feature: MA Experiment ID: 20000111 Result: Down-regulated in Transcription
  misc_feature: MA Experiment 20000111 PARAMETER Experiment Name: At_42deg_Heat_cDNA_P Parameter: Temperature (deg C) Value: 42 vs. 22
  misc_feature: MA Experiment 20000111 PARAMETER Experiment Name: At_42deg_Heat_cDNA_P Parameter: Timepoint (hr) Value: 6
  misc_feature: MA Experiment 20000111 PARAMETER Experiment Name: At_42deg_Heat_cDNA_P Parameter: Tissue Value: Aerial
  misc_feature: MA Experiment ID: 20000112 Result: Down-regulated in Transcription
  misc_feature: MA Experiment 20000112 PARAMETER Experiment Name: At_42deg_Heat_cDNA_P Parameter: Temperature (deg C) Value: 42 vs. 22
  misc_feature: MA Experiment 20000112 PARAMETER Experiment Name: At_42deg_Heat_cDNA_P Parameter: Timepoint (hr) Value: 2
  misc_feature: MA Experiment 20000112 PARAMETER Experiment Name: At_42deg_Heat_cDNA_P Parameter: Tissue Value: Aerial
  misc_feature: MA Experiment ID: 20000113 Result: Down-regulated in Transcription
  misc_feature: MA Experiment 20000113 PARAMETER Experiment Name: At_42deg_Heat_cDNA_P Parameter: Temperature (deg C) Value: 42 vs. 22
  misc_feature: MA Experiment 20000113 PARAMETER Experiment Name: At_42deg_Heat_cDNA_P Parameter: Timepoint (hr) Value: 8
  misc_feature: MA Experiment 20000113 PARAMETER Experiment Name: At_42deg_Heat_cDNA_P Parameter: Tissue Value: Aerial
  misc_feature: MA Experiment ID: 20000173 Result: Down-regulated in Transcription
  misc_feature: MA Experiment 20000173 PARAMETER Experiment Name: At_42deg_Heat_P Parameter: Age (day) Value: 14
  misc_feature: MA Experiment 20000173 PARAMETER Experiment Name: At_42deg_Heat_P Parameter: Organism Value: A. thaliana
  misc_feature: MA Experiment 20000173 PARAMETER Experiment Name: At_42deg_Heat_P Parameter: Plant Line Value: WS
  misc_feature: MA Experiment 20000173 PARAMETER Experiment Name: At_42deg_Heat_P Parameter: Temperature (deg C) Value: 42 vs. 22
  misc_feature: MA Experiment 20000173 PARAMETER Experiment Name: At_42deg_Heat_P Parameter: Timepoint (hr) Value: 6
  misc_feature: MA Experiment 20000173 PARAMETER Experiment Name: At_42deg_Heat_P Parameter: Tissue Value: Aerial
  misc_feature: MA Experiment ID: 20000184 Result: Up-regulated in Transcription
  misc_feature: MA Experiment 20000184 PARAMETER Experiment Name: At_Shoots__P Parameter: Age (day) Value: 7
  misc_feature: MA Experiment 20000184 PARAMETER Experiment Name: At_Shoots__P Parameter: Tissue Value: Shoots vs. Whole Plant
  misc_feature: MA Experiment ID: 20001905 Result: Down-regulated in Transcription
  misc_feature: MA Experiment 20001905 PARAMETER Experiment Name: At_Drought_Reproduction_P Parameter: Age (day) Value: 40
  misc_feature: MA Experiment 20001905 PARAMETER Experiment Name: At_Drought_Reproduction_P Parameter: Organism Value: A. thaliana
  misc_feature: MA Experiment 20001905 PARAMETER Experiment Name: At_Drought_Reproduction_P Parameter: Plant Line Value: WS
  misc_feature: MA Experiment 20001905 PARAMETER Experiment Name: At_Drought_Reproduction_P Parameter: Timepoint (day) Value: 10
  misc_feature: MA Experiment 20001905 PARAMETER Experiment Name: At_Drought_Reproduction_P Parameter: Tissue Value: Rosettes
  misc_feature: MA Experiment 20001905 PARAMETER Experiment Name: At_Drought_Reproduction_P Parameter: Treatment Value: Drought vs. No Drought
attaggttaggtggtcacgtttgttcatctctctcttatatatttgtttaaaggcttcgtctttgttcatttgcttttgttgatctcattacttgttcatcaatggcaagtctttgtttccaatctccttccaaacccatttcctatttccaacccaaatccaatccatcgccaccgttattcgccaaagtctccgtctttcgatgcagagcttccgtacaaaccctcgtcgccgttgagccggagccagttttcgtctccgtcaagacttttgcgccagccaccgtcgctaatttgggaccagggtttgatttcttaggatgtgccgtcgatggtctcggagaccatgtgactctccgtgtagatccctctgtacgagccggtgaggtctcaatctcggagatcaccggaaccacaacaaaactcagcacgaaccctctccggaactgcgccggaatcgctgctattgctacgatgaagatgttagggatcagatcggttggtttatcattagatttgcataaaggtcttcctttaggtagcggtttaggttctagtgcagctagtgccgccgcagctgctgtggcggttaatgagatctttggccggaaattagggagtgatcaattggtattagccggtttagaatcggaagcgaaagtctccggttatcacgctgataatatcgcaccagcgatcatgggtggattcgttttgattagaaactacgaaccacttgatttgaaaccattgaggttcccatctgataaagatctcttctttgttctagtaagccctgactttgaagctccaactaagaaaatgagagctgcattgcctacagagattccaatggttcatcatgtttggaacagtagccaagcagctgctttagtcgctgctgtgttagaaggtgacgcagtgatgcttgggaaggcattgtcgtcggataagattgtggagccgactagagcgccgttgattccgggaatggaagctgtgaagaaggcggctttagaagctggagcatttggatgtactattagcggagctggaccaacagcggttgcggtgattgattcggaggagaagggtcaagtcattggagagaagatggtggaagcgttttggaaagttggtcatttgaaatctgttgcttctgtgaagaagcttgataatgttggtgctaggcttgtcaacagcgtctccagatgatctttgtgtgctgtttgattatgttaagattggaactgtttgattatgttaagattggaaccaatcttgctctgtactgtaatttctagatgataataaagttctttgttttctacacc

SEQ ID NO: 99210 - protein, 370 aa, Arabidopsis thaliana; identical to SEQ ID NO: 26642
  peptide (1)..(370): Ceres Seq. ID no. 13602416
  misc_feature (1)..(370): Homolog of NCBI NO: 15227800 NR Description: homoserine kinase [Arabidopsis thaliana]
  misc_feature (1)..(370): Homolog of NCBI NO: 39104572 NR Description: putative homoserine kinase HSK [Arabidopsis
  misc_feature (1)..(370): Homolog of NCBI NO: 4927412 NR Description: homoserine kinase [Arabidopsis thaliana]
  misc_feature (53)..(365): Homolog of NCBI NO: 23136657 NR Description: hypothetical protein [Cytophaga hutchinsonii]
  misc_feature (53)..(369): Homolog of NCBI NO: 21674844 NR Description: homoserine kinase [Chlorobium tepidum TLS]
  misc_feature (55)..(346): Homolog of NCBI NO: 14521243 NR Description: HOMOSERINE KINASE (HK). [Pyrococcus abyssi]
  misc_feature (55)..(365): Homolog of NCBI NO: 21242565 NR Description: homoserine kinase [Xanthomonas axonopodis pv. str. 306] >gi|21108024|gb|AAM36683.1| homoserine kinase
  misc_feature (55)..(365): Homolog of NCBI NO: 21231249 NR Description: homoserine kinase [Xanthomonas campestris pv. str. ATCC 33913] >gi|24211871|sp|Q8P9Q0|KHSE_XANCP Homoserine (HK) >gi|21112898|gb|AAM41090.1| homoserine kinase [Xanthomonas
  misc_feature (44)..(365): Homolog of NCBI NO: 22997478 NR Description: hypothetical protein [Xylella fastidiosa Ann-1]
  misc_feature (44)..(365): Homolog of NCBI NO: 15838815 NR Description: homoserine kinase [Xylella fastidiosa 9a5c]

SEQ ID NO: 99211 - protein, 246 aa, Arabidopsis thaliana; identical to SEQ ID NO: 26643
  peptide (1)..(246): Ceres Seq. ID no. 13602417
  misc_feature (1)..(246): Homolog of NCBI NO: 15227800 NR Description: homoserine kinase [Arabidopsis thaliana]
  misc_feature (1)..(246): Homolog of NCBI NO: 39104572 NR Description: putative homoserine kinase HSK [Arabidopsis
  misc_feature (1)..(246): Homolog of NCBI NO: 4927412 NR Description: homoserine kinase [Arabidopsis thaliana]
  misc_feature (1)..(241): Homolog of NCBI NO: 23136657 NR Description: hypothetical protein [Cytophaga hutchinsonii]
  misc_feature (1)..(245): Homolog of NCBI NO: 21674844 NR Description: homoserine kinase [Chlorobium tepidum TLS]
  misc_feature (1)..(222): Homolog of NCBI NO: 14521243 NR Description: HOMOSERINE KINASE (HK). [Pyrococcus abyssi]
  misc_feature (1)..(241): Homolog of NCBI NO: 21242565 NR Description: homoserine kinase [Xanthomonas axonopodis pv. str. 306] >gi|21108024|gb|AAM36683.1| homoserine kinase
  misc_feature (1)..(241): Homolog of NCBI NO: 21231249 NR Description: homoserine kinase [Xanthomonas campestris pv. str. ATCC 33913] >gi|24211871|sp|Q8P9Q0|KHSE_XANCP Homoserine (HK) >gi|21112898|gb|AAM41090.1| homoserine kinase [Xanthomonas
  misc_feature (1)..(241): Homolog of NCBI NO: 22997478 NR Description: hypothetical protein [Xylella fastidiosa Ann-1]
  misc_feature (1)..(241): Homolog of NCBI NO: 15838815 NR Description: homoserine kinase [Xylella fastidiosa 9a5c]

SEQ ID NO: 99212 - protein, 244 aa, Arabidopsis thaliana; identical to SEQ ID NO: 26644
  peptide (1)..(244): Ceres Seq. ID no. 13602418
  misc_feature (1)..(244): Homolog of NCBI NO: 15227800 NR Description: homoserine kinase [Arabidopsis thaliana]
  misc_feature (1)..(244): Homolog of NCBI NO: 39104572 NR Description: putative homoserine kinase HSK [Arabidopsis
  misc_feature (1)..(244): Homolog of NCBI NO: 4927412 NR Description: homoserine kinase [Arabidopsis thaliana]
  misc_feature (1)..(239): Homolog of NCBI NO: 23136657 NR Description: hypothetical protein [Cytophaga hutchinsonii]
  misc_feature (1)..(243): Homolog of NCBI NO: 21674844 NR Description: homoserine kinase [Chlorobium tepidum TLS]
  misc_feature (1)..(220): Homolog of NCBI NO: 14521243 NR Description: HOMOSERINE KINASE (HK). [Pyrococcus abyssi]
  misc_feature (1)..(239): Homolog of NCBI NO: 21242565 NR Description: homoserine kinase [Xanthomonas axonopodis pv. str. 306] >gi|21108024|gb|AAM36683.1| homoserine kinase
  misc_feature (1)..(239): Homolog of NCBI NO: 21231249 NR Description: homoserine kinase [Xanthomonas campestris pv. str. ATCC 33913] >gi|24211871|sp|Q8P9Q0|KHSE_XANCP Homoserine (HK) >gi|21112898|gb|AAM41090.1| homoserine kinase [Xanthomonas
  misc_feature (1)..(239): Homolog of NCBI NO: 22997478 NR Description: hypothetical protein [Xylella fastidiosa Ann-1]
  misc_feature (1)..(239): Homolog of NCBI NO: 15838815 NR Description: homoserine kinase [Xylella fastidiosa 9a5c]

SEQ ID NO: 99213 - DNA, 1189 bp, Arabidopsis thaliana
  misc_feature (1)..(1189): Ceres Seq. ID no. 13602419
  misc_feature: MA Experiment ID: 108434 Result: Up-regulated in Transcription
  misc_feature: MA Experiment 108434 PARAMETER Experiment Name: At_Root_Tips_cDNA_P Parameter: Tissue Value: Root Tips
  misc_feature: MA Experiment ID: 108595 Result: Down-regulated in Transcription
  misc_feature: MA Experiment 108595 PARAMETER Experiment Name: At_Ler-pi_Ovule_cDNA_P Parameter: Plant Line Value: null
  misc_feature: MA Experiment ID: 20000087 Result: Down-regulated in Transcription
  misc_feature: MA Experiment 20000087 PARAMETER Experiment Name: At_100uM_ABA_Mutants_cDNA_P Parameter: Plant Line Value: WS
  misc_feature: MA Experiment 20000087 PARAMETER Experiment Name: At_100uM_ABA_Mutants_cDNA_P Parameter: Timepoint (hr) Value: 6
  misc_feature: MA Experiment 20000087 PARAMETER Experiment Name: At_100uM_ABA_Mutants_cDNA_P Parameter: Tissue Value: Aerial
  misc_feature: MA Experiment 20000087 PARAMETER Experiment Name: At_100uM_ABA_Mutants_cDNA_P Parameter: Treatment Value: 100uM ABA vs. No Treatment
  misc_feature: MA Experiment ID: 20000329 Result: Down-regulated in Transcription
  misc_feature: MA Experiment 20000329 PARAMETER Experiment Name: At_4deg_Cold_Sub_P Parameter: Age (day) Value: 14
  misc_feature: MA Experiment 20000329 PARAMETER Experiment Name: At_4deg_Cold_Sub_P Parameter: Organism Value: A. thaliana
  misc_feature: MA Experiment 20000329 PARAMETER Experiment Name: At_4deg_Cold_Sub_P Parameter: Plant Line Value: WS
  misc_feature: MA Experiment 20000329 PARAMETER Experiment Name: At_4deg_Cold_Sub_P Parameter: Temperature (deg C) Value: 4 vs. 22
  misc_feature: MA Experiment 20000329 PARAMETER Experiment Name: At_4deg_Cold_Sub_P Parameter: Timepoint (hr) Value: 6
  misc_feature: MA Experiment 20000329 PARAMETER Experiment Name: At_4deg_Cold_Sub_P Parameter: Tissue Value: Aerial
  misc_feature: MA Experiment ID: 20000440 Result: Up-regulated in Transcription
  misc_feature: MA Experiment 20000440 PARAMETER Experiment Name: At_Closed-Flower__Sub_P Parameter: Tissue Value: Closed Flower vs. Whole Plant
acccgacccggatctattagacactcgttcttcgtcgttatcaattcggagatgattccgtttcctctgttaccaacgccgattgaaaccaactacagagcttgcaccattccttatagattcccttccgataatctcaagaaagccactcctactgaaatctcctggatcaacgtcttcgccaattccattccttctttcaagaaacgtgcagagagcgataccagtgttccagatgctcctgctagagctaaaatttttgaacaaagatatgcgggatttcttgaaggctggaagaaagatccagagagtaatggtgggccaccagatggtgttattctcggccgagttcgtgagcatttactcagagagttaggatttagggacatattcaagaaagtcaaggatgaggagaatgcaaaggctatatcactatttcctgaagttgtcagtctgagtgatgctattgaagatgacggagaacggttagagaatttggtgagagggatatttgctggaaacatctttgatcttggttctgcacagcttgctgaggttttctcaagggatggcatatctttcttggctacctctcaaaacttggttccacgaccatgggtcatcgatgacttgaacaagttccaagccaaatgggtcaagaagccttggaagaaggcagtgatttttgttgataattctggtgcagacataattttgggtattttgcctttcgcaagagagttgctccgtcgaggaattcaggtggtgctagctgctaacgagctgccagctatcaacgatgtaacatatactgagcttacagatatcgtgtcgcagttaaaggatggaaatggccaattgataggcgttgatacttcaaagcttctgattgcaaattcagggaacgatttagcggttattgatctctcaagagtatcgcacgagcttgcttacctttcatctgatgcagacttagtcatcctagaaggcatgggtcgcgggatcgagacaaacctttatgctcagttcaagtgtgattctctcaagatcggaatggtgaagcacgttgaagtagcacagtttctcggaggacgactttacgactgtgtctttaaattcaatgaagttcagagttaattacatttcaatgatattgtactgaatcatccattcgatatatcattttatc

SEQ ID NO: 99214 - protein, 378 aa, Arabidopsis thaliana
  peptide (1)..(378): Ceres Seq. ID no. 13602420
  misc_feature (58)..(373): Pfam Name: Protein of unknown function DUF89 Pfam Description: Protein of unknown function DUF89
  misc_feature (18)..(184): Homolog of NCBI NO: 15227811 NR Description: expressed protein [Arabidopsis thaliana]
  misc_feature (274)..(378): Homolog of NCBI NO: 15227811 NR Description: expressed protein [Arabidopsis thaliana]
  misc_feature (175)..(234): Homolog of NCBI NO: 15227811 NR Description: expressed protein [Arabidopsis thaliana]
  misc_feature (15)..(378): Homolog of NCBI NO: 21554574 NR Description: unknown [Arabidopsis thaliana]
  misc_feature (15)..(378): Homolog of NCBI NO: 18398388 NR Description: expressed protein [Arabidopsis thaliana] unknown protein [Arabidopsis thaliana]
  misc_feature (15)..(377): Homolog of NCBI NO: 21554145 NR Description: unknown [Arabidopsis thaliana]
  misc_feature (15)..(377): Homolog of NCBI NO: 18418688 NR Description: expressed protein [Arabidopsis thaliana] unknown protein [Arabidopsis thaliana]
  misc_feature (15)..(178): Homolog of NCBI NO: 25370535 NR Description: hypothetical protein At2g17340 [imported] -
  misc_feature (254)..(378): Homolog of NCBI NO: 25370535 NR Description: hypothetical protein At2g17340 [imported] -
  misc_feature (113)..(349): Homolog of NCBI NO: 7486028 NR Description: hypothetical protein F23E12.80 - Arabidopsis >gi|3080414|emb|CAA18733.1| putative protein [Arabidopsis >gi|7270488|emb|CAB80253.1| putative protein [Arabidopsis
TRPGSIRHSFFVVINSEMIPFPLLPTPIETNYRACTIPYRFPSDNLKKATPTEISWINVFANSIPSFKKRAESDTSVPDAPARAKIFEQRYAGFLEGWKKDPESNGGPPDGVILGRVREHLLRELGFRDIFKKVKDEENAKAISLFPEVVSLSDAIEDDGERLENLVRGIFAGNIFDLGSAQLAEVFSRDGISFLATSQNLVPRPWVIDDLNKFQAKWVKKPWKKAVIFVDNSGADIILGILPFARELLRRGIQVVLAANELPAINDVTYTELTDIVSQLKDGNGQLIGVDTSKLLIANSGNDLAVIDLSRVSHELAYLSSDADLVILEGMGRGIETNLYAQFKCDSLKIGMVKHVEVAQFLGGRLYDCVFKFNEVQS

SEQ ID NO: 99215 - protein, 361 aa, Arabidopsis thaliana
  peptide (1)..(361): Ceres Seq. ID no. 13602421
  misc_feature (41)..(356): Pfam Name: Protein of unknown function DUF89 Pfam Description: Protein of unknown function DUF89
  misc_feature (1)..(167): Homolog of NCBI NO: 15227811 NR Description: expressed protein [Arabidopsis thaliana]
  misc_feature (257)..(361): Homolog of NCBI NO: 15227811 NR Description: expressed protein [Arabidopsis thaliana]
  misc_feature (158)..(217): Homolog of NCBI NO: 15227811 NR Description: expressed protein [Arabidopsis thaliana]
  misc_feature (1)..(361): Homolog of NCBI NO: 21554574 NR Description: unknown [Arabidopsis thaliana]
  misc_feature (1)..(361): Homolog of NCBI NO: 18398388 NR Description: expressed protein [Arabidopsis thaliana] unknown protein [Arabidopsis thaliana]
  misc_feature (1)..(360): Homolog of NCBI NO: 21554145 NR Description: unknown [Arabidopsis thaliana]
  misc_feature (1)..(360): Homolog of NCBI NO: 18418688 NR Description: expressed protein [Arabidopsis thaliana] unknown protein [Arabidopsis thaliana]
  misc_feature (1)..(161): Homolog of NCBI NO: 25370535 NR Description: hypothetical protein At2g17340 [imported] -
  misc_feature (237)..(361): Homolog of NCBI NO: 25370535 NR Description: hypothetical protein At2g17340 [imported] -
  misc_feature (96)..(332): Homolog of NCBI NO: 7486028 NR Description: hypothetical protein F23E12.80 - Arabidopsis >gi|3080414|emb|CAA18733.1| putative protein [Arabidopsis >gi|7270488|emb|CAB80253.1| putative protein [Arabidopsis
MIPFPLLPTPIETNYRACTIPYRFPSDNLKKATPTEISWINVFANSIPSFKKRAESDTSVPDAPARAKIFEQRYAGFLEGWKKDPESNGGPPDGVILGRVREHLLRELGFRDIFKKVKDEENAKAISLFPEVVSLSDAIEDDGERLENLVRGIFAGNIFDLGSAQLAEVFSRDGISFLATSQNLVPRPWVIDDLNKFQAKWVKKPWKKAVIFVDNSGADIILGILPFARELLRRGIQVVLAANELPAINDVTYTELTDIVSQLKDGNGQLIGVDTSKLLIANSGNDLAVIDLSRVSHELAYLSSDADLVILEGMGRGIETNLYAQFKCDSLKIGMVKHVEVAQFLGGRLYDCVFKFNEVQS

SEQ ID NO: 99216 - DNA, 1332 bp, Arabidopsis thaliana
  misc_feature (1)..(1332): Ceres Seq. ID no. 13602422
  misc_feature: MA Experiment ID: 108462 Result: Up-regulated in Transcription
  misc_feature: MA Experiment 108462 PARAMETER Experiment Name: At_Germinating_Seeds_cDNA_P Parameter: Age (day) Value: 2 vs. 0
  misc_feature: MA Experiment 108462 PARAMETER Experiment Name: At_Germinating_Seeds_cDNA_P Parameter: Tissue Value: Germinating Seeds
  misc_feature: MA Experiment ID: 108463 Result: Up-regulated in Transcription
  misc_feature: MA Experiment 108463 PARAMETER Experiment Name: At_Germinating_Seeds_cDNA_P Parameter: Age (day) Value: 3 vs. 0
  misc_feature: MA Experiment 108463 PARAMETER Experiment Name: At_Germinating_Seeds_cDNA_P Parameter: Tissue Value: Germinating Seeds
  misc_feature: MA Experiment ID: 108464 Result: Up-regulated in Transcription
  misc_feature: MA Experiment 108464 PARAMETER Experiment Name: At_Germinating_Seeds_cDNA_P Parameter: Age (day) Value: 4 vs. 0
  misc_feature: MA Experiment 108464 PARAMETER Experiment Name: At_Germinating_Seeds_cDNA_P Parameter: Tissue Value: Germinating Seeds
  misc_feature: MA Experiment ID: 108579 Result: Up-regulated in Transcription
  misc_feature: MA Experiment 108579 PARAMETER Experiment Name: At_4deg_Cold_cDNA_P Parameter: Temperature (deg C) Value: 4 vs. 22
  misc_feature: MA Experiment 108579 PARAMETER Experiment Name: At_4deg_Cold_cDNA_P Parameter: Timepoint (hr) Value: 6
  misc_feature: MA Experiment 108579 PARAMETER Experiment Name: At_4deg_Cold_cDNA_P Parameter: Tissue Value: Aerial
  misc_feature: MA Experiment ID: 20000180 Result: Up-regulated in Transcription
  misc_feature: MA Experiment 20000180 PARAMETER Experiment Name: At_Germinating_Seeds_P Parameter: Age (hr) Value: 24 vs. 0
  misc_feature: MA Experiment 20000180 PARAMETER Experiment Name: At_Germinating_Seeds_P Parameter: Tissue Value: Germinating Seeds
  misc_feature: MA Experiment ID: 20000495 Result: Down-regulated in Transcription
  misc_feature: MA Experiment 20000495 PARAMETER Experiment Name: At_Guard_Cells_P Parameter: Harvest Date Value: 8/2/2002
  misc_feature: MA Experiment 20000495 PARAMETER Experiment Name: At_Guard_Cells_P Parameter: Organism Value: A. thaliana
  misc_feature: MA Experiment 20000495 PARAMETER Experiment Name: At_Guard_Cells_P Parameter: Tissue Value: Guard Cells vs. Leaves
  misc_feature: MA Experiment ID: 20000573 Result: Down-regulated in Transcription
  misc_feature: MA Experiment 20000573 PARAMETER Experiment Name: At_100uM_ABA_Mutants__P Parameter: Organism Value: A. thaliana
  misc_feature: MA Experiment 20000573 PARAMETER Experiment Name: At_100uM_ABA_Mutants__P Parameter: Plant Line Value: CS22 vs. Ler wt
  misc_feature: MA Experiment 20000573 PARAMETER Experiment Name: At_100uM_ABA_Mutants__P Parameter: Timepoint (hr) Value: N/A
  misc_feature: MA Experiment 20000573 PARAMETER Experiment Name: At_100uM_ABA_Mutants__P Parameter: Tissue Value: Whole Plant
  misc_feature: MA Experiment 20000573 PARAMETER Experiment Name: At_100uM_ABA_Mutants__P Parameter: Treatment Value: None
  misc_feature: MA Experiment ID: 20000794 Result: Up-regulated in Transcription
  misc_feature: MA Experiment 20000794 PARAMETER Experiment Name: At_Petals_P Parameter: Age (day) Value: 23-25 days
  misc_feature: MA Experiment 20000794 PARAMETER Experiment Name: At_Petals_P Parameter: Plant Line Value: WS
  misc_feature: MA Experiment 20000794 PARAMETER Experiment Name: At_Petals_P Parameter: Tissue Value: Petals vs. Whole plant
  misc_feature: MA Experiment ID: 20001248 Result: Down-regulated in Transcription
  misc_feature: MA Experiment 20001248 PARAMETER Experiment Name: At_Far-red-induction_P Parameter: Age (day) Value: 7
  misc_feature: MA Experiment 20001248 PARAMETER Experiment Name: At_Far-red-induction_P Parameter: Light Value: Far-red vs. White
  misc_feature: MA Experiment 20001248 PARAMETER Experiment Name: At_Far-red-induction_P Parameter: Organism Value: A. thaliana
  misc_feature: MA Experiment 20001248 PARAMETER Experiment Name: At_Far-red-induction_P Parameter: Plant Line Value: Columbia
  misc_feature: MA Experiment 20001248 PARAMETER Experiment Name: At_Far-red-induction_P Parameter: Timepoint (hr) Value: 4
  misc_feature: MA Experiment 20001248 PARAMETER Experiment Name: At_Far-red-induction_P Parameter: Tissue Value: Whole Plant
  misc_feature: MA Experiment ID: 20001450 Result: Down-regulated in Transcription
  misc_feature: MA Experiment 20001450 PARAMETER Experiment Name: At_Far-red-induction_P Parameter: Age (day) Value: 7
  misc_feature: MA Experiment 20001450 PARAMETER Experiment Name: At_Far-red-induction_P Parameter: Light Value: Far-red vs. White
  misc_feature: MA Experiment 20001450 PARAMETER Experiment Name: At_Far-red-induction_P Parameter: Organism Value: A. thaliana
  misc_feature: MA Experiment 20001450 PARAMETER Experiment Name: At_Far-red-induction_P Parameter: Plant Line Value: Columbia
  misc_feature: MA Experiment 20001450 PARAMETER Experiment Name: At_Far-red-induction_P Parameter: Timepoint (hr) Value: 8
  misc_feature: MA Experiment 20001450 PARAMETER Experiment Name: At_Far-red-induction_P Parameter: Tissue Value: Whole Plant
  misc_feature: MA Experiment ID: 20001451 Result: Down-regulated in Transcription
  misc_feature: MA Experiment 20001451 PARAMETER Experiment Name: At_Far-red-induction_P Parameter: Age (day) Value: 7
  misc_feature: MA Experiment 20001451 PARAMETER Experiment Name: At_Far-red-induction_P Parameter: Light Value: Far-red vs. White
  misc_feature: MA Experiment 20001451 PARAMETER Experiment Name: At_Far-red-induction_P Parameter: Organism Value: A. thaliana
  misc_feature: MA Experiment 20001451 PARAMETER Experiment Name: At_Far-red-induction_P Parameter: Plant Line Value: Columbia
  misc_feature: MA Experiment 20001451 PARAMETER Experiment Name: At_Far-red-induction_P Parameter: Timepoint (hr) Value: 24
  misc_feature: MA Experiment 20001451 PARAMETER Experiment Name: At_Far-red-induction_P Parameter: Tissue Value: Whole Plant
ctgaagatcatcacaagcaaagaaaatggagagcgattcagagatggttccgtttcctcaactaccgatgccaatagaaaacaactacagagcttgcacaattccttacagatttccttctgatgatcccaagaaagccactccaaatgaaatctcgtggatcaacgtcttcgccaattccattccttctttcaagaaacgtgcagagagcgatatcactgttccagatgctcctgctagagctgaaaaatttgcagaaagatatgctgggattcttgaagacttgaagaaagatccagagagtcatggcggaccaccagatggcattcttctatgccgacttcgtgagcaagtactcagagagttaggatttagggacatattcaagaaagttaaggatgaggagaatgcaaaggctatatcactatttcctcaagttgtcagtctgagtgatgctattgaagatgacggaaaacggttagagaatttggtgagagggatatttgctggaaacatctttgatcttggttctgcacagcttgctgaagttttctcaagggatggtatgtctttcttggctagctgtcaaaacttggttccacgaccatgggtcattgatgacttggaaaacttccaagccaaatggatcaataagtcttggaagaaggcagtgatttttgttgataattctggtgcagacataattttgggtattttgccgtttgcaagagagttgctccgtcgaggagctcaggtggtgctggctgctaatgagctgccatctatcaatgacataacatgtaccgagcttacagaaatcttgtcacagttgaaggatgaaaatggccaattgctaggtgttgatacttcgaagcttctgattgcaaattcggggaatgacttaccagttatcgatctctcaagagtatcacaggagcttgcttacctttcatctgatgccgacttagtcatcgtagaaggcatgggtcgtggaattgagacaaacctttatgctcagttcaagtgtgattctctcaagattggaatggtgaagcatcttgaagtagcagagtttctcggaggacggctctatgactgtgtcttcaaattcaatgaagttcagagctaattagtatttcagtactctccagtctcacttctctcttactgtcatttttaattcaaaacatagggtacaaaaagtaatatttttccatcttgatatggtaaatcaatttgaaacaaaaatatttattcgtttgtgatggactgatggataaaatggaaaccataactaaaccaactatatacactctaataaagggacttgtt

SEQ ID NO: 99217 - protein, 367 aa, Arabidopsis thaliana; identical to SEQ ID NO: 26365
  peptide (1)..(367): Ceres Seq. ID no. 13602423
  misc_feature (47)..(362): Pfam Name: Protein of unknown function DUF89 Pfam Description: Protein of unknown function DUF89
  misc_feature (1)..(367): Homolog of NCBI NO: 18398388 NR Description: expressed protein [Arabidopsis thaliana] unknown protein [Arabidopsis thaliana]
  misc_feature (1)..(367): Homolog of NCBI NO: 21554574 NR Description: unknown [Arabidopsis thaliana]
  misc_feature (1)..(366): Homolog of NCBI NO: 21554145 NR Description: unknown [Arabidopsis thaliana]
  misc_feature (1)..(366): Homolog of NCBI NO: 18418688 NR Description: expressed protein [Arabidopsis thaliana] unknown protein [Arabidopsis thaliana]
  misc_feature (1)..(167): Homolog of NCBI NO: 25370535 NR Description: hypothetical protein At2g17340 [imported] -
  misc_feature (243)..(367): Homolog of NCBI NO: 25370535 NR Description: hypothetical protein At2g17340 [imported] -
  misc_feature (7)..(173): Homolog of NCBI NO: 15227811 NR Description: expressed protein [Arabidopsis thaliana]
  misc_feature (263)..(367): Homolog of NCBI NO: 15227811 NR Description: expressed protein [Arabidopsis thaliana]
  misc_feature (164)..(223): Homolog of NCBI NO: 15227811 NR Description: expressed protein [Arabidopsis thaliana]
  misc_feature (7)..(171): Homolog of NCBI NO: 7486028 NR Description: hypothetical protein F23E12.80 - Arabidopsis >gi|3080414|emb|CAA18733.1| putative protein [Arabidopsis >gi|7270488|emb|CAB80253.1| putative protein [Arabidopsis

SEQ ID NO: 99218 - protein, 361 aa, Arabidopsis thaliana; identical to SEQ ID NO: 26366
  peptide (1)..(361): Ceres Seq. ID no. 13602424
  misc_feature (41)..(356): Pfam Name: Protein of unknown function DUF89 Pfam Description: Protein of unknown function DUF89
  misc_feature (1)..(361): Homolog of NCBI NO: 18398388 NR Description: expressed protein [Arabidopsis thaliana] unknown protein [Arabidopsis thaliana]
  misc_feature (1)..(361): Homolog of NCBI NO: 21554574 NR Description: unknown [Arabidopsis thaliana]
  misc_feature (1)..(360): Homolog of NCBI NO: 21554145 NR Description: unknown [Arabidopsis thaliana]
  misc_feature (1)..(360): Homolog of NCBI NO: 18418688 NR Description: expressed protein [Arabidopsis thaliana] unknown protein [Arabidopsis thaliana]
  misc_feature (1)..(161): Homolog of NCBI NO: 25370535 NR Description: hypothetical protein At2g17340 [imported] -
  misc_feature (237)..(361): Homolog of NCBI NO: 25370535 NR Description: hypothetical protein At2g17340 [imported] -
  misc_feature (1)..(167): Homolog of NCBI NO: 15227811 NR Description: expressed protein [Arabidopsis thaliana]
  misc_feature (257)..(361): Homolog of NCBI NO: 15227811 NR Description: expressed protein [Arabidopsis thaliana]
  misc_feature (158)..(217): Homolog of NCBI NO: 15227811 NR Description: expressed protein [Arabidopsis thaliana]
  misc_feature (1)..(165): Homolog of NCBI NO: 7486028 NR Description: hypothetical protein F23E12.80 - Arabidopsis >gi|3080414|emb|CAA18733.1| putative protein [Arabidopsis >gi|7270488|emb|CAB80253.1| putative protein [Arabidopsis

SEQ ID NO: 99219 - protein, 353 aa, Arabidopsis thaliana
  peptide (1)..(353): Ceres Seq. ID no. 13602425
  misc_feature (33)..(348): Pfam Name: Protein of unknown function DUF89 Pfam Description: Protein of unknown function DUF89
  misc_feature (1)..(353): Homolog of NCBI NO: 18398388 NR Description: expressed protein [Arabidopsis thaliana] unknown protein [Arabidopsis thaliana]
  misc_feature (1)..(353): Homolog of NCBI NO: 21554574 NR Description: unknown [Arabidopsis thaliana]
  misc_feature (1)..(352): Homolog of NCBI NO: 21554145 NR Description: unknown [Arabidopsis thaliana]
  misc_feature (1)..(352): Homolog of NCBI NO: 18418688 NR Description: expressed protein [Arabidopsis thaliana] unknown protein [Arabidopsis thaliana]
  misc_feature (1)..(153): Homolog of NCBI NO: 25370535 NR Description: hypothetical protein At2g17340 [imported] -
  misc_feature (229)..(353): Homolog of NCBI NO: 25370535 NR Description: hypothetical protein At2g17340 [imported] -
  misc_feature (1)..(159): Homolog of NCBI NO: 15227811 NR Description: expressed protein [Arabidopsis thaliana]
  misc_feature (249)..(353): Homolog of NCBI NO: 15227811 NR Description: expressed protein [Arabidopsis thaliana]
  misc_feature (150)..(209): Homolog of NCBI NO: 15227811 NR Description: expressed protein [Arabidopsis thaliana]
  misc_feature (1)..(157): Homolog of NCBI NO: 7486028 NR Description: hypothetical protein F23E12.80 - Arabidopsis >gi|3080414|emb|CAA18733.1| putative protein [Arabidopsis >gi|7270488|emb|CAB80253.1| putative protein [Arabidopsis
MPIENNYRACTIPYRFPSDDPKKATPNEISWINVFANSIPSFKKRAESDITVPDAPARAEKFAERYAGILEDLKKDPESHGGPPDGILLCRLREQVLRELGFRDIFKKVKDEENAKAISLFPQVVSLSDAIEDDGKRLENLVRGIFAGNIFDLGSAQLAEVFSRDGMSFLASCQNLVPRPWVIDDLENFQAKWINKSWKKAVIFVDNSGADIILGILPFARELLRRGAQVVLAANELPSINDITCTELTEILSQLKDENGQLLGVDTSKLLIANSGNDLPVIDLSRVSQELAYLSSDADLVIVEGMGRGIETNLYAQFKCDSLKIGMVKHLEVAEFLGGRLYDCVFKFNEVQS

SEQ ID NO: 99220 - DNA, 1847 bp, Arabidopsis thaliana
  misc_feature (1)..(1847): Ceres Seq. ID no. 13602430
  misc_feature: MA Experiment ID: 108579 Result: Up-regulated in Transcription
  misc_feature: MA Experiment 108579 PARAMETER Experiment Name: At_4deg_Cold_cDNA_P Parameter: Temperature (deg C) Value: 4 vs. 22
  misc_feature: MA Experiment 108579 PARAMETER Experiment Name: At_4deg_Cold_cDNA_P Parameter: Timepoint (hr) Value: 6
  misc_feature: MA Experiment 108579 PARAMETER Experiment Name: At_4deg_Cold_cDNA_P Parameter: Tissue Value: Aerial
  misc_feature: MA Experiment ID: 108607 Result: Up-regulated in Transcription
  misc_feature: MA Experiment 108607 PARAMETER Experiment Name: At_100uM_ABA_cDNA_P Parameter: Timepoint (hr) Value: 4
  misc_feature: MA Experiment 108607 PARAMETER Experiment Name: At_100uM_ABA_cDNA_P Parameter: Tissue Value: Aerial
  misc_feature: MA Experiment 108607 PARAMETER Experiment Name: At_100uM_ABA_cDNA_P Parameter: Treatment Value: 100uM ABA vs. No Treatment
  misc_feature: MA Experiment ID: 20000112 Result: Up-regulated in Transcription
  misc_feature: MA Experiment 20000112 PARAMETER Experiment Name: At_42deg_Heat_cDNA_P Parameter: Temperature (deg C) Value: 42 vs. 22
  misc_feature: MA Experiment 20000112 PARAMETER Experiment Name: At_42deg_Heat_cDNA_P Parameter: Timepoint (hr) Value: 2
  misc_feature: MA Experiment 20000112 PARAMETER Experiment Name: At_42deg_Heat_cDNA_P Parameter: Tissue Value: Aerial
  misc_feature: MA Experiment ID: 20000182 Result: Up-regulated in Transcription
  misc_feature: MA Experiment 20000182 PARAMETER Experiment Name: At_2mM_SA_P Parameter: Age (day) Value: 14
  misc_feature: MA Experiment 20000182 PARAMETER Experiment Name: At_2mM_SA_P Parameter: Organism Value: A. thaliana
  misc_feature: MA Experiment 20000182 PARAMETER Experiment Name: At_2mM_SA_P Parameter: Plant Line Value: WS
  misc_feature: MA Experiment 20000182 PARAMETER Experiment Name: At_2mM_SA_P Parameter: Timepoint (hr) Value: 6
  misc_feature: MA Experiment 20000182 PARAMETER Experiment Name: At_2mM_SA_P Parameter: Tissue Value: Aerial
  misc_feature: MA Experiment 20000182 PARAMETER Experiment Name: At_2mM_SA_P Parameter: Treatment Value: 2mM SA vs. No Treatment
  misc_feature: MA Experiment ID: 20000184 Result: Up-regulated in Transcription
  misc_feature: MA Experiment 20000184 PARAMETER Experiment Name: At_Shoots__P Parameter: Age (day) Value: 7
  misc_feature: MA Experiment 20000184 PARAMETER Experiment Name: At_Shoots__P Parameter: Tissue Value: Shoots vs. Whole Plant
  misc_feature: MA Experiment ID: 20000185 Result: Up-regulated in Transcription
  misc_feature: MA Experiment 20000185 PARAMETER Experiment Name: At_Roots__P Parameter: Age (day) Value: 7 vs. 21
  misc_feature: MA Experiment 20000185 PARAMETER Experiment Name: At_Roots__P Parameter: Organism Value: A. thaliana
  misc_feature: MA Experiment 20000185 PARAMETER Experiment Name: At_Roots__P Parameter: Tissue Value: Roots vs. Whole Plant
  misc_feature: MA Experiment ID: 20000235 Result: Up-regulated in Transcription
  misc_feature: MA Experiment 20000235 PARAMETER Experiment Name: At_Siliques_P Parameter: Age (day) Value: 21
  misc_feature: MA Experiment 20000235 PARAMETER Experiment Name: At_Siliques_P Parameter: Organism Value: A. thaliana
  misc_feature: MA Experiment 20000235 PARAMETER Experiment Name: At_Siliques_P Parameter: Plant Line Value: WS
  misc_feature: MA Experiment 20000235 PARAMETER Experiment Name: At_Siliques_P Parameter: Tissue Value: 5-10mm Siliques vs. Whole Plant
  misc_feature: MA Experiment ID: 20000264 Result: Up-regulated in Transcription
  misc_feature: MA Experiment 20000264 PARAMETER Experiment Name: At_Open_Flower_P Parameter: Age (day) Value: 21
  misc_feature: MA Experiment 20000264 PARAMETER Experiment Name: At_Open_Flower_P Parameter: Plant Line Value: WS
  misc_feature: MA Experiment 20000264 PARAMETER Experiment Name: At_Open_Flower_P Parameter: Tissue Value: Open Flower vs. Whole Plant
  misc_feature: MA Experiment ID: 20000286 Result: Up-regulated in Transcription
  misc_feature: MA Experiment 20000286 PARAMETER Experiment Name: At_Open_Flower_P Parameter: Age (day) Value: 21
  misc_feature: MA Experiment 20000286 PARAMETER Experiment Name: At_Open_Flower_P Parameter: Plant Line Value: WS
  misc_feature: MA Experiment 20000286 PARAMETER Experiment Name: At_Open_Flower_P Parameter: Tissue Value: Half Open vs. Whole Plant
  misc_feature: MA Experiment ID: 20000439 Result: Up-regulated in Transcription
  misc_feature: MA Experiment 20000439 PARAMETER Experiment Name: At_Roots__P Parameter: Age (day) Value: 14 vs. 21
  misc_feature: MA Experiment 20000439 PARAMETER Experiment Name: At_Roots__P Parameter: Organism Value: A. thaliana
  misc_feature: MA Experiment 20000439 PARAMETER Experiment Name: At_Roots__P Parameter: Tissue Value: Roots vs. Whole Plant
  misc_feature: MA Experiment ID: 20000794 Result: Up-regulated in Transcription
  misc_feature: MA Experiment 20000794 PARAMETER Experiment Name: At_Petals_P Parameter: Age (day) Value: 23-25 days
  misc_feature: MA Experiment 20000794 PARAMETER Experiment Name: At_Petals_P Parameter: Plant Line Value: WS
  misc_feature: MA Experiment 20000794 PARAMETER Experiment Name: At_Petals_P Parameter: Tissue Value: Petals vs. Whole plant
  misc_feature: MA Experiment ID: 20001248 Result: Down-regulated in Transcription
  misc_feature: MA Experiment 20001248 PARAMETER Experiment Name: At_Far-red-induction_P Parameter: Age (day) Value: 7
  misc_feature: MA Experiment 20001248 PARAMETER Experiment Name: At_Far-red-induction_P Parameter: Light Value: Far-red vs. White
  misc_feature: MA Experiment 20001248 PARAMETER Experiment Name: At_Far-red-induction_P Parameter: Organism Value: A. thaliana
  misc_feature: MA Experiment 20001248 PARAMETER Experiment Name: At_Far-red-induction_P Parameter: Plant Line Value: Columbia
  misc_feature: MA Experiment 20001248 PARAMETER Experiment Name: At_Far-red-induction_P Parameter: Timepoint (hr) Value: 4
  misc_feature: MA Experiment 20001248 PARAMETER Experiment Name: At_Far-red-induction_P Parameter: Tissue Value: Whole Plant
  misc_feature: MA Experiment ID: 20001757 Result: Down-regulated in Transcription
  misc_feature: MA Experiment 20001757 PARAMETER Experiment Name: At_50mM_NH4NO3_L-to-H_P Parameter: Timepoint (hr) Value: 6
  misc_feature: MA Experiment 20001757 PARAMETER Experiment Name: At_50mM_NH4NO3_L-to-H_P Parameter: Tissue Value: Leaf
  misc_feature: MA Experiment 20001757 PARAMETER Experiment Name: At_50mM_NH4NO3_L-to-H_P Parameter: Treatment Value: 50mM NH4NO3 vs 100mM Mannitol
ctcttgatcttttagtgttcttgctttgtcgcttcaacgcttaaggtaacactgcttcttctttgatattcgcgattcatcgaacgatttcatcattatagacaaacatcctatcgatcggtttggatttgtgtgagtctgcataatcatggcgaggaagatgcttgttgatggtgagattgataaggtggcggctgatgaagccaacgcgacgcactatgattttgatttgtttgtcatcggtgccgggagtggcggtgttcgtgctgctaggttttcggctaatcatggcgctaaggttggtatttgtgagcttccatttcaccctattagctctgaggagattggaggcgttggtggaacctgtgttatccgtggttgtgttcctaaaaagattctcgtctatggagctacttacggtggtgaacttgaggatgctaaaaattatgggtgggaaataaatgagaaagtcgacttcacatggaagaagcttttgcaaaagaagactgatgagatactaagactgaataatatctacaagcggttattggcaaatgctgcggtgaaattgtatgaaggtgaaggaagagtagttggtcccaacgaagtggaggtgagacaaatagatggcacaaaaataagttataccgcaaagcacatattgattgccactggcagtcgggcgcaaaagcctaatattcctggacatgagctggctattacatctgatgaagctttgagcttggaagaatttcccaagcgtgctatagtgcttggaggagggtatattgctgtggagtttgcatcaatatggcgtggaatgggtgctactgtagatttattcttcaggaaggaacttccgctaaggggttttgatgacgaaatgagggcactagttgctagaaatcttgaaggaaggggcgttaatctgcatccacaaacaagtttgactcagttgacaaaaacagaccaggggatcaaagtcatatcgtcccatggggaggaattcgtggcagatgtcgtcctatttgctactggcagaagtcctaataccaaaagattgaatttagaagctgttggtgttgaacttgatcaggctggagctgtgaaggttgacgagtattcacgaactaatatacctagcatatgggctgtaggagatgccacaaaccgaattaaccttacacctgttgcgttaatggaggccacctgttttgcgaacactgcttttggtggaaagcctactaaagcagaatacagcaatgtcgcctgtgctgtattttgcataccaccactagctgtagtgggtctcagcgaagaagaagcagtagaacaagcaaccggtgatattctggtcttcacctcaggctttaatccaatgaagaacaccatttctggacgccaggaaaagacattgatgaagctaatagttgatgagaagagtgataaggttattggagcatccatgtgcggtcctgatgcagctgagatcatgcaggggattgcaattgcgctcaagtgtggagcaaccaaagcacaatttgatagcacggttgggatacatccatcttctgcagaggaatttgtgacaatgcgcagtgtgaccagacgcattgcccacaaacccaaacctaagacaaatctatgaaccgcaaaatataaagagctatatagcatgaaaactcggtacacttaatttgatcaaagagtcagacaacgatgagtttaatcatactcgtgtcccaataaaggatttgtaatttttgtttgtttgtatgatgcttctcttcttacttacttgagaaaacatcaaggtttcttctcttattgcttagtggaactttatt

SEQ ID NO: 99221 - protein, 499 aa, Arabidopsis thaliana; identical to SEQ ID NO: 24219
  peptide (1)..(499): Ceres Seq. ID no. 13602431
  misc_feature (27)..(348): Pfam Name: Pyridine nucleotide-disulphide oxidoreductase Pfam Description: Pyridine nucleotide-disulphide oxidoreductase
  misc_feature (1)..(499): Homolog of NCBI NO: 15230074 NR Description: glutathione reductase, putative [Arabidopsis >gi|1346194|sp|P48641|GSHR_ARATH Glutathione reductase, cytosolic (GRase) (OBP29) >gi|1022797|gb|AAB67841.1| glutathione reductase
  misc_feature (1)..(499): Homolog of NCBI NO: 13430632 NR Description: putative glutathione reductase [Arabidopsis >gi|14532810|gb|AAK64087.1| putative glutathione reductase
  misc_feature (1)..(499): Homolog of NCBI NO: 21263645 NR Description: Glutathione reductase, cytosolic (GR) (GRase) glutathione reductase [Brassica rapa]
  misc_feature (1)..(499): Homolog of NCBI NO: 7431864 NR Description: glutathione-disulfide reductase (EC 1.8.1.7) -
  misc_feature (12)..(499): Homolog of NCBI NO: 2500115 NR Description: Glutathione reductase, chloroplast precursor (GR)
  misc_feature (1)..(499): Homolog of NCBI NO: 2500116 NR Description: Glutathione reductase, cytosolic (GR) (GRase)
  misc_feature (17)..(469): Homolog of NCBI NO: 10862871 NR Description: glutathione reductase [Mesembryanthemum
  misc_feature (1)..(499): Homolog of NCBI NO: 19860133 NR Description: Glutathione reductase, cytosolic (GR) (GRase)
  misc_feature (1)..(499): Homolog of NCBI NO: 7431855 NR Description: probable glutathione-disulfide reductase (EC - rice >gi|1841894|dbj|BAA11214.1| Glutathione Reductase [Oryza
  misc_feature (61)..(418): Homolog of NCBI NO: 6723469 NR Description: glutathione reductase [Betula pendula]

SEQ ID NO: 99222 - protein, 495 aa, Arabidopsis thaliana; identical to SEQ ID NO: 24220
  peptide (1)..(495): Ceres Seq. ID no. 13602432
  misc_feature (23)..(344): Pfam Name: Pyridine nucleotide-disulphide oxidoreductase Pfam Description: Pyridine nucleotide-disulphide oxidoreductase
  misc_feature (1)..(495): Homolog of NCBI NO: 15230074 NR Description: glutathione reductase, putative [Arabidopsis >gi|1346194|sp|P48641|GSHR_ARATH Glutathione reductase, cytosolic (GRase) (OBP29) >gi|1022797|gb|AAB67841.1| glutathione reductase
  misc_feature (1)..(495): Homolog of NCBI NO: 13430632 NR Description: putative glutathione reductase [Arabidopsis >gi|14532810|gb|AAK64087.1| putative glutathione reductase
  misc_feature (1)..(495): Homolog of NCBI NO: 21263645 NR Description: Glutathione reductase, cytosolic (GR) (GRase) glutathione reductase [Brassica rapa]
  misc_feature (1)..(495): Homolog of NCBI NO: 7431864 NR Description: glutathione-disulfide reductase (EC 1.8.1.7) -
  misc_feature (8)..(495): Homolog of NCBI NO: 2500115 NR Description: Glutathione reductase, chloroplast precursor (GR)
  misc_feature (1)..(495): Homolog of NCBI NO: 2500116 NR Description: Glutathione reductase, cytosolic (GR) (GRase)
  misc_feature (13)..(465): Homolog of NCBI NO: 10862871 NR Description: glutathione reductase [Mesembryanthemum
  misc_feature (1)..(495): Homolog of NCBI NO: 19860133 NR Description: Glutathione reductase, cytosolic (GR) (GRase)
  misc_feature (1)..(495): Homolog of NCBI NO: 7431855 NR Description: probable glutathione-disulfide reductase (EC - rice >gi|1841894|dbj|BAA11214.1| Glutathione Reductase [Oryza
  misc_feature (57)..(414): Homolog of NCBI NO: 6723469 NR Description: glutathione reductase [Betula pendula]

SEQ ID NO: 99223 - protein, 275 aa, Arabidopsis thaliana; identical to SEQ ID NO: 24221
  peptide (1)..(275): Ceres Seq. ID no. 13602433
  misc_feature (1)..(124): Pfam Name: Pyridine nucleotide-disulphide oxidoreductase Pfam Description: Pyridine nucleotide-disulphide oxidoreductase
  misc_feature (1)..(275): Homolog of NCBI NO: 15230074 NR Description: glutathione reductase, putative [Arabidopsis >gi|1346194|sp|P48641|GSHR_ARATH Glutathione reductase, cytosolic (GRase) (OBP29) >gi|1022797|gb|AAB67841.1| glutathione reductase
  misc_feature (1)..(275): Homolog of NCBI NO: 13430632 NR Description: putative glutathione reductase [Arabidopsis >gi|14532810|gb|AAK64087.1| putative glutathione reductase
  misc_feature (1)..(275): Homolog of NCBI NO: 21263645 NR Description: Glutathione reductase, cytosolic (GR) (GRase) glutathione reductase [Brassica rapa]
  misc_feature (1)..(275): Homolog of NCBI NO: 7431864 NR Description: glutathione-disulfide reductase (EC 1.8.1.7) -
  misc_feature (1)..(275): Homolog of NCBI NO: 2500115 NR Description: Glutathione reductase, chloroplast precursor (GR)
  misc_feature (1)..(275): Homolog of NCBI NO: 2500116 NR Description: Glutathione reductase, cytosolic (GR) (GRase)
  misc_feature (1)..(245): Homolog of NCBI NO: 10862871 NR Description: glutathione reductase [Mesembryanthemum
  misc_feature (1)..(275): Homolog of NCBI NO: 19860133 NR Description: Glutathione reductase, cytosolic (GR) (GRase)
  misc_feature (1)..(275): Homolog of NCBI NO: 7431855 NR Description: probable glutathione-disulfide reductase (EC - rice >gi|1841894|dbj|BAA11214.1| Glutathione Reductase [Oryza
  misc_feature (1)..(194): Homolog of NCBI NO: 6723469 NR Description: glutathione reductase [Betula pendula]

SEQ ID NO: 99224 - DNA, 1430 bp, Arabidopsis thaliana
  misc_feature (1)..(1430): Ceres Seq. ID no. 13602438
  misc_feature: MA Experiment ID: 108434 Result: Up-regulated in Transcription
  misc_feature: MA Experiment 108434 PARAMETER Experiment Name: At_Root_Tips_cDNA_P Parameter: Tissue Value: Root Tips
  misc_feature: MA Experiment ID: 108573 Result: Up-regulated in Transcription
  misc_feature: MA Experiment 108573 PARAMETER Experiment Name: At_Drought_cDNA_P Parameter: Timepoint (hr) Value: 6
  misc_feature: MA Experiment 108573 PARAMETER Experiment Name: At_Drought_cDNA_P Parameter: Tissue Value: Aerial
  misc_feature: MA Experiment 108573 PARAMETER Experiment Name: At_Drought_cDNA_P Parameter: Treatment Value: Drought vs. No Drought
  misc_feature: MA Experiment ID: 20000224 Result: Down-regulated in Transcription
taaaaagtttgaactttccgtcgaatcaaatgggaagcggaagatatctagacgaccctttaacatttactagaaacccaccttcctcgtcgtctccaatcaccgaatctagctttctcgcagaatcgatctctcgctctggtagcttcgagagtgggagcttacgaggaggcgatggtgattgctttagcgacgtcgatttcgcacttgataaactcgctgggactgtacagttctacgagaggcatgtcttcttgtgctacaaaaaaccatccgtttggcctgcgaggatcgaagcttctgagtttgatcggttaccgaggcttctctcctccgttatatcggcgaggaagagtagtatgaagaaagagactttactcacaatatgtgagggacatgatggttcagagacatcaaatggggatgttctgatatttccagatatgatcagatacagaaggttgactcattttgatgtggacacatttgttgaggaggtgcttgtgaagggtgttgagtggttgcctggaaatcctgaatctcttagtagttcatatgtctttgtatgttgtcatggatctcgagaccggcgatgtggggtttgtggaccttctctagttagtcgattcagagaagaaattgactcgtgtggtcttcgaggtgaagtttcagtcagcccttgttctcacattggtggtcacaaatacactggagatgttatcatctatggattaaatatcaaccagagagtcacaggacactggtatggatgtgtgactctagaggatgttcctcttttgttggagcaacacattaacaaaggcgaaattgtagaccggctttggaggggtgaaatgggtctgccagaagaagatcagaagaaaactcaagaacaaaggttacaattaaacagcgaaaagatcagcaacagagaggtgactcaagaatcagttaataatagtatctgttgccagtctcgagctgtcccagagctgaacggtagtggttgccaacaaaatgggaactcctcttactgtctggaggagattcacacagagaaaaatacctcggagagagtaacctctgtaaaaaatgcatctcttcggataggaagcagcgagaatggatcttctggtggattcaaggtttgtgcggtgatgtcaatgtggttggagacttgggagagagaagatacatatgctgctttagctgttgcttgtgctgctgcatctgtggctattgcttataactgctataaacaattgaaatgaagctatgtgttttatatttagcttctatgcaatggtaattatctcagtctttagattagttgtttcctcttcgtctgtacagagttagaagagggttttaactcttaagtaagaactgcttgttgataacatatgattattatatatccatttgtaagt

SEQ ID NO: 99225 - protein, 422 aa, Arabidopsis thaliana
  peptide (1)..(422): Ceres Seq. ID no. 13602439
  misc_feature (10)..(422): Homolog of NCBI NO: 15241075 NR Description: sucrose cleavage protein-related [Arabidopsis
  misc_feature (10)..(348): Homolog of NCBI NO: 18416788 NR Description: sucrase-related protein [Arabidopsis thaliana]
  misc_feature (10)..(348): Homolog of NCBI NO: 16604384 NR Description: AT4g26620/T15N24_70 [Arabidopsis thaliana]
  misc_feature (10)..(227): Homolog of NCBI NO: 7488353 NR Description: sucrose cleavage protein homolog T15N24.70 -
  misc_feature (282)..(421): Homolog of NCBI NO: 7488353 NR Description: sucrose cleavage protein homolog T15N24.70 -
  misc_feature (71)..(327): Homolog of NCBI NO: 1086252 NR Description: sucrose cleavage protein - potato
  misc_feature (72)..(349): Homolog of NCBI NO: 11994184 NR Description: sucrose cleavage protein-like [Arabidopsis
  misc_feature (72)..(349): Homolog of NCBI NO: 30688845 NR Description: sucrose cleavage protein -related [Arabidopsis
  misc_feature (72)..(349): Homolog of NCBI NO: 16604338 NR Description: AT3g27570/MMJ24_12 [Arabidopsis thaliana]
  misc_feature (72)..(339): Homolog of NCBI NO: 21553503 NR Description: sucrose cleavage protein-like [Arabidopsis
KSLNFPSNQMGSGRYLDDPLTFTRNPPSSSSPITESSFLAESISRSGSFESGSLRGGDGDCFSDVDFALDKLAGTVQFYERHVFLCYKKPSVWPARIEASEFDRLPRLLSSVISARKSSMKKETLLTICEGHDGSETSNGDVLIFPDMIRYRRLTHFDVDTFVEEVLVKGVEWLPGNPESLSSSYVFVCCHGSRDRRCGVCGPSLVSRFREEIDSCGLRGEVSVSPCSHIGGHKYTGDVIIYGLNINQRVTGHWYGCVTLEDVPLLLEQHINKGEIVDRLWRGEMGLPEEDQKKTQEQRLQLNSEKISNREVTQESVNNSICCQSRAVPELNGSGCQQNGNSSYCLEEIHTEKNTSERVTSVKNASLRIGSSENGSSGGFKVCAVMSMWLETWEREDTYAALAVACAAASVAIAYNCYKQLK

SEQ ID NO: 99226 - protein, 413 aa, Arabidopsis thaliana
  peptide (1)..(413): Ceres Seq. ID no. 13602440
  misc_feature (1)..(413): Homolog of NCBI NO: 15241075 NR Description: sucrose cleavage protein-related [Arabidopsis
  misc_feature (1)..(339): Homolog of NCBI NO: 18416788 NR Description: sucrase-related protein [Arabidopsis thaliana]
  misc_feature (1)..(339): Homolog of NCBI NO: 16604384 NR Description: AT4g26620/T15N24_70 [Arabidopsis thaliana]
  misc_feature (1)..(218): Homolog of NCBI NO: 7488353 NR Description: sucrose cleavage protein homolog T15N24.70 -
  misc_feature (273)..(412): Homolog of NCBI NO: 7488353 NR Description: sucrose cleavage protein homolog T15N24.70 -
  misc_feature (62)..(318): Homolog of NCBI NO: 1086252 NR Description: sucrose cleavage protein - potato
  misc_feature (63)..(340): Homolog of NCBI NO: 11994184 NR Description: sucrose cleavage protein-like [Arabidopsis
  misc_feature (63)..(340): Homolog of NCBI NO: 16604338 NR Description: AT3g27570/MMJ24_12 [Arabidopsis thaliana]
  misc_feature (63)..(340): Homolog of NCBI NO: 30688845 NR Description: sucrose cleavage protein -related [Arabidopsis
  misc_feature (63)..(330): Homolog of NCBI NO: 21553503 NR Description: sucrose cleavage protein-like [Arabidopsis
MGSGRYLDDPLTFTRNPPSSSSPITESSFLAESISRSGSFESGSLRGGDGDCFSDVDFALDKLAGTVQFYERHVFLCYKKPSVWPARIEASEFDRLPRLLSSVISARKSSMKKETLLTICEGHDGSETSNGDVLIFPDMIRYRRLTHFDVDTFVEEVLVKGVEWLPGNPESLSSSYVFVCCHGSRDRRCGVCGPSLVSRFREEIDSCGLRGEVSVSPCSHIGGHKYTGDVIIYGLNINQRVTGHWYGCVTLEDVPLLLEQHINKGEIVDRLWRGEMGLPEEDQKKTQEQRLQLNSEKISNREVTQESVNNSICCQSRAVPELNGSGCQQNGNSSYCLEEIHTEKNTSERVTSVKNASLRIGSSENGSSGGFKVCAVMSMWLETWEREDTYAALAVACAAASVAIAYNCYKQLK

SEQ ID NO: 99227 - protein, 303 aa, Arabidopsis thaliana
  peptide (1)..(303): Ceres Seq. ID no. 13602441
  misc_feature (1)..(303): Homolog of NCBI NO: 15241075 NR Description: sucrose cleavage protein-related [Arabidopsis
  misc_feature (1)..(229): Homolog of NCBI NO: 18416788 NR Description: sucrase-related protein [Arabidopsis thaliana]
  misc_feature (1)..(229): Homolog of NCBI NO: 16604384 NR Description: AT4g26620/T15N24_70 [Arabidopsis thaliana]
  misc_feature (1)..(108): Homolog of NCBI NO: 7488353 NR Description: sucrose cleavage protein homolog T15N24.70 -
  misc_feature (163)..(302): Homolog of NCBI NO: 7488353 NR Description: sucrose cleavage protein homolog T15N24.70 -
  misc_feature (1)..(208): Homolog of NCBI NO: 1086252 NR Description: sucrose cleavage protein - potato
  misc_feature (1)..(230): Homolog of NCBI NO: 11994184 NR Description: sucrose cleavage protein-like [Arabidopsis
  misc_feature (1)..(230): Homolog of NCBI NO: 30688845 NR Description: sucrose cleavage protein -related [Arabidopsis
  misc_feature (1)..(230): Homolog of NCBI NO: 16604338 NR Description: AT3g27570/MMJ24_12 [Arabidopsis thaliana]
  misc_feature (1)..(220): Homolog of NCBI NO: 21553503 NR Description: sucrose cleavage protein-like [Arabidopsis
MKKETLLTICEGHDGSETSNGDVLIFPDMIRYRRLTHFDVDTFVEEVLVKGVEWLPGNPESLSSSYVFVCCHGSRDRRCGVCGPSLVSRFREEIDSCGLRGEVSVSPCSHIGGHKYTGDVIIYGLNINQRVTGHWYGCVTLEDVPLLLEQHINKGEIVDRLWRGEMGLPEEDQKKTQEQRLQLNSEKISNREVTQESVNNSICCQSRAVPELNGSGCQQNGNSSYCLEEIHTEKNTSERVTSVKNASLRIGSSENGSSGGFKVCAVMSMWLETWEREDTYAALAVACAAASVAIAYNCYKQLK

SEQ ID NO: 99228 - DNA, 1098 bp, Arabidopsis thaliana
  misc_feature (1)..(1098): Ceres Seq. ID no. 13602446
  misc_feature: MA Experiment ID: 20000071 Result: Up-regulated in Transcription
  misc_feature: MA Experiment 20000071 PARAMETER Experiment Name: At_100uM_ABA_Mutants_cDNA_P Parameter: Plant Line Value: CS8104
  misc_feature: MA Experiment 20000071 PARAMETER Experiment Name: At_100uM_ABA_Mutants_cDNA_P Parameter: Timepoint (hr) Value: 6
  misc_feature: MA Experiment 20000071 PARAMETER Experiment Name: At_100uM_ABA_Mutants_cDNA_P Parameter: Tissue Value: Aerial
  misc_feature: MA Experiment 20000071 PARAMETER Experiment Name: At_100uM_ABA_Mutants_cDNA_P Parameter: Treatment Value: 100uM ABA vs. No Treatment
  misc_feature: MA Experiment ID: 20000089 Result: Up-regulated in Transcription
  misc_feature: MA Experiment ID: 20000090 Result: Up-regulated in Transcription
  misc_feature: MA Experiment ID: 20000111 Result: Down-regulated in Transcription
  misc_feature: MA Experiment 20000111 PARAMETER Experiment Name: At_42deg_Heat_cDNA_P Parameter: Temperature (deg C) Value: 42 vs. 22
  misc_feature: MA Experiment 20000111 PARAMETER Experiment Name: At_42deg_Heat_cDNA_P Parameter: Timepoint (hr) Value: 6
  misc_feature: MA Experiment 20000111 PARAMETER Experiment Name: At_42deg_Heat_cDNA_P Parameter: Tissue Value: Aerial
  misc_feature: MA Experiment ID: 20000112 Result: Down-regulated in Transcription
  misc_feature: MA Experiment 20000112 PARAMETER Experiment Name: At_42deg_Heat_cDNA_P Parameter: Temperature (deg C) Value: 42 vs. 22
  misc_feature: MA Experiment 20000112 PARAMETER Experiment Name: At_42deg_Heat_cDNA_P Parameter: Timepoint (hr) Value: 2
  misc_feature: MA Experiment 20000112 PARAMETER Experiment Name: At_42deg_Heat_cDNA_P Parameter: Tissue Value: Aerial
  misc_feature: MA Experiment ID: 20000113 Result: Down-regulated in Transcription
  misc_feature: MA Experiment 20000113 PARAMETER Experiment Name: At_42deg_Heat_cDNA_P Parameter: Temperature (deg C) Value: 42 vs. 22
  misc_feature: MA Experiment 20000113 PARAMETER Experiment Name: At_42deg_Heat_cDNA_P Parameter: Timepoint (hr) Value: 8
  misc_feature: MA Experiment 20000113 PARAMETER Experiment Name: At_42deg_Heat_cDNA_P Parameter: Tissue Value: Aerial
  misc_feature: MA Experiment ID: 20000144 Result: Down-regulated in Transcription
  misc_feature: MA Experiment 20000144 PARAMETER Experiment Name: At_42deg_Heat_cDNA_P Parameter: Temperature (deg C) Value: 42 vs. 22
  misc_feature: MA Experiment 20000144 PARAMETER Experiment Name: At_42deg_Heat_cDNA_P Parameter: Timepoint (hr) Value: 1
  misc_feature: MA Experiment 20000144 PARAMETER Experiment Name: At_42deg_Heat_cDNA_P Parameter: Tissue Value: Aerial
  misc_feature: MA Experiment ID: 20001905 Result: Down-regulated in Transcription
  misc_feature: MA Experiment 20001905 PARAMETER Experiment Name: At_Drought_Reproduction_P Parameter: Age (day) Value: 40
  misc_feature: MA Experiment 20001905 PARAMETER Experiment Name: At_Drought_Reproduction_P Parameter: Organism Value: A. thaliana
  misc_feature: MA Experiment 20001905 PARAMETER Experiment Name: At_Drought_Reproduction_P Parameter: Plant Line Value: WS
  misc_feature: MA Experiment 20001905 PARAMETER Experiment Name: At_Drought_Reproduction_P Parameter: Timepoint (day) Value: 10
  misc_feature: MA Experiment 20001905 PARAMETER Experiment Name: At_Drought_Reproduction_P Parameter: Tissue Value: Rosettes
  misc_feature: MA Experiment 20001905 PARAMETER Experiment Name: At_Drought_Reproduction_P Parameter: Treatment Value: Drought vs. No Drought
acaacaaatcgtctccgtcttcctcgctcagcttcaacaaccagagccgacttgagattgagaatcaacgtaatcgatactctcgcaaagtctcatcctttctcagcaaaaaacactaggaaatggttgaaaggcatggagagttttgatttgctgcttaagatatatcatgtcgcagtgcgttgacggtatcaagcatttatgcacctctgttttagggtgttttgatcttgatttgtataaacaatctggtggccttggagatcctgaattgcttgcaagagacactgtttttagtgtgagtgaaatagaagctctttatgagctttttaagaaaatcagcagtgccgtgattgatgatgggctaataaacaaggaagagtttcagttggctttgtttaagacaaataaaaaagagagtttgtttgcagatcgggttttcgatttgtttgatacaaagcacaatggaatactggggtttgaggaatttgctcgtgctctctccgtctttcacccaaatgcgcctatagatgacaaaattcacttttcatttcagctatatgatcttaaacagcaagggtttatcgaacggcaagaggtgaaacaaatggttgtcgctacgcttgctgaatctggaatgaatttgaaggatactgtcattgaggatataatcgacaagacgtttgaggaagcagacacaaaacacgatggaaagatcgataaggaagagtggagaagccttgttcttagacatcccagccttctgaagaacatgactcttcaatatctcaaggatatcacgactacgtttccaagctttgtgttccattctcaggttgaagatacctgaaaaagcaaaagcaaaagcaagcagcggcaagacatcattgtattgttgaaggttgttctttcgttatggttctttatttgttacatttctaaatctctgaactcattttattttttattgagctttttttgtgaagcaaaattcttctttttagtttggtttttgtcctttttgatttcgctcggtctatctgtagatacaacttttgcatcttgatgttatggtaatgtaaagtttttcagtttatt

SEQ ID NO: 99229 - protein, 226 aa, Arabidopsis thaliana; identical to SEQ ID NO: 23899
  peptide (1)..(226): Ceres Seq. ID no. 13602447
  misc_feature (167)..(195): Pfam Name: EF hand Pfam Description: EF hand
  misc_feature (1)..(226): Homolog of NCBI NO: 15241101 NR Description: calcineurin B-like protein 2 (gb|AAC26009.1)
  misc_feature (1)..(226): Homolog of NCBI NO: 21593228 NR Description: calcineurin B-like protein 2 [Arabidopsis
  misc_feature (1)..(226): Homolog of NCBI NO: 15236778 NR Description: calcineurin B-like protein 3 (CBL3) [Arabidopsis
  misc_feature (1)..(226): Homolog of NCBI NO: 30687272 NR Description: calcineurin B-like protein 3 (CBL3) [Arabidopsis
  misc_feature (1)..(226): Homolog of NCBI NO: 16924116 NR Description: putative calcineurin B-like protein [Oryza sativa]
  misc_feature (1)..(226): Homolog of NCBI NO: 22137326 NR Description: calcineurin B [Pisum sativum]
  misc_feature (32)..(220): Homolog of NCBI NO: 38493047 NR Description: Chain A, The Crystal Structure Of The Calcium
  misc_feature (1)..(226): Homolog of NCBI NO: 18414640 NR Description: calcineurin B-like protein 6 (CBL6) [Arabidopsis
  misc_feature (1)..(226): Homolog of NCBI NO: 13448027 NR Description: SOS3-like calcium binding protein [Arabidopsis
  misc_feature (16)..(225): Homolog of NCBI NO: 18414931 NR Description: calcineurin B-like protein 1 (CBL1) [Arabidopsis

SEQ ID NO: 99230 - DNA, 874 bp, Arabidopsis thaliana
  misc_feature (1)..(874): Ceres Seq. ID no. 13602448
  misc_feature: MA Experiment ID: 108573 Result: Up-regulated in Transcription
  misc_feature: MA Experiment 108573 PARAMETER Experiment Name: At_Drought_cDNA_P Parameter: Timepoint (hr) Value: 6
  misc_feature: MA Experiment 108573 PARAMETER Experiment Name: At_Drought_cDNA_P Parameter: Tissue Value: Aerial
  misc_feature: MA Experiment 108573 PARAMETER Experiment Name: At_Drought_cDNA_P Parameter: Treatment Value: Drought vs. No Drought
  misc_feature: MA Experiment ID: 20000113 Result: Down-regulated in Transcription
  misc_feature: MA Experiment 20000113 PARAMETER Experiment Name: At_42deg_Heat_cDNA_P Parameter: Temperature (deg C) Value: 42 vs. 22
  misc_feature: MA Experiment 20000113 PARAMETER Experiment Name: At_42deg_Heat_cDNA_P Parameter: Timepoint (hr) Value: 8
  misc_feature: MA Experiment 20000113 PARAMETER Experiment Name: At_42deg_Heat_cDNA_P Parameter: Tissue Value: Aerial
  misc_feature: MA Experiment ID: 20000306 Result: Up-regulated in Transcription
  misc_feature: MA Experiment 20000306 PARAMETER Experiment Name: At_Germinating_Seeds_Sub_P Parameter: Age (hr) Value: 6 vs. 0
  misc_feature: MA Experiment 20000306 PARAMETER Experiment Name: At_Germinating_Seeds_Sub_P Parameter: Organism Value: A. thaliana
  misc_feature: MA Experiment 20000306 PARAMETER Experiment Name: At_Germinating_Seeds_Sub_P Parameter: Plant Line Value: WS
  misc_feature: MA Experiment 20000306 PARAMETER Experiment Name: At_Germinating_Seeds_Sub_P Parameter: Tissue Value: Germinating Seeds
  misc_feature: MA Experiment ID: 20000307 Result: Up-regulated in Transcription
  misc_feature: MA Experiment 20000307 PARAMETER Experiment Name: At_Germinating_Seeds_Sub_P Parameter: Age (hr) Value: 24 vs. 0
  misc_feature: MA Experiment 20000307 PARAMETER Experiment Name: At_Germinating_Seeds_Sub_P Parameter: Organism Value: A. thaliana
  misc_feature: MA Experiment 20000307 PARAMETER Experiment Name: At_Germinating_Seeds_Sub_P Parameter: Plant Line Value: WS
  misc_feature: MA Experiment 20000307 PARAMETER Experiment Name: At_Germinating_Seeds_Sub_P Parameter: Tissue Value: Germinating Seeds
acgattagaatatgagtagtgcaacgcaaaataacactgccgtttaagacgacggtcccttgacagaatcttcatcaacgctcgatttgacgtctgccgatttccttagctccgacgtaaaccactgatcgtcggtattcagctatattttgatttctcagctccaaaaattcccaacgaaatggagaaaatggccaaaggatggtttccgatgagcggcactagtagcagcggagatcagcagcagcaaccgctgcaaacaggaggaacgtctctgctagctgattggaattcttacgcagcatcgagagattttgaagaagacaccggaactttaggcttcgatatcgaatccgccgttagatctgccaacgacactgtttccggcacctttaatgttgtttcgaaaggagttagagataacctgcagtctgcaacaagtagtatgccttcaggaaaagctttgatgtatttcggtttacttctagcaagtggtgtattcttcatcttcattgccttcaccatgtttcttccagtcatggtgcttatgccacagaagtttgcaatttgttttacccttggatgtggatttatcatcggatctttcttcgctcttcgtggcccgcaaaatcaactcgctcacatgtcatcggcagagaggcttccactaactttaggtttcattgccaccatggttggcaccatatatgtctcgatggtgctccatagctacattctctctgtgattttctctgcattacaggttattgcactggcgtactactgtatatcatatttccctggtggatcatcgggaatgaagttcctcagttctactcttacctcctctgtcttccgaatgtttgggagatga

SEQ ID NO: 99231 - protein, 230 aa, Arabidopsis thaliana
  peptide (1)..(230): Ceres Seq. ID no. 13602449
  misc_feature (1)..(230): Homolog of NCBI NO: 15241114 NR Description: expressed protein [Arabidopsis thaliana] gene_id:MDA7.6~pir||T05049~similar to unknown protein
  misc_feature (4)..(230): Homolog of NCBI NO: 18416771 NR Description: expressed protein [Arabidopsis thaliana]
  misc_feature (74)..(230): Homolog of NCBI NO: 7486785 NR Description: hypothetical protein M3E9.20 - Arabidopsis >gi|2982451|emb|CAA18215.1| putative protein [Arabidopsis >gi|7269507|emb|CAB79510.1| putative protein [Arabidopsis
  misc_feature (1)..(73): Homolog of NCBI NO: 7486785 NR Description: hypothetical protein M3E9.20 - Arabidopsis >gi|2982451|emb|CAA18215.1| putative protein [Arabidopsis >gi|7269507|emb|CAB79510.1| putative protein [Arabidopsis
  misc_feature (1)..(226): Homolog of NCBI NO: 17532001 NR Description: Mammalian syntaxin 5 like (25.7 kD)
  misc_feature (36)..(223): Homolog of NCBI NO: 6319366 NR Description: similar to mammalian syntaxin 5; Sft2p cerevisiae] >gi|586459|sp|P38166|SFT2_YEAST SFT2 PROTEIN
  misc_feature (85)..(230): Homolog of NCBI NO: 23619167 NR Description: hypothetical protein, conserved [Plasmodium
  misc_feature (1)..(226): Homolog of NCBI NO: 39597537 NR Description: Hypothetical protein CBG03219 [Caenorhabditis
  misc_feature (93)..(216): Homolog of NCBI NO: 40746734 NR Description: hypothetical protein AN1297.2 [Aspergillus
  misc_feature (75)..(222): Homolog of NCBI NO: 19115465 NR Description: putative membrane protein required for ER to transport by similarity to yeast sft2 [Schizosaccharomyces pombe] putative membrane protein required for ER to Golgi transport by
MEKMAKGWFPMSGTSSSGDQQQQPLQTGGTSLLADWNSYAASRDFEEDTGTLGFDIESAVRSANDTVSGTFNVVSKGVRDNLQSATSSMPSGKALMYFGLLLASGVFFIFIAFTMFLPVMVLMPQKFAICFTLGCGFIIGSFFALRGPQNQLAHMSSAERLPLTLGFIATMVGTIYVSMVLHSYILSVIFSALQVIALAYYCISYFPGGSSGMKFLSSTLTSSVFRMFGR

SEQ ID NO: 99232 - protein, 227 aa, Arabidopsis thaliana
  peptide (1)..(227): Ceres Seq. ID no. 13602450
  misc_feature (1)..(227): Homolog of NCBI NO: 15241114 NR Description: expressed protein [Arabidopsis thaliana] gene_id:MDA7.6~pir||T05049~similar to unknown protein
  misc_feature (1)..(227): Homolog of NCBI NO: 18416771 NR Description: expressed protein [Arabidopsis thaliana]
  misc_feature (71)..(227): Homolog of NCBI NO: 7486785 NR Description: hypothetical protein M3E9.20 - Arabidopsis >gi|2982451|emb|CAA18215.1| putative protein [Arabidopsis >gi|7269507|emb|CAB79510.1| putative protein [Arabidopsis
  misc_feature (1)..(70): Homolog of NCBI NO: 7486785 NR Description: hypothetical protein M3E9.20 - Arabidopsis >gi|2982451|emb|CAA18215.1| putative protein [Arabidopsis >gi|7269507|emb|CAB79510.1| putative protein [Arabidopsis
  misc_feature (1)..(223): Homolog of NCBI NO: 17532001 NR Description: Mammalian syntaxin 5 like (25.7 kD)
  misc_feature (33)..(220): Homolog of NCBI NO: 6319366 NR Description: similar to mammalian syntaxin 5; Sft2p cerevisiae] >gi|586459|sp|P38166|SFT2_YEAST SFT2 PROTEIN
  misc_feature (82)..(227): Homolog of NCBI NO: 23619167 NR Description: hypothetical protein, conserved [Plasmodium
  misc_feature (1)..(223): Homolog of NCBI NO: 39597537 NR Description: Hypothetical protein CBG03219 [Caenorhabditis
  misc_feature (90)..(213): Homolog of NCBI NO: 40746734 NR Description: hypothetical protein AN1297.2 [Aspergillus
  misc_feature (72)..(219): Homolog of NCBI NO: 19115465 NR Description: putative membrane protein required for ER to transport by similarity to yeast sft2 [Schizosaccharomyces pombe] putative membrane protein required for ER to Golgi transport by
MAKGWFPMSGTSSSGDQQQQPLQTGGTSLLADWNSYAASRDFEEDTGTLGFDIESAVRSANDTVSGTFNVVSKGVRDNLQSATSSMPSGKALMYFGLLLASGVFFIFIAFTMFLPVMVLMPQKFAICFTLGCGFIIGSFFALRGPQNQLAHMSSAERLPLTLGFIATMVGTIYVSMVLHSYILSVIFSALQVIALAYYCISYFPGGSSGMKFLSSTLTSSVFRMFGR

SEQ ID NO: 99233 - protein, 220 aa, Arabidopsis thaliana
  peptide (1)..(220): Ceres Seq. ID no. 13602451
  misc_feature (1)..(220): Homolog of NCBI NO: 15241114 NR Description: expressed protein [Arabidopsis thaliana] gene_id:MDA7.6~pir||T05049~similar to unknown protein
  misc_feature (1)..(220): Homolog of NCBI NO: 18416771 NR Description: expressed protein [Arabidopsis thaliana]
  misc_feature (64)..(220): Homolog of NCBI NO: 7486785 NR Description: hypothetical protein M3E9.20 - Arabidopsis >gi|2982451|emb|CAA18215.1| putative protein [Arabidopsis >gi|7269507|emb|CAB79510.1| putative protein [Arabidopsis
  misc_feature (1)..(63): Homolog of NCBI NO: 7486785 NR Description: hypothetical protein M3E9.20 - Arabidopsis >gi|2982451|emb|CAA18215.1| putative protein [Arabidopsis >gi|7269507|emb|CAB79510.1| putative protein [Arabidopsis
  misc_feature (1)..(216): Homolog of NCBI NO: 17532001 NR Description: Mammalian syntaxin 5 like (25.7 kD)
  misc_feature (26)..(213): Homolog of NCBI NO: 6319366 NR Description: similar to mammalian syntaxin 5; Sft2p cerevisiae] >gi|586459|sp|P38166|SFT2_YEAST SFT2 PROTEIN
  misc_feature (75)..(220): Homolog of NCBI NO: 23619167 NR Description: hypothetical protein, conserved [Plasmodium
  misc_feature (1)..(216): Homolog of NCBI NO: 39597537 NR Description: Hypothetical protein CBG03219 [Caenorhabditis
  misc_feature (83)..(206): Homolog of NCBI NO: 40746734 NR Description: hypothetical protein AN1297.2 [Aspergillus
  misc_feature (65)..(212): Homolog of NCBI NO: 19115465 NR Description: putative membrane protein required for ER to transport by similarity to yeast sft2 [Schizosaccharomyces pombe] putative membrane protein required for ER to Golgi transport by
MSGTSSSGDQQQQPLQTGGTSLLADWNSYAASRDFEEDTGTLGFDIESAVRSANDTVSGTFNVVSKGVRDNLQSATSSMPSGKALMYFGLLLASGVFFIFIAFTMFLPVMVLMPQKFAICFTLGCGFIIGSFFALRGPQNQLAHMSSAERLPLTLGFIATMVGTIYVSMVLHSYILSVIFSALQVIALAYYCISYFPGGSSGMKFLSSTLTSSVFRMFGR

SEQ ID NO: 99234 - DNA, 1597 bp, Arabidopsis thaliana
  misc_feature (1)..(1597): Ceres Seq. ID no. 13602459
  misc_feature: MA Experiment ID: 108573 Result: Up-regulated in Transcription
  misc_feature: MA Experiment 108573 PARAMETER Experiment Name: At_Drought_cDNA_P Parameter: Timepoint (hr) Value: 6
  misc_feature: MA Experiment 108573 PARAMETER Experiment Name: At_Drought_cDNA_P Parameter: Tissue Value: Aerial
  misc_feature: MA Experiment 108573 PARAMETER Experiment Name: At_Drought_cDNA_P Parameter: Treatment Value: Drought vs. No Drought
  misc_feature: MA Experiment ID: 108607 Result: Up-regulated in Transcription
  misc_feature: MA Experiment 108607 PARAMETER Experiment Name: At_100uM_ABA_cDNA_P Parameter: Timepoint (hr) Value: 4
  misc_feature: MA Experiment 108607 PARAMETER Experiment Name: At_100uM_ABA_cDNA_P Parameter: Tissue Value: Aerial
  misc_feature: MA Experiment 108607 PARAMETER Experiment Name: At_100uM_ABA_cDNA_P Parameter: Treatment Value: 100uM ABA vs. No Treatment
  misc_feature: MA Experiment ID: 20000069 Result: Up-regulated in Transcription
  misc_feature: MA Experiment 20000069 PARAMETER Experiment Name: At_100uM_ABA_Mutants_cDNA_P Parameter: Plant Line Value: CS23
  misc_feature: MA Experiment 20000069 PARAMETER Experiment Name: At_100uM_ABA_Mutants_cDNA_P Parameter: Timepoint (hr) Value: 6
  misc_feature: MA Experiment 20000069 PARAMETER Experiment Name: At_100uM_ABA_Mutants_cDNA_P Parameter: Tissue Value: Aerial
  misc_feature: MA Experiment 20000069 PARAMETER Experiment Name: At_100uM_ABA_Mutants_cDNA_P Parameter: Treatment Value: 100uM ABA vs. No Treatment
  misc_feature: MA Experiment ID: 20000070 Result: Up-regulated in Transcription
  misc_feature: MA Experiment 20000070 PARAMETER Experiment Name: At_100uM_ABA_Mutants_cDNA_P Parameter: Plant Line Value: CS24
  misc_feature: MA Experiment 20000070 PARAMETER Experiment Name: At_100uM_ABA_Mutants_cDNA_P Parameter: Timepoint (hr) Value: 6
  misc_feature: MA Experiment 20000070 PARAMETER Experiment Name: At_100uM_ABA_Mutants_cDNA_P Parameter: Tissue Value: Aerial
  misc_feature: MA Experiment 20000070 PARAMETER Experiment Name: At_100uM_ABA_Mutants_cDNA_P Parameter: Treatment Value: 100uM ABA vs. No Treatment
  misc_feature: MA Experiment ID: 20000071 Result: Up-regulated in Transcription
  misc_feature: MA Experiment 20000071 PARAMETER Experiment Name: At_100uM_ABA_Mutants_cDNA_P Parameter: Plant Line Value: CS8104
  misc_feature: MA Experiment 20000071 PARAMETER Experiment Name: At_100uM_ABA_Mutants_cDNA_P Parameter: Timepoint (hr) Value: 6
  misc_feature: MA Experiment 20000071 PARAMETER Experiment Name: At_100uM_ABA_Mutants_cDNA_P Parameter: Tissue Value: Aerial
  misc_feature: MA Experiment 20000071 PARAMETER Experiment Name: At_100uM_ABA_Mutants_cDNA_P Parameter: Treatment Value: 100uM ABA vs. No Treatment
  misc_feature: MA Experiment ID: 20000072 Result: Up-regulated in Transcription
  misc_feature: MA Experiment 20000072 PARAMETER Experiment Name: At_100uM_ABA_Mutants_cDNA_P Parameter: Plant Line Value: CS8105
  misc_feature: MA Experiment 20000072 PARAMETER Experiment Name: At_100uM_ABA_Mutants_cDNA_P Parameter: Timepoint (hr) Value: 6
  misc_feature: MA Experiment 20000072 PARAMETER Experiment Name: At_100uM_ABA_Mutants_cDNA_P Parameter: Tissue Value: Aerial
  misc_feature: MA Experiment 20000072 PARAMETER Experiment Name: At_100uM_ABA_Mutants_cDNA_P Parameter: Treatment Value: 100uM ABA vs. No Treatment
  misc_feature: MA Experiment ID: 20000184 Result: Down-regulated in Transcription
  misc_feature: MA Experiment 20000184 PARAMETER Experiment Name: At_Shoots__P Parameter: Age (day) Value: 7
  misc_feature: MA Experiment 20000184 PARAMETER Experiment Name: At_Shoots__P Parameter: Tissue Value: Shoots vs. Whole Plant
  misc_feature: MA Experiment ID: 20000437 Result: Up-regulated in Transcription
  misc_feature: MA Experiment 20000437 PARAMETER Experiment Name: At_Drought_P Parameter: Age (day) Value: 8
  misc_feature: MA Experiment 20000437 PARAMETER Experiment Name: At_Drought_P Parameter: Organism Value: A. thaliana
  misc_feature: MA Experiment 20000437 PARAMETER Experiment Name: At_Drought_P Parameter: Plant Line Value: WS
  misc_feature: MA Experiment 20000437 PARAMETER Experiment Name: At_Drought_P Parameter: Timepoint (hr) Value: 24
  misc_feature: MA Experiment 20000437 PARAMETER Experiment Name: At_Drought_P Parameter: Tissue Value: Whole Plant
  misc_feature: MA Experiment 20000437 PARAMETER Experiment Name: At_Drought_P Parameter: Treatment Value: Drought vs. No Drought
  misc_feature: MA Experiment ID: 20000794 Result: Up-regulated in Transcription
  misc_feature: MA Experiment 20000794 PARAMETER Experiment Name: At_Petals_P Parameter: Age (day) Value: 23-25 days
  misc_feature: MA Experiment 20000794 PARAMETER Experiment Name: At_Petals_P Parameter: Plant Line Value: WS
  misc_feature: MA Experiment 20000794 PARAMETER Experiment Name: At_Petals_P Parameter: Tissue Value: Petals vs. Whole plant
aaatcgcgtcaattctcaacccagttttcagatttggtttttggaagctaacttattgttggaggtggagagatatggctgactttggtttgttctgtttcccttgtttaatggaagttgtttcatcatcatcatcatctctgtgattgtaattgatctcacaccatgtctgattacaatggtgatgatcttgaagatgaatatatggctgatgagtatgacatggatgatctcgaggatgatatgaatgccgcgtttgatggaagagatatcgatgcttctgattccgaagtcgaagatttcgatcaattgaacaaggctgcagatacttctgctgctcaagcacggaatgggaaggatattcagggtataccgtgggatagtcttactcttactagaaaagattacagaaaaactaggctagaacaatataaaaactatgaaaatatacccaattctggtgatgaatctgccaagaaatgcatgaatactgagaaaggcagctctttctatgagttcagaaggaattctagatccgtgagatcaacgattctccattttcagttgaggaatttggtctgggctacctcaaaacacgatgtttatttattgtccaactactccatcagccactggtcttctttgacaggttgtaggagtgaaattcttaacgttaaaggtcatgtggctccgtctgagaaacatcccgagagtttgttggaaggatttacagagactcaagttagcactcttgcagtaaaagaaaggctactagttgctggtggattccaaggagaactcatttgcaagcatctcgatagacctggtgtgagcttctgctcacgcacaacttacaccgaaaacgctatcaccaatgcagtagatatatatagaaactccagcggcgcactgcatttcatggcctcaaataatgactgtggagtcagagactttgacatggagagatataagcttgtccaactcttccgttatctatggcccgtcaatcatagttccctaagtcctgatggaaaactagtagcagtcgttggagatgacccagatggtctactggtagacacaagtaacggacagacgatcgggacgctaaaaggtcacttagattattcatttgcatcagcttggcatccaaacggtgtaacatttgccacaggaaaccaagacaagacctgtcgtatttgggacacaaggaaactctcggaatcagtcgctgtcctaaaaggtaaccttggagccgtacggtccattaggttcacatctgacggacggtacgttgccatggccgagccagcagatttcgttcatatctatgacacaaaatcaggatacaaaaaggagcaagagattgatttctttggagagatttctgggatatcgtttagcccagatactgaatctctcttcatcggtgtttgggacaggacttatggaagtctcttggagtatggtcgaaccagagactacacttatctcgattcattactttgatggaaatttaagctaagcctaaagaaaaaaaacttacgtaaaaataatttgttatacgccgtcttggttaggtttcataatcatatcg

SEQ ID NO: 99235 - protein, 447 aa, Arabidopsis thaliana
  peptide (1)..(447): Ceres Seq. ID no. 13602460
  misc_feature (1)..(447): Homolog of NCBI NO: 18423837 NR Description: WD-40 repeat protein family [Arabidopsis thaliana]
  misc_feature (1)..(447): Homolog of NCBI NO: 21536732 NR Description: WD-repeat protein-like [Arabidopsis thaliana]
  misc_feature (1)..(447): Homolog of NCBI NO: 9758639 NR Description: WD-repeat protein-like [Arabidopsis thaliana]
  misc_feature (11)..(447): Homolog of NCBI NO: 30696707 NR Description: WD-40 repeat protein family [Arabidopsis thaliana]
  misc_feature (1)..(447): Homolog of NCBI NO: 18399975 NR Description: WD-40 repeat protein family [Arabidopsis >gi|15081811|gb|AAK82560.1| AT3g13340/MDC11_13 [Arabidopsis >gi|22655036|gb|AAM98109.1| At3g13340/MDC11_13 [Arabidopsis
  misc_feature (1)..(447): Homolog of NCBI NO: 18405485 NR Description: WD-40 repeat protein family [Arabidopsis thaliana]
  misc_feature (1)..(447): Homolog of NCBI NO: 25405994 NR Description: protein F20N2.10 [imported] - Arabidopsis >gi|8778499|gb|AAF79507.1|AC002328_15 F20N2.10 [Arabidopsis
  misc_feature (35)..(447): Homolog of NCBI NO: 9294540 NR Description: WD domain protein-like [Arabidopsis thaliana]
  misc_feature (1)..(446): Homolog of NCBI NO: 13937195 NR Description: At1g78070/F28K19_28 [Arabidopsis thaliana]
  misc_feature (69)..(447): Homolog of NCBI NO: 27948448 NR Description: GAMYB-binding protein [Hordeum vulgare subsp.
MSDYNGDDLEDEYMADEYDMDDLEDDMNAAFDGRDIDASDSEVEDFDQLNKAADTSAAQARNGKDIQGIPWDSLTLTRKDYRKTRLEQYKNYENIPNSGDESAKKCMNTEKGSSFYEFRRNSRSVRSTILHFQLRNLVWATSKHDVYLLSNYSISHWSSLTGCRSEILNVKGHVAPSEKHPESLLEGFTETQVSTLAVKERLLVAGGFQGELICKHLDRPGVSFCSRTTYTENAITNAVDIYRNSSGALHFMASNNDCGVRDFDMERYKLVQLFRYLWPVNHSSLSPDGKLVAVVGDDPDGLLVDTSNGQTIGTLKGHLDYSFASAWHPNGVTFATGNQDKTCRIWDTRKLSESVAVLKGNLGAVRSIRFTSDGRYVAMAEPADFVHIYDTKSGYKKEQEIDFFGEISGISFSPDTESLFIGVWDRTYGSLLEYGRTRDYTYLDSLL

SEQ ID NO: 99236 - protein, 434 aa, Arabidopsis thaliana; identical to SEQ ID NO: 47913
  peptide (1)..(434): Ceres Seq. ID no. 13602461
  misc_feature (1)..(434): Homolog of NCBI NO: 18423837 NR Description: WD-40 repeat protein family [Arabidopsis thaliana]
  misc_feature (1)..(434): Homolog of NCBI NO: 21536732 NR Description: WD-repeat protein-like [Arabidopsis thaliana]
  misc_feature (1)..(434): Homolog of NCBI NO: 9758639 NR Description: WD-repeat protein-like [Arabidopsis thaliana]
  misc_feature (1)..(434): Homolog of NCBI NO: 30696707 NR Description: WD-40 repeat protein family [Arabidopsis thaliana]
  misc_feature (1)..(434): Homolog of NCBI NO: 18399975 NR Description: WD-40 repeat protein family [Arabidopsis >gi|15081811|gb|AAK82560.1| AT3g13340/MDC11_13 [Arabidopsis >gi|22655036|gb|AAM98109.1| At3g13340/MDC11_13 [Arabidopsis
  misc_feature (1)..(434): Homolog of NCBI NO: 18405485 NR Description: WD-40 repeat protein family [Arabidopsis thaliana]
  misc_feature (1)..(434): Homolog of NCBI NO: 25405994 NR Description: protein F20N2.10 [imported] - Arabidopsis >gi|8778499|gb|AAF79507.1|AC002328_15 F20N2.10 [Arabidopsis
  misc_feature (22)..(434): Homolog of NCBI NO: 9294540 NR Description: WD domain protein-like [Arabidopsis thaliana]
  misc_feature (1)..(433): Homolog of NCBI NO: 13937195 NR Description: At1g78070/F28K19_28 [Arabidopsis thaliana]
  misc_feature (56)..(434): Homolog of NCBI NO: 27948448 NR Description: GAMYB-binding protein [Hordeum vulgare subsp.

SEQ ID NO: 99237 - protein, 428 aa, Arabidopsis thaliana
  peptide (1)..(428): Ceres Seq. ID no. 13602462
  misc_feature (1)..(428): Homolog of NCBI NO: 18423837 NR Description: WD-40 repeat protein family [Arabidopsis thaliana]
  misc_feature (1)..(428): Homolog of NCBI NO: 21536732 NR Description: WD-repeat protein-like [Arabidopsis thaliana]
  misc_feature (1)..(428): Homolog of NCBI NO: 9758639 NR Description: WD-repeat protein-like [Arabidopsis thaliana]
  misc_feature (1)..(428): Homolog of NCBI NO: 30696707 NR Description: WD-40 repeat protein family [Arabidopsis thaliana]
  misc_feature (1)..(428): Homolog of NCBI NO: 18399975 NR Description: WD-40 repeat protein family [Arabidopsis >gi|15081811|gb|AAK82560.1| AT3g13340/MDC11_13 [Arabidopsis >gi|22655036|gb|AAM98109.1| At3g13340/MDC11_13 [Arabidopsis
  misc_feature (1)..(428): Homolog of NCBI NO: 18405485 NR Description: WD-40 repeat protein family [Arabidopsis thaliana]
  misc_feature (1)..(428): Homolog of NCBI NO: 25405994 NR Description: protein F20N2.10 [imported] - Arabidopsis >gi|8778499|gb|AAF79507.1|AC002328_15 F20N2.10 [Arabidopsis
  misc_feature (16)..(428): Homolog of NCBI NO: 9294540 NR Description: WD domain protein-like [Arabidopsis thaliana]
  misc_feature (1)..(427): Homolog of NCBI NO: 13937195 NR Description: At1g78070/F28K19_28 [Arabidopsis thaliana]
  misc_feature (50)..(428): Homolog of NCBI NO: 27948448 NR Description: GAMYB-binding protein [Hordeum vulgare subsp.
MDDLEDDMNAAFDGRDIDASDSEVEDFDQLNKAADTSAAQARNGKDIQGIPWDSLTLTRKDYRKTRLEQYKNYENIPNSGDESAKKCMNTEKGSSFYEFRRNSRSVRSTILHFQLRNLVWATSKHDVYLLSNYSISHWSSLTGCRSEILNVKGHVAPSEKHPESLLEGFTETQVSTLAVKERLLVAGGFQGELICKHLDRPGVSFCSRTTYTENAITNAVDIYRNSSGALHFMASNNDCGVRDFDMERYKLVQLFRYLWPVNHSSLSPDGKLVAVVGDDPDGLLVDTSNGQTIGTLKGHLDYSFASAWHPNGVTFATGNQDKTCRIWDTRKLSESVAVLKGNLGAVRSIRFTSDGRYVAMAEPADFVHIYDTKSGYKKEQEIDFFGEISGISFSPDTESLFIGVWDRTYGSLLEYGRTRDYTYLDSLL

SEQ ID NO: 99238 - DNA, 1214 bp, Arabidopsis thaliana
  misc_feature (1)..(1214): Ceres Seq. ID no. 13602463
  misc_feature: MA Experiment ID: 108434 Result: Up-regulated in Transcription
  misc_feature: MA Experiment 108434 PARAMETER Experiment Name: At_Root_Tips_cDNA_P Parameter: Tissue Value: Root Tips
gaattcatcaaaggagagagagatcgacaatggcaccttcgtcatcaagcggtttaaccttcaagctacatcctttggtaatcgtcaacatatcggatcactacactagggtcaaaactcagctcaatcctcctgcttcaatctgcgcaagcggccatggctcaaacaacggcgaagcaatgttccagcaaaaccctagggtttacggatgtgtgatcggtgtccagagaggtcgtactgttgagatattcaacagtttcgagcttttatatgatccttctactcaaacccttgatagatctttcctcgagaagaagcaagagctctataagaaggtgttccctgatttctatattctgggatggtactctacgggaagtgatgctgaggaatctgatatgcatatccataaagctttgatggatatcaatgaatctcctgtttatgtgcttttaaaccctgctatcaatcacacacagaaggatcttccagtgactatttatgaaagtgaattgcatgtcattgatggaatcccgcagctaattttcgctcatacaagctacacaatcgagacagttgaagctgaacggatatcagttgatcatgttgcacatcttaaaccatctgacggaggctcagcagcaacccagttggctgctcatcttactggtatacatagtgccatcaagatgcttaatagcagaatcagagtgctttaccaaaatcttgctgcaatgcagaaaggtgataaatcttgtgacaactcagttctgagacaagtatctagcctgctaagaagattgcctgccatggaatcagagagatttcaagataatttcttgatggagtacaacgacaaattactaataacttacctagcgatgattacaaattgttccagcaacatgaacgagatggtcgacaaattcaacaccgcatatgacagaaacactcgaagaggtggaagaactgcattcatgtaaaagatcctttccagcgattctagttctaaagatcttctcttggttcctgaaaccatttttaacattgcctctgtgagaatctataactcagacggcaagactttatcctcttcattgtttctatatctataagaacatctgcttatctatcaaagctcttgtttgatcttgaacaagtttctattgttagtaaaaagattttaaggtttgattctatcagtctctctagtt

SEQ ID NO: 99239 - protein, 326 aa, Arabidopsis thaliana
  peptide (1)..(326): Ceres Seq. ID no. 13602464
  misc_feature (15)..(145): Pfam Name: Mov34/MPN/PAD-1 family Pfam Description: Mov34/MPN/PAD-1 family
  misc_feature (10)..(326): Homolog of NCBI NO: 18423847 NR Description: COP9 complex subunit 6 CSN6, putative thaliana] >gi|15809663|gb|AAL07275.1| COP9 complex subunit 6
  misc_feature (10)..(326): Homolog of NCBI NO: 18056665 NR Description: CSN complex subunit 6A [Arabidopsis thaliana]
  misc_feature (10)..(326): Homolog of NCBI NO: 18416749 NR Description: COP9 signalosome subunit 6 (CSN6B), CSN complex
  misc_feature (10)..(326): Homolog of NCBI NO: 17940314 NR Description: COP9 signalosome subunit 6 [Arabidopsis thaliana]
  misc_feature (104)..(326): Homolog of NCBI NO: 28393281 NR Description: putative COP9 complex subunit 6 CSN6 [Arabidopsis
  misc_feature (10)..(270): Homolog of NCBI NO: 9758401 NR Description: transcription factor-like; similar to CH6 and
  misc_feature (104)..(326): Homolog of NCBI NO: 19347926 NR Description: unknown protein [Arabidopsis thaliana]
  misc_feature (10)..(270): Homolog of NCBI NO: 7486780 NR Description: hypothetical protein M3E9.140 - Arabidopsis >gi|2982463|emb|CAA18227.1| putative protein [Arabidopsis >gi|7269495|emb|CAB79498.1| putative protein [Arabidopsis
  misc_feature (66)..(315): Homolog of NCBI NO: 33563284 NR Description: COP9 signalosome subunit 6; COP9 (constitutive subunit 6 (Arabidopsis); COP9 complex S6 [Mus musculus] COP9 complex subunit 6 [Mus musculus] >gi|13435574|gb|AAH04664.1|
  misc_feature (8)..(57): Homolog of NCBI NO: 33563284 NR Description: COP9 signalosome subunit 6; COP9 (constitutive subunit 6 (Arabidopsis); COP9 complex S6 [Mus musculus] COP9 complex subunit 6 [Mus musculus] >gi|13435574|gb|AAH04664.1|
IHQRRERSTMAPSSSSGLTFKLHPLVIVNISDHYTRVKTQLNPPASICASGHGSNNGEAMFQQNPRVYGCVIGVQRGRTVEIFNSFELLYDPSTQTLDRSFLEKKQELYKKVFPDFYILGWYSTGSDAEESDMHIHKALMDINESPVYVLLNPAINHTQKDLPVTIYESELHVIDGIPQLIFAHTSYTIETVEAERISVDHVAHLKPSDGGSAATQLAAHLTGIHSAIKMLNSRIRVLYQNLAAMQKGDKSCDNSVLRQVSSLLRRLPAMESERFQDNFLMEYNDKLLITYLAMITNCSSNMNEMVDKFNTAYDRNTRRGGRTAFM

SEQ ID NO: 99240 - protein, 317 aa, Arabidopsis thaliana; identical to SEQ ID NO: 42732
  peptide (1)..(317): Ceres Seq. ID no. 13602465
  misc_feature (6)..(136): Pfam Name: Mov34/MPN/PAD-1 family Pfam Description: Mov34/MPN/PAD-1 family
  misc_feature (1)..(317): Homolog of NCBI NO: 18423847 NR Description: COP9 complex subunit 6 CSN6, putative thaliana] >gi|15809663|gb|AAL07275.1| COP9 complex subunit 6
  misc_feature (1)..(317): Homolog of NCBI NO: 18056665 NR Description: CSN complex subunit 6A [Arabidopsis thaliana]
  misc_feature (1)..(317): Homolog of NCBI NO: 18416749 NR Description: COP9 signalosome subunit 6 (CSN6B), CSN complex
  misc_feature (1)..(317): Homolog of NCBI NO: 17940314 NR Description: COP9 signalosome subunit 6 [Arabidopsis thaliana]
  misc_feature (95)..(317): Homolog of NCBI NO: 28393281 NR Description: putative COP9 complex subunit 6 CSN6 [Arabidopsis
  misc_feature (1)..(261): Homolog of NCBI NO: 9758401 NR Description: transcription factor-like; similar to CH6 and
  misc_feature (95)..(317): Homolog of NCBI NO: 19347926 NR Description: unknown protein [Arabidopsis thaliana]
  misc_feature (1)..(261): Homolog of NCBI NO: 7486780 NR Description: hypothetical protein M3E9.140 - Arabidopsis >gi|2982463|emb|CAA18227.1| putative protein [Arabidopsis >gi|7269495|emb|CAB79498.1| putative protein [Arabidopsis
  misc_feature (57)..(306): Homolog of NCBI NO: 33563284 NR Description: COP9 signalosome subunit 6; COP9 (constitutive subunit 6 (Arabidopsis); COP9 complex S6 [Mus musculus] COP9 complex subunit 6 [Mus musculus] >gi|13435574|gb|AAH04664.1|
  misc_feature (1)..(48): Homolog of NCBI NO: 33563284 NR Description: COP9 signalosome subunit 6; COP9 (constitutive subunit 6 (Arabidopsis); COP9 complex S6 [Mus musculus] COP9 complex subunit 6 [Mus musculus] >gi|13435574|gb|AAH04664.1|

SEQ ID NO: 99241 - protein, 267 aa, Arabidopsis thaliana; identical to SEQ ID NO: 42733
  peptide (1)..(267): Ceres Seq. ID no. 13602466
  misc_feature (1)..(86): Pfam Name: Mov34/MPN/PAD-1 family Pfam Description: Mov34/MPN/PAD-1 family
  misc_feature (1)..(267): Homolog of NCBI NO: 18423847 NR Description: COP9 complex subunit 6 CSN6, putative thaliana] >gi|15809663|gb|AAL07275.1| COP9 complex subunit 6
  misc_feature (1)..(267): Homolog of NCBI NO: 18056665 NR Description: CSN complex subunit 6A [Arabidopsis thaliana]
  misc_feature (1)..(267): Homolog of NCBI NO: 18416749 NR Description: COP9 signalosome subunit 6 (CSN6B), CSN complex
  misc_feature (1)..(267): Homolog of NCBI NO: 17940314 NR Description: COP9 signalosome subunit 6 [Arabidopsis thaliana]
  misc_feature (45)..(267): Homolog of NCBI NO: 28393281 NR Description: putative COP9 complex subunit 6 CSN6 [Arabidopsis
  misc_feature (1)..(211): Homolog of NCBI NO: 9758401 NR Description: transcription factor-like; similar to CH6 and
  misc_feature (45)..(267): Homolog of NCBI NO: 19347926 NR Description: unknown protein [Arabidopsis thaliana]
  misc_feature (1)..(211): Homolog of NCBI NO: 7486780 NR Description: hypothetical protein M3E9.140 - Arabidopsis >gi|2982463|emb|CAA18227.1| putative protein [Arabidopsis >gi|7269495|emb|CAB79498.1| putative protein [Arabidopsis
  misc_feature (7)..(256): Homolog of NCBI NO: 33563284 NR Description: COP9 signalosome subunit 6; COP9 (constitutive subunit 6 (Arabidopsis); COP9 complex S6 [Mus musculus] COP9 complex subunit 6 [Mus musculus] >gi|13435574|gb|AAH04664.1|
  misc_feature (7)..(256): Homolog of NCBI NO: 34147637 NR Description: COP9 subunit 6 (MOV34 homolog, 34 kD) [Homo

SEQ ID NO: 99242 - DNA, 1206 bp, Arabidopsis thaliana
  misc_feature (1)..(1206): Ceres Seq. ID no. 13602471
  misc_feature: MA Experiment ID: 108573 Result: Up-regulated in Transcription
  misc_feature: MA Experiment 108573 PARAMETER Experiment Name: At_Drought_cDNA_P Parameter: Timepoint (hr) Value: 6
  misc_feature: MA Experiment 108573 PARAMETER Experiment Name: At_Drought_cDNA_P Parameter: Tissue Value: Aerial
  misc_feature: MA Experiment 108573 PARAMETER Experiment Name: At_Drought_cDNA_P Parameter: Treatment Value: Drought vs. No Drought
  misc_feature: MA Experiment ID: 20000030 Result: Up-regulated in Transcription
  misc_feature: MA Experiment 20000030 PARAMETER Experiment Name: At_CS6630_Roots_cDNA_P Parameter: Plant Line Value: CS6630 vs. WS
  misc_feature: MA Experiment 20000030 PARAMETER Experiment Name: At_CS6630_Roots_cDNA_P Parameter: Tissue Value: Roots
  misc_feature: MA Experiment ID: 20000180 Result: Up-regulated in Transcription
  misc_feature: MA Experiment 20000180 PARAMETER Experiment Name: At_Germinating_Seeds_P Parameter: Age (hr) Value: 24 vs. 0
  misc_feature: MA Experiment 20000180 PARAMETER Experiment Name: At_Germinating_Seeds_P Parameter: Tissue Value: Germinating Seeds
  misc_feature: MA Experiment ID: 20000264 Result: Down-regulated in Transcription
  misc_feature: MA Experiment 20000264 PARAMETER Experiment Name: At_Open_Flower_P Parameter: Age (day) Value: 21
  misc_feature: MA Experiment 20000264 PARAMETER Experiment Name: At_Open_Flower_P Parameter: Plant Line Value: WS
  misc_feature: MA Experiment 20000264 PARAMETER Experiment Name: At_Open_Flower_P Parameter: Tissue Value: Open Flower vs. Whole Plant
gcacgattaaagagcgtctcgaaaattaacttttataggtaggaggagatagaaatcgaatcttatcgccgcgttaatatgccaccggccggagaactccgacatcaatctccatcaaaggagaaactatcttccgttacccaatccgatgaagcagaagcagcgtcagcagcgatatctgcggcagctgcagatgcggaagctgccggattatggacacagatcaaggcggaagctcgccgtgatgctgaggcggagccagctttagctagctatctatattcgacgattctttctcattcgtctcttgaacgatctatctcgtttcatctaggaaacaagctttgttcctcaacgcttttatccacacttttatacgatctgttcttaaacactttttcctccgatccttctcttcgtaacgccaccgtcgcagatctacgcgctgctcgtgttcgtgatcctgcttgtatctcgttctctcattgtctcctcaattacaaaggcttcttagctattcaggcgcatcgtgtatcacacaagctatggacacaatcacggaagccattagcattagctctacactcaagaatctccgatgtattcgctgttgatatccatccagcagcgaagatcggaaaagggatacttctagaccacgcaaccggagttgtagtcggagaaacagcggtgattgggaacaatgtttcaatccttcaccatgtgacactaggtggaacaggtaaagcttgtggagatagacatccgaagatcggtgacggttgtttgattggagctggagcgactattcttggaaatgtgaagattggtgcaggtgctaaagtaggagctggttctgttgtgctgattgacgtgccttgtcgaggtactgcggttgggaatccggcgagacttgtcggagggaaagagaagccaacgattcatgatgaggaatgtcctggagaatcgatggatcatacttcattcatctcggaatggtcagattacatcatataaagttgttgttataattgtttctgtggttttgaaagtgaaaaactttctgaccattcgcttatagagaggtgctgaggtaagtgagctttgttgtatttgtaatttacaaaacatcttacgatgttcaatacaagaaatggccttaatttgatgttattattcaatcattagttatccaagagtttatac

SEQ ID NO: 99243 - protein, 312 aa, Arabidopsis thaliana; identical to SEQ ID NO: 41266
  peptide (1)..(312): Ceres Seq. ID no. 13602472
  misc_feature (1)..(312): Homolog of NCBI NO: 15241928 NR Description: serine acetyltransferase (Sat-52) [Arabidopsis
  misc_feature (1)..(312): Homolog of NCBI NO: 21537083 NR Description: serine O-acetyltransferase (EC 2.3.1.30) Sat-52
  misc_feature (41)..(312): Homolog of NCBI NO: 23343585 NR Description: serine acetyltransferase 7 [Nicotiana tabacum]
  misc_feature (29)..(312): Homolog of NCBI NO: 1361979 NR Description: serine O-acetyltransferase (EC 2.3.1.30) - >gi|1350550|dbj|BAA12843.1| serine acetyltransferase [Citrullus >gi|1841312|dbj|BAA08479.1| serine acetyltransferase. [Citrullus
  misc_feature (25)..(312): Homolog of NCBI NO: 28460066 NR Description: serine O-acetyltransferase [Beta vulgaris]
  misc_feature (28)..(312): Homolog of NCBI NO: 7433702 NR Description: serine O-acetyltransferase (EC 2.3.1.30) - >gi|1657233|dbj|BAA13634.1| serine acetyltransferase [Spinacia >gi|1657235|dbj|BAA13635.1| serine acetyltransferase [Spinacia
  misc_feature (38)..(312): Homolog of NCBI NO: 7384806 NR Description: serine acetyltransferase [Allium tuberosum]
  misc_feature (38)..(312): Homolog of NCBI NO: 6601494 NR Description: serine acetyltransferase [Allium cepa]

SEQ ID NO: 99244 - DNA, 959 bp, Arabidopsis thaliana
  misc_feature (1)..(959): Ceres Seq. ID no. 13602473
  misc_feature: MA Experiment ID: 108464 Result: Up-regulated in Transcription
  misc_feature: MA Experiment 108464 PARAMETER Experiment Name: At_Germinating_Seeds_cDNA_P Parameter: Age (day) Value: 4 vs. 0
  misc_feature: MA Experiment 108464 PARAMETER Experiment Name: At_Germinating_Seeds_cDNA_P Parameter: Tissue Value: Germinating Seeds
  misc_feature: MA Experiment ID: 108473 Result: Down-regulated in Transcription
  misc_feature: MA Experiment 108473 PARAMETER Experiment Name: At_Drought_Flowers_cDNA_P Parameter: Timepoint (hr) Value: 7 d
  misc_feature: MA Experiment 108473 PARAMETER Experiment Name: At_Drought_Flowers_cDNA_P Parameter: Tissue Value: Flower
  misc_feature: MA Experiment 108473 PARAMETER Experiment Name: At_Drought_Flowers_cDNA_P Parameter: Treatment Value: Drought vs. No Drought
  misc_feature: MA Experiment ID: 108489 Result: Down-regulated in Transcription
  misc_feature: MA Experiment ID: 20000070 Result: Down-regulated in Transcription
  misc_feature: MA Experiment 20000070 PARAMETER Experiment Name: At_100uM_ABA_Mutants_cDNA_P Parameter: Plant Line Value: CS24
  misc_feature: MA Experiment 20000070 PARAMETER Experiment Name: At_100uM_ABA_Mutants_cDNA_P Parameter: Timepoint (hr) Value: 6
  misc_feature: MA Experiment 20000070 PARAMETER Experiment Name: At_100uM_ABA_Mutants_cDNA_P Parameter: Tissue Value: Aerial
  misc_feature: MA Experiment 20000070 PARAMETER Experiment Name: At_100uM_ABA_Mutants_cDNA_P Parameter: Treatment Value: 100uM ABA vs. No Treatment
  misc_feature: MA Experiment ID: 20000071 Result: Down-regulated in Transcription
  misc_feature: MA Experiment 20000071 PARAMETER Experiment Name: At_100uM_ABA_Mutants_cDNA_P Parameter: Plant Line Value: CS8104
  misc_feature: MA Experiment 20000071 PARAMETER Experiment Name: At_100uM_ABA_Mutants_cDNA_P Parameter: Timepoint (hr) Value: 6
  misc_feature: MA Experiment 20000071 PARAMETER Experiment Name: At_100uM_ABA_Mutants_cDNA_P Parameter: Tissue Value: Aerial
  misc_feature: MA Experiment 20000071 PARAMETER Experiment Name: At_100uM_ABA_Mutants_cDNA_P Parameter: Treatment Value: 100uM ABA vs. No Treatment
  misc_feature: MA Experiment ID: 20000180 Result: Up-regulated in Transcription
  misc_feature: MA Experiment 20000180 PARAMETER Experiment Name: At_Germinating_Seeds_P Parameter: Age (hr) Value: 24 vs. 0
  misc_feature: MA Experiment 20000180 PARAMETER Experiment Name: At_Germinating_Seeds_P Parameter: Tissue Value: Germinating Seeds
  misc_feature: MA Experiment ID: 20000184 Result: Down-regulated in Transcription
  misc_feature: MA Experiment 20000184 PARAMETER Experiment Name: At_Shoots__P Parameter: Age (day) Value: 7
  misc_feature: MA Experiment 20000184 PARAMETER Experiment Name: At_Shoots__P Parameter: Tissue Value: Shoots vs. Whole Plant
  misc_feature: MA Experiment ID: 20000234 Result: Up-regulated in Transcription
  misc_feature: MA Experiment 20000234 PARAMETER Experiment Name: At_Siliques_P Parameter: Age (day) Value: 21
  misc_feature: MA Experiment 20000234 PARAMETER Experiment Name: At_Siliques_P Parameter: Organism Value: A. thaliana
  misc_feature: MA Experiment 20000234 PARAMETER Experiment Name: At_Siliques_P Parameter: Plant Line Value: WS
  misc_feature: MA Experiment 20000234 PARAMETER Experiment Name: At_Siliques_P Parameter: Tissue Value: Less Than 5mm Siliques vs. Whole Plant
  misc_feature: MA Experiment ID: 20000235 Result: Up-regulated in Transcription
  misc_feature: MA Experiment 20000235 PARAMETER Experiment Name: At_Siliques_P Parameter: Age (day) Value: 21
  misc_feature: MA Experiment 20000235 PARAMETER Experiment Name: At_Siliques_P Parameter: Organism Value: A. thaliana
  misc_feature: MA Experiment 20000235 PARAMETER Experiment Name: At_Siliques_P Parameter: Plant Line Value: WS
  misc_feature: MA Experiment 20000235 PARAMETER Experiment Name: At_Siliques_P Parameter: Tissue Value: 5-10mm Siliques vs. Whole Plant
  misc_feature: MA Experiment ID: 20000264 Result: Up-regulated in Transcription
  misc_feature: MA Experiment 20000264 PARAMETER Experiment Name: At_Open_Flower_P Parameter: Age (day) Value: 21
  misc_feature: MA Experiment 20000264 PARAMETER Experiment Name: At_Open_Flower_P Parameter: Plant Line Value: WS
  misc_feature: MA Experiment 20000264 PARAMETER Experiment Name: At_Open_Flower_P Parameter: Tissue Value: Open Flower vs. Whole Plant
  misc_feature: MA Experiment ID: 20000265 Result: Up-regulated in Transcription
  misc_feature: MA Experiment 20000265 PARAMETER Experiment Name: At_Open_Flower_P Parameter: Age (day) Value: 21
  misc_feature: MA Experiment 20000265 PARAMETER Experiment Name: At_Open_Flower_P Parameter: Plant Line Value: WS
  misc_feature: MA Experiment 20000265 PARAMETER Experiment Name: At_Open_Flower_P Parameter: Tissue Value: Closed Flower vs. Whole Plant
  misc_feature: MA Experiment ID: 20000286 Result: Up-regulated in Transcription
  misc_feature: MA Experiment 20000286 PARAMETER Experiment Name: At_Open_Flower_P Parameter: Age (day) Value: 21
  misc_feature: MA Experiment 20000286 PARAMETER Experiment Name: At_Open_Flower_P Parameter: Plant Line Value: WS
  misc_feature: MA Experiment 20000286 PARAMETER Experiment Name: At_Open_Flower_P Parameter: Tissue Value: Half Open vs. Whole Plant
  misc_feature: MA Experiment ID: 20000573 Result: Down-regulated in Transcription
  misc_feature: MA Experiment 20000573 PARAMETER Experiment Name: At_100uM_ABA_Mutants__P Parameter: Organism Value: A. thaliana
  misc_feature: MA Experiment 20000573 PARAMETER Experiment Name: At_100uM_ABA_Mutants__P Parameter: Plant Line Value: CS22 vs. Ler wt
  misc_feature: MA Experiment 20000573 PARAMETER Experiment Name: At_100uM_ABA_Mutants__P Parameter: Timepoint (hr) Value: N/A
  misc_feature: MA Experiment 20000573 PARAMETER Experiment Name: At_100uM_ABA_Mutants__P Parameter: Tissue Value: Whole Plant
  misc_feature: MA Experiment 20000573 PARAMETER Experiment Name: At_100uM_ABA_Mutants__P Parameter: Treatment Value: None
  misc_feature: MA Experiment ID: 20000574 Result: Down-regulated in Transcription
  misc_feature: MA Experiment 20000574 PARAMETER Experiment Name: At_100uM_ABA_Mutants__P Parameter: Organism Value: A. thaliana
  misc_feature: MA Experiment 20000574 PARAMETER Experiment Name: At_100uM_ABA_Mutants__P Parameter: Plant Line Value: CS23 vs. Ler wt
  misc_feature: MA Experiment 20000574 PARAMETER Experiment Name: At_100uM_ABA_Mutants__P Parameter: Timepoint (hr) Value: N/A
  misc_feature: MA Experiment 20000574 PARAMETER Experiment Name: At_100uM_ABA_Mutants__P Parameter: Tissue Value: Whole Plant
  misc_feature: MA Experiment 20000574 PARAMETER Experiment Name: At_100uM_ABA_Mutants__P Parameter: Treatment Value: None
  misc_feature: MA Experiment ID: 20001458 Result: Down-regulated in Transcription
  misc_feature: MA Experiment 20001458 PARAMETER Experiment Name: At_50mM_NH4NO3_L-to-H_P Parameter: Age (day) Value: Undefined
  misc_feature: MA Experiment 20001458 PARAMETER Experiment Name: At_50mM_NH4NO3_L-to-H_P Parameter: Organism Value: Undefined
  misc_feature: MA Experiment 20001458 PARAMETER Experiment Name: At_50mM_NH4NO3_L-to-H_P Parameter: Plant Line Value: Undefined
  misc_feature: MA Experiment 20001458 PARAMETER Experiment Name: At_50mM_NH4NO3_L-to-H_P Parameter: Timepoint (hr) Value: 2
  misc_feature: MA Experiment 20001458 PARAMETER Experiment Name: At_50mM_NH4NO3_L-to-H_P Parameter: Tissue Value: Siliques
  misc_feature: MA Experiment 20001458 PARAMETER Experiment Name: At_50mM_NH4NO3_L-to-H_P Parameter: Treatment Value: 50mM NH4NO3 vs. 100mM Manitol
  misc_feature: MA Experiment ID: 20001560 Result: Down-regulated in Transcription
  misc_feature: MA Experiment 20001560 PARAMETER Experiment Name: At_Drought_Soil_Dry_P Parameter: Age (day) Value: 28
  misc_feature: MA Experiment 20001560 PARAMETER Experiment Name: At_Drought_Soil_Dry_P Parameter: Organism Value: A. thaliana
  misc_feature: MA Experiment 20001560 PARAMETER Experiment Name: At_Drought_Soil_Dry_P Parameter: Plant Line Value: WS
  misc_feature: MA Experiment 20001560 PARAMETER Experiment Name: At_Drought_Soil_Dry_P Parameter: Post Timepoint (hr) Value: None
  misc_feature: MA Experiment 20001560 PARAMETER Experiment Name: At_Drought_Soil_Dry_P Parameter: Post-Treatment Value: None
  misc_feature: MA Experiment 20001560 PARAMETER Experiment Name: At_Drought_Soil_Dry_P Parameter: Timepoint (day) Value: 14
  misc_feature: MA Experiment 20001560 PARAMETER Experiment Name: At_Drought_Soil_Dry_P Parameter: Treatment Value: Drought vs. No Drought
  misc_feature: MA Experiment ID: 20001904 Result: Down-regulated in Transcription
  misc_feature: MA Experiment 20001904 PARAMETER Experiment Name: At_Drought_Reproduction_P Parameter: Age (day) Value: 37
  misc_feature: MA Experiment 20001904 PARAMETER Experiment Name: At_Drought_Reproduction_P Parameter: Organism Value: A. thaliana
  misc_feature: MA Experiment 20001904 PARAMETER Experiment Name: At_Drought_Reproduction_P Parameter: Plant Line Value: WS
  misc_feature: MA Experiment 20001904 PARAMETER Experiment Name: At_Drought_Reproduction_P Parameter: Timepoint (day) Value: 7
  misc_feature: MA Experiment 20001904 PARAMETER Experiment Name: At_Drought_Reproduction_P Parameter: Tissue Value: Rosettes
  misc_feature: MA Experiment 20001904 PARAMETER Experiment Name: At_Drought_Reproduction_P Parameter: Treatment Value: Drought vs. No Drought
atcattcatcaacatcatctctctttctctatctcgctgtccctccttctctttctcattcattgcaatgggcagaagatgctcacactgtggaaacgtaggacataactcaagaacatgttcttcttaccaaacaagagtagttaggctctttggtgttcatctagacaccacaagctcttctccgccgcctcctcctcctccctcgattttggccgctgcaataaagaaaagtttcagcatggattgcttgccggcatgttcctcctcttcctcttcctttgctggttatctctccgatggtctcgcccataaaacacctgaccgcaaaaaaggggttccatggacggcggaagagcaccggacgtttctaattggattagaaaagcttggaaaaggagattggagaggaatctctagaaacttcgtcgtcacaaaatccccgacacaagtggcaagtcatgctcaaaaatactttctccggcaaactaccactctccatcacaagagacgccgcaccagcctctttgatatggtttcggccggcaatgttgaagaaaatagtactactaagaggatatgtaatgatcatattgggtcgagctcaaaggttgtttggaaacaaggattactcaatcctcgtcttggatatccagatccgaaagtatcagtatccggctcgggtaactccggtggactcgatcttgagctgaagcttgcgtccattcaatctcctgaatcgaatattagacctattagcgttacgtgaatctatataacacgttatgatcagtttcattagaataattcaaatgtttacatatataatatcttatcgatcctatctaatttgattttgatttaacgttagttactttgataatttcgtcgatattgtttttttggttttttcattgtgagattttttgtcttggaagttggatccatacatatttctg

SEQ ID NO: 99245 - protein, 255 aa, Arabidopsis thaliana
  peptide (1)..(255): Ceres Seq. ID no. 13602474
  misc_feature (112)..(159): Pfam Name: Myb-like DNA-binding domain Pfam Description: Myb-like DNA-binding domain
  misc_feature (23)..(255): Homolog of NCBI NO: 15241963 NR Description: expressed protein [Arabidopsis thaliana]
  misc_feature (96)..(215): Homolog of NCBI NO: 2062176 NR Description: Myb-related transcription activator (MybSt1)
  misc_feature (23)..(55): Homolog of NCBI NO: 2062176 NR Description: Myb-related transcription activator (MybSt1)
  misc_feature (23)..(179): Homolog of NCBI NO: 24850307 NR Description: transcription factor MYBS3 [Oryza sativa
  misc_feature (23)..(179): Homolog of NCBI NO: 37536856 NR Description: putative Myb-related protein [Oryza sativa
  misc_feature (96)..(215): Homolog of NCBI NO: 15228185 NR Description: myb family transcription factor [Arabidopsis
  misc_feature (23)..(40): Homolog of NCBI NO: 15228185 NR Description: myb family transcription factor [Arabidopsis
  misc_feature (96)..(179): Homolog of NCBI NO: 34912404 NR Description: putative Myb-related transcription factor [Oryza
  misc_feature (23)..(42): Homolog of NCBI NO: 34912404 NR Description: putative Myb-related transcription factor [Oryza
  misc_feature (21)..(223): Homolog of NCBI NO: 15240300 NR Description: transcriptional activator - like protein
SFINIISLSLSRCPSFSFSFIAMGRRCSHCGNVGHNSRTCSSYQTRVVRLFGVHLDTTSSSPPPPPPPSILAAAIKKSFSMDCLPACSSSSSSFAGYLSDGLAHKTPDRKKGVPWTAEEHRTFLIGLEKLGKGDWRGISRNFVVTKSPTQVASHAQKYFLRQTTTLHHKRRRTSLFDMVSAGNVEENSTTKRICNDHIGSSSKVVWKQGLLNPRLGYPDPKVSVSGSGNSGGLDLELKLASIQSPESNIRPISVT

SEQ ID NO: 99246 - protein, 233 aa, Arabidopsis thaliana
  peptide (1)..(233): Ceres Seq. ID no. 13602475
  misc_feature (90)..(137): Pfam Name: Myb-like DNA-binding domain Pfam Description: Myb-like DNA-binding domain
  misc_feature (1)..(233): Homolog of NCBI NO: 15241963 NR Description: expressed protein [Arabidopsis thaliana]
  misc_feature (74)..(193): Homolog of NCBI NO: 2062176 NR Description: Myb-related transcription activator (MybSt1)
  misc_feature (1)..(33): Homolog of NCBI NO: 2062176 NR Description: Myb-related transcription activator (MybSt1)
  misc_feature (1)..(157): Homolog of NCBI NO: 24850307 NR Description: transcription factor MYBS3 [Oryza sativa
  misc_feature (1)..(157): Homolog of NCBI NO: 37536856 NR Description: putative Myb-related protein [Oryza sativa
  misc_feature (74)..(193): Homolog of NCBI NO: 15228185 NR Description: myb family transcription factor [Arabidopsis
  misc_feature (1)..(18): Homolog of NCBI NO: 15228185 NR Description: myb family transcription factor [Arabidopsis
  misc_feature (74)..(157): Homolog of NCBI NO: 34912404 NR Description: putative Myb-related transcription factor [Oryza
  misc_feature (1)..(20): Homolog of NCBI NO: 34912404 NR Description: putative Myb-related transcription factor [Oryza
  misc_feature (1)..(201): Homolog of NCBI NO: 15240300 NR Description: transcriptional activator - like protein
MGRRCSHCGNVGHNSRTCSSYQTRVVRLFGVHLDTTSSSPPPPPPPSILAAAIKKSFSMDCLPACSSSSSSFAGYLSDGLAHKTPDRKKGVPWTAEEHRTFLIGLEKLGKGDWRGISRNFVVTKSPTQVASHAQKYFLRQTTTLHHKRRRTSLFDMVSAGNVEENSTTKRICNDHIGSSSKVVWKQGLLNPRLGYPDPKVSVSGSGNSGGLDLELKLASIQSPESNIRPISVT

SEQ ID NO: 99247 - protein, 175 aa, Arabidopsis thaliana
  peptide (1)..(175): Ceres Seq. ID no. 13602476
  misc_feature (32)..(79): Pfam Name: Myb-like DNA-binding domain Pfam Description: Myb-like DNA-binding domain
  misc_feature (1)..(175): Homolog of NCBI NO: 15241963 NR Description: expressed protein [Arabidopsis thaliana]
  misc_feature (16)..(135): Homolog of NCBI NO: 2062176 NR Description: Myb-related transcription activator (MybSt1)
  misc_feature (1)..(99): Homolog of NCBI NO: 24850307 NR Description: transcription factor MYBS3 [Oryza sativa
  misc_feature (1)..(99): Homolog of NCBI NO: 37536856 NR Description: putative Myb-related protein [Oryza sativa
  misc_feature (16)..(135): Homolog of NCBI NO: 15228185 NR Description: myb family transcription factor [Arabidopsis
  misc_feature (16)..(99): Homolog of NCBI NO: 34912404 NR Description: putative Myb-related transcription factor [Oryza
  misc_feature (1)..(143): Homolog of NCBI NO: 15240300 NR Description: transcriptional activator - like protein
  misc_feature (1)..(115): Homolog of NCBI NO: 34906444 NR Description: P0671B11.14 [Oryza sativa (japonica
  misc_feature (1)..(168): Homolog of NCBI NO: 7705206 NR Description: MybSt1 [Solanum tuberosum]
  misc_feature (1)..(168): Homolog of NCBI NO: 1076660 NR Description: D13F(MYBST1) protein - potato
MDCLPACSSSSSSFAGYLSDGLAHKTPDRKKGVPWTAEEHRTFLIGLEKLGKGDWRGISRNFVVTKSPTQVASHAQKYFLRQTTTLHHKRRRTSLFDMVSAGNVEENSTTKRICNDHIGSSSKVVWKQGLLNPRLGYPDPKVSVSGSGNSGGLDLELKLASIQSPESNIRPISVT

SEQ ID NO: 99248 - DNA, 2559 bp, Arabidopsis thaliana
  misc_feature (1)..(2559): Ceres Seq. ID no. 13602481
  misc_feature: MA Experiment ID: 108434 Result: Down-regulated in Transcription
  misc_feature: MA Experiment 108434 PARAMETER Experiment Name: At_Root_Tips_cDNA_P Parameter: Tissue Value: Root Tips
  misc_feature: MA Experiment ID: 108461 Result: Up-regulated in Transcription
  misc_feature: MA Experiment 108461 PARAMETER Experiment Name: At_Germinating_Seeds_cDNA_P Parameter: Age (day) Value: 1 vs. 0
  misc_feature: MA Experiment 108461 PARAMETER Experiment Name: At_Germinating_Seeds_cDNA_P Parameter: Tissue Value: Germinating Seeds
  misc_feature: MA Experiment ID: 108462 Result: Up-regulated in Transcription
  misc_feature: MA Experiment 108462 PARAMETER Experiment Name: At_Germinating_Seeds_cDNA_P Parameter: Age (day) Value: 2 vs. 0
  misc_feature: MA Experiment 108462 PARAMETER Experiment Name: At_Germinating_Seeds_cDNA_P Parameter: Tissue Value: Germinating Seeds
  misc_feature: MA Experiment ID: 108463 Result: Up-regulated in Transcription
  misc_feature: MA Experiment 108463 PARAMETER Experiment Name: At_Germinating_Seeds_cDNA_P Parameter: Age (day) Value: 3 vs. 0
  misc_feature: MA Experiment 108463 PARAMETER Experiment Name: At_Germinating_Seeds_cDNA_P Parameter: Tissue Value: Germinating Seeds
  misc_feature: MA Experiment ID: 108464 Result: Up-regulated in Transcription
  misc_feature: MA Experiment 108464 PARAMETER Experiment Name: At_Germinating_Seeds_cDNA_P Parameter: Age (day) Value: 4 vs. 0
  misc_feature: MA Experiment 108464 PARAMETER Experiment Name: At_Germinating_Seeds_cDNA_P Parameter: Tissue Value: Germinating Seeds
  misc_feature: MA Experiment ID: 108469 Result: Up-regulated in Transcription
  misc_feature: MA Experiment ID: 108488 Result: Down-regulated in Transcription
  misc_feature: MA Experiment ID: 108501 Result: Down-regulated in Transcription
  misc_feature: MA Experiment 108501 PARAMETER Experiment Name: At_ap2_floral_buds_cDNA_P Parameter: Plant Line Value: ap2 (Ler.)
  misc_feature: MA Experiment 108501 PARAMETER Experiment Name: At_ap2_floral_buds_cDNA_P Parameter: Tissue Value: Closed Flower
  misc_feature: MA Experiment ID: 108572 Result: Up-regulated in Transcription
  misc_feature: MA Experiment 108572 PARAMETER Experiment Name: At_Drought_cDNA_P Parameter: Timepoint (hr) Value: 1
  misc_feature: MA Experiment 108572 PARAMETER Experiment Name: At_Drought_cDNA_P Parameter: Tissue Value: Aerial
  misc_feature: MA Experiment 108572 PARAMETER Experiment Name: At_Drought_cDNA_P Parameter: Treatment Value: Drought vs. No Drought
  misc_feature: MA Experiment ID: 108573 Result: Up-regulated in Transcription
  misc_feature: MA Experiment 108573 PARAMETER Experiment Name: At_Drought_cDNA_P Parameter: Timepoint (hr) Value: 6
  misc_feature: MA Experiment 108573 PARAMETER Experiment Name: At_Drought_cDNA_P Parameter: Tissue Value: Aerial
  misc_feature: MA Experiment 108573 PARAMETER Experiment Name: At_Drought_cDNA_P Parameter: Treatment Value: Drought vs. No Drought
  misc_feature: MA Experiment ID: 108574 Result: Down-regulated in Transcription
  misc_feature: MA Experiment 108574 PARAMETER Experiment Name: At_Wounding__cDNA_P Parameter: Timepoint (hr) Value: 1
  misc_feature: MA Experiment 108574 PARAMETER Experiment Name: At_Wounding__cDNA_P Parameter: Tissue Value: Aerial
  misc_feature: MA Experiment 108574 PARAMETER Experiment Name: At_Wounding__cDNA_P Parameter: Treatment Value: Wounding vs. No Wounding
  misc_feature: MA Experiment ID: 108579 Result: Down-regulated in Transcription
  misc_feature: MA Experiment 108579 PARAMETER Experiment Name: At_4deg_Cold_cDNA_P Parameter: Temperature (deg C) Value: 4 vs. 22
  misc_feature: MA Experiment 108579 PARAMETER Experiment Name: At_4deg_Cold_cDNA_P Parameter: Timepoint (hr) Value: 6
  misc_feature: MA Experiment 108579 PARAMETER Experiment Name: At_4deg_Cold_cDNA_P Parameter: Tissue Value: Aerial
  misc_feature: MA Experiment ID: 108605 Result: Up-regulated in Transcription
  misc_feature: MA Experiment 108605 PARAMETER Experiment Name: At_100uM_ABA_cDNA_P Parameter: Timepoint (hr) Value: 6
  misc_feature: MA Experiment 108605 PARAMETER Experiment Name: At_100uM_ABA_cDNA_P Parameter: Tissue Value: Aerial
  misc_feature: MA Experiment 108605 PARAMETER Experiment Name: At_100uM_ABA_cDNA_P Parameter: Treatment Value: 100uM ABA vs. No Treatment
  misc_feature: MA Experiment ID: 108607 Result: Up-regulated in Transcription
  misc_feature: MA Experiment 108607 PARAMETER Experiment Name: At_100uM_ABA_cDNA_P Parameter: Timepoint (hr) Value: 4
  misc_feature: MA Experiment 108607 PARAMETER Experiment Name: At_100uM_ABA_cDNA_P Parameter: Tissue Value: Aerial
  misc_feature: MA Experiment 108607 PARAMETER Experiment Name: At_100uM_ABA_cDNA_P Parameter: Treatment Value: 100uM ABA vs. No Treatment
  misc_feature: MA Experiment ID: 108668 Result: Up-regulated in Transcription
  misc_feature: MA Experiment 108668 PARAMETER Experiment Name: At_2mM_SA_cDNA_P Parameter: Plant Line Value: WS
  misc_feature: MA Experiment 108668 PARAMETER Experiment Name: At_2mM_SA_cDNA_P Parameter: Timepoint (hr) Value: 6
  misc_feature: MA Experiment 108668 PARAMETER Experiment Name: At_2mM_SA_cDNA_P Parameter: Treatment Value: 2mM SA vs. No Treatment
  misc_feature: MA Experiment ID: 20000087 Result: Up-regulated in Transcription
  misc_feature: MA Experiment 20000087 PARAMETER Experiment Name: At_100uM_ABA_Mutants_cDNA_P Parameter: Plant Line Value: WS
  misc_feature: MA Experiment 20000087 PARAMETER Experiment Name: At_100uM_ABA_Mutants_cDNA_P Parameter: Timepoint (hr) Value: 6
  misc_feature: MA Experiment 20000087 PARAMETER Experiment Name: At_100uM_ABA_Mutants_cDNA_P Parameter: Tissue Value: Aerial
  misc_feature: MA Experiment 20000087 PARAMETER Experiment Name: At_100uM_ABA_Mutants_cDNA_P Parameter: Treatment Value: 100uM ABA vs. No Treatment
  misc_feature: MA Experiment ID: 20000166 Result: Down-regulated in Transcription
  misc_feature: MA Experiment 20000166 PARAMETER Experiment Name: At_100uM_ABA_P Parameter: Age (day) Value: 14
  misc_feature: MA Experiment 20000166 PARAMETER Experiment Name: At_100uM_ABA_P Parameter: Organism Value: A. thaliana
  misc_feature: MA Experiment 20000166 PARAMETER Experiment Name: At_100uM_ABA_P Parameter: Plant Line Value: WS
  misc_feature: MA Experiment 20000166 PARAMETER Experiment Name: At_100uM_ABA_P Parameter: Timepoint (hr) Value: 1
  misc_feature: MA Experiment 20000166 PARAMETER Experiment Name: At_100uM_ABA_P Parameter: Tissue Value: Aerial
  misc_feature: MA Experiment 20000166 PARAMETER Experiment Name: At_100uM_ABA_P Parameter: Treatment Value: 100uM ABA vs. No Treatment
  misc_feature: MA Experiment ID: 20000169 Result: Up-regulated in Transcription
  misc_feature: MA Experiment 20000169 PARAMETER Experiment Name: At_100uM_ABA_P Parameter: Age (day) Value: 14
  misc_feature: MA Experiment 20000169 PARAMETER Experiment Name: At_100uM_ABA_P Parameter: Organism Value: A. thaliana
  misc_feature: MA Experiment 20000169 PARAMETER Experiment Name: At_100uM_ABA_P Parameter: Plant Line Value: WS
  misc_feature: MA Experiment 20000169 PARAMETER Experiment Name: At_100uM_ABA_P Parameter: Timepoint (hr) Value: 6
  misc_feature: MA Experiment 20000169 PARAMETER Experiment Name: At_100uM_ABA_P Parameter: Tissue Value: Aerial
  misc_feature: MA Experiment 20000169 PARAMETER Experiment Name: At_100uM_ABA_P Parameter: Treatment Value: 100uM ABA vs. No Treatment
  misc_feature: MA Experiment ID: 20000171 Result: Down-regulated in Transcription
  misc_feature: MA Experiment 20000171 PARAMETER Experiment Name: At_42deg_Heat_P Parameter: Age (day) Value: 14
  misc_feature: MA Experiment 20000171 PARAMETER Experiment Name: At_42deg_Heat_P Parameter: Organism Value: A. thaliana
  misc_feature: MA Experiment 20000171 PARAMETER Experiment Name: At_42deg_Heat_P Parameter: Plant Line Value: WS
  misc_feature: MA Experiment 20000171 PARAMETER Experiment Name: At_42deg_Heat_P Parameter: Temperature (deg C) Value: 42 vs. 22
  misc_feature: MA Experiment 20000171 PARAMETER Experiment Name: At_42deg_Heat_P Parameter: Timepoint (hr) Value: 1
  misc_feature: MA Experiment 20000171 PARAMETER Experiment Name: At_42deg_Heat_P Parameter: Tissue Value: Aerial
  misc_feature: MA Experiment ID: 20000173 Result: Down-regulated in Transcription
  misc_feature: MA Experiment 20000173 PARAMETER Experiment Name: At_42deg_Heat_P Parameter: Age (day) Value: 14
  misc_feature: MA Experiment 20000173 PARAMETER Experiment Name: At_42deg_Heat_P Parameter: Organism Value: A. thaliana
  misc_feature: MA Experiment 20000173 PARAMETER Experiment Name: At_42deg_Heat_P Parameter: Plant Line Value: WS
  misc_feature: MA Experiment 20000173 PARAMETER Experiment Name: At_42deg_Heat_P Parameter: Temperature (deg C) Value: 42 vs. 22
  misc_feature: MA Experiment 20000173 PARAMETER Experiment Name: At_42deg_Heat_P Parameter: Timepoint (hr) Value: 6
  misc_feature: MA Experiment 20000173 PARAMETER Experiment Name: At_42deg_Heat_P Parameter: Tissue Value: Aerial
  misc_feature: MA Experiment ID: 20000180 Result: Up-regulated in Transcription
  misc_feature: MA Experiment 20000180 PARAMETER Experiment Name: At_Germinating_Seeds_P Parameter: Age (hr) Value: 24 vs. 0
  misc_feature: MA Experiment 20000180 PARAMETER Experiment Name: At_Germinating_Seeds_P Parameter: Tissue Value: Germinating Seeds
  misc_feature: MA Experiment ID: 20000182 Result: Up-regulated in Transcription
  misc_feature: MA Experiment 20000182 PARAMETER Experiment Name: At_2mM_SA_P Parameter: Age (day) Value: 14
  misc_feature: MA Experiment 20000182 PARAMETER Experiment Name: At_2mM_SA_P Parameter: Organism Value: A. thaliana
  misc_feature: MA Experiment 20000182 PARAMETER Experiment Name: At_2mM_SA_P Parameter: Plant Line Value: WS
  misc_feature: MA Experiment 20000182 PARAMETER Experiment Name: At_2mM_SA_P Parameter: Timepoint (hr) Value: 6
  misc_feature: MA Experiment 20000182 PARAMETER Experiment Name: At_2mM_SA_P Parameter: Tissue Value: Aerial
  misc_feature: MA Experiment 20000182 PARAMETER Experiment Name: At_2mM_SA_P Parameter: Treatment Value: 2mM SA vs. No Treatment
  misc_feature: MA Experiment ID: 20000213 Result: Down-regulated in Transcription
  misc_feature: MA Experiment 20000213 PARAMETER Experiment Name: At_4deg_Cold_P Parameter: Timepoint (hr) Value: 2
  misc_feature: MA Experiment ID: 20000234 Result: Down-regulated in Transcription
  misc_feature: MA Experiment 20000234 PARAMETER Experiment Name: At_Siliques_P Parameter: Age (day) Value: 21
  misc_feature: MA Experiment 20000234 PARAMETER Experiment Name: At_Siliques_P Parameter: Organism Value: A. thaliana
  misc_feature: MA Experiment 20000234 PARAMETER Experiment Name: At_Siliques_P Parameter: Plant Line Value: WS
  misc_feature: MA Experiment 20000234 PARAMETER Experiment Name: At_Siliques_P Parameter: Tissue Value: Less Than 5mm Siliques vs. Whole Plant
  misc_feature: MA Experiment ID: 20000265 Result: Down-regulated in Transcription
  misc_feature: MA Experiment 20000265 PARAMETER Experiment Name: At_Open_Flower_P Parameter: Age (day) Value: 21
  misc_feature: MA Experiment 20000265 PARAMETER Experiment Name: At_Open_Flower_P Parameter: Plant Line Value: WS
  misc_feature: MA Experiment 20000265 PARAMETER Experiment Name: At_Open_Flower_P Parameter: Tissue Value: Closed Flower vs. Whole Plant
  misc_feature: MA Experiment ID: 20000267 Result: Down-regulated in Transcription
  misc_feature: MA Experiment 20000267 PARAMETER Experiment Name: At_Drought_P Parameter: Age (day) Value: 7
  misc_feature: MA Experiment 20000267 PARAMETER Experiment Name: At_Drought_P Parameter: Organism Value: A. thaliana
  misc_feature: MA Experiment 20000267 PARAMETER Experiment Name: At_Drought_P Parameter: Plant Line Value: WS
  misc_feature: MA Experiment 20000267 PARAMETER Experiment Name: At_Drought_P Parameter: Timepoint (hr) Value: 6
  misc_feature: MA Experiment 20000267 PARAMETER Experiment Name: At_Drought_P Parameter: Tissue Value: Whole Plant
  misc_feature: MA Experiment 20000267 PARAMETER Experiment Name: At_Drought_P Parameter: Treatment Value: Drought vs. No Drought
  misc_feature: MA Experiment ID: 20000269 Result: Down-regulated in Transcription
  misc_feature: MA Experiment 20000269 PARAMETER Experiment Name: At_1mM_KNO3_L-vs-H_Roots_P Parameter: Age (day) Value: 7,10,12
  misc_feature: MA Experiment 20000269 PARAMETER Experiment Name: At_1mM_KNO3_L-vs-H_Roots_P Parameter: Organism Value: A. thaliana
  misc_feature: MA Experiment 20000269 PARAMETER Experiment Name: At_1mM_KNO3_L-vs-H_Roots_P Parameter: Plant Line Value: WS
  misc_feature: MA Experiment 20000269 PARAMETER Experiment Name: At_1mM_KNO3_L-vs-H_Roots_P Parameter: Timepoint (day) Value: 7,10,12
  misc_feature: MA Experiment 20000269 PARAMETER Experiment Name: At_1mM_KNO3_L-vs-H_Roots_P Parameter: Tissue Value: Roots
  misc_feature: MA Experiment 20000269 PARAMETER Experiment Name: At_1mM_KNO3_L-vs-H_Roots_P Parameter: Treatment Value: 1mM KNO3 vs. 50mM KNO3
  misc_feature: MA Experiment ID: 20000308 Result: Down-regulated in Transcription
  misc_feature: MA Experiment 20000308 PARAMETER Experiment Name: At_100mM_NaCl__P Parameter: Age (day) Value: 17
  misc_feature: MA Experiment 20000308 PARAMETER Experiment Name: At_100mM_NaCl__P Parameter: Organism Value: A. thaliana
  misc_feature: MA Experiment 20000308 PARAMETER Experiment Name: At_100mM_NaCl__P Parameter: Plant Line Value: WS
  misc_feature: MA Experiment 20000308 PARAMETER Experiment Name: At_100mM_NaCl__P Parameter: Timepoint (hr) Value: 72
  misc_feature: MA Experiment 20000308 PARAMETER Experiment Name: At_100mM_NaCl__P Parameter: Tissue Value: Whole Plant
  misc_feature: MA Experiment 20000308 PARAMETER Experiment Name: At_100mM_NaCl__P Parameter: Treatment Value: 100mM NaCl vs. No Treatment
  misc_feature: MA Experiment ID: 20000436 Result: Down-regulated in Transcription
  misc_feature: MA Experiment 20000436 PARAMETER Experiment Name: At_Drought_P Parameter: Age (day) Value: 7
  misc_feature: MA Experiment 20000436 PARAMETER Experiment Name: At_Drought_P Parameter: Organism Value: A. thaliana
  misc_feature: MA Experiment 20000436 PARAMETER Experiment Name: At_Drought_P Parameter: Plant Line Value: WS
  misc_feature: MA Experiment 20000436 PARAMETER Experiment Name: At_Drought_P Parameter: Timepoint (hr) Value: 12
  misc_feature: MA Experiment 20000436 PARAMETER Experiment Name: At_Drought_P Parameter: Tissue Value: Whole Plant
  misc_feature: MA Experiment 20000436 PARAMETER Experiment Name: At_Drought_P Parameter: Treatment Value: Drought vs. No Drought
  misc_feature: MA Experiment ID: 20000438 Result: Down-regulated in Transcription
  misc_feature: MA Experiment 20000438 PARAMETER Experiment Name: At_Shoots__P Parameter: Age (day) Value: 14
  misc_feature: MA Experiment 20000438 PARAMETER Experiment Name: At_Shoots__P Parameter: Tissue Value: Shoots vs. Whole Plant
  misc_feature: MA Experiment ID: 20000441 Result: Up-regulated in Transcription
  misc_feature: MA Experiment 20000441 PARAMETER Experiment Name: At_1uM_BR-BRZ__P Parameter: Tissue Value: Shoot Apices
  misc_feature: MA Experiment 20000441 PARAMETER Experiment Name: At_1uM_BR-BRZ__P Parameter: Treatment Value: 1uM BR vs. No Treatment
  misc_feature: MA Experiment ID: 20000443 Result: Up-regulated in Transcription
  misc_feature: MA Experiment 20000443 PARAMETER Experiment Name: At_1uM_BR-BRZ__P Parameter: Tissue Value: Shoot Apices
  misc_feature: MA Experiment 20000443 PARAMETER Experiment Name: At_1uM_BR-BRZ__P Parameter: Treatment Value: 1uM BRZ vs. No Treatment
  misc_feature: MA Experiment ID: 20000451 Result: Down-regulated in Transcription
  misc_feature: MA Experiment 20000451 PARAMETER Experiment Name: At_CS6879_Shoots-Roots_P Parameter: Age (day) Value: 14
  misc_feature: MA Experiment 20000451 PARAMETER Experiment Name: At_CS6879_Shoots-Roots_P Parameter: Organism Value: A. thaliana
  misc_feature: MA Experiment 20000451 PARAMETER Experiment Name: At_CS6879_Shoots-Roots_P Parameter: Plant Line Value: CS6879 vs. WS
  misc_feature: MA Experiment 20000451 PARAMETER Experiment Name: At_CS6879_Shoots-Roots_P Parameter: Tissue Value: Roots
  misc_feature: MA Experiment ID: 20000452 Result: Down-regulated in Transcription
  misc_feature: MA Experiment 20000452 PARAMETER Experiment Name: At_CS6879_Shoots-Roots_P Parameter: Age (day) Value: 14
  misc_feature: MA Experiment 20000452 PARAMETER Experiment Name: At_CS6879_Shoots-Roots_P Parameter: Organism Value: A. thaliana
  misc_feature: MA Experiment 20000452 PARAMETER Experiment Name: At_CS6879_Shoots-Roots_P Parameter: Plant Line Value: CS6879 vs. WS
  misc_feature: MA Experiment 20000452 PARAMETER Experiment Name: At_CS6879_Shoots-Roots_P Parameter: Tissue Value: Shoots
  misc_feature: MA Experiment ID: 20000495 Result: Down-regulated in Transcription
  misc_feature: MA Experiment 20000495 PARAMETER Experiment Name: At_Guard_Cells_P Parameter: Harvest Date Value: 8/2/2002
  misc_feature: MA Experiment 20000495 PARAMETER Experiment Name: At_Guard_Cells_P Parameter: Organism Value: A. thaliana
  misc_feature: MA Experiment 20000495 PARAMETER Experiment Name: At_Guard_Cells_P Parameter: Tissue Value: Guard Cells vs. Leaves
  misc_feature: MA Experiment ID: 20000574 Result: Up-regulated in Transcription
  misc_feature: MA Experiment 20000574 PARAMETER Experiment Name: At_100uM_ABA_Mutants__P Parameter: Organism Value: A. thaliana
  misc_feature: MA Experiment 20000574 PARAMETER Experiment Name: At_100uM_ABA_Mutants__P Parameter: Plant Line Value: CS23 vs. Ler wt
  misc_feature: MA Experiment 20000574 PARAMETER Experiment Name: At_100uM_ABA_Mutants__P Parameter: Timepoint (hr) Value: N/A
  misc_feature: MA Experiment 20000574 PARAMETER Experiment Name: At_100uM_ABA_Mutants__P Parameter: Tissue Value: Whole Plant
  misc_feature: MA Experiment 20000574 PARAMETER Experiment Name: At_100uM_ABA_Mutants__P Parameter: Treatment Value: None
  misc_feature: MA Experiment ID: 20000606 Result: Up-regulated in Transcription
  misc_feature: MA Experiment 20000606 PARAMETER Experiment Name: At_CS8548_Mutant_P Parameter: Age (day) Value: 14
  misc_feature: MA Experiment 20000606 PARAMETER Experiment Name: At_CS8548_Mutant_P Parameter: Plant Line Value: CS8548 vs. wt
  misc_feature: MA Experiment 20000606 PARAMETER Experiment Name: At_CS8548_Mutant_P Parameter: Tissue Value: Whole Plant
  misc_feature: MA Experiment ID: 20000794 Result: Up-regulated in Transcription
  misc_feature: MA Experiment 20000794 PARAMETER Experiment Name: At_Petals_P Parameter: Age (day) Value: 23-25 days
  misc_feature: MA Experiment 20000794 PARAMETER Experiment Name: At_Petals_P Parameter: Plant Line Value: WS
  misc_feature: MA Experiment 20000794 PARAMETER Experiment Name: At_Petals_P Parameter: Tissue Value: Petals vs. Whole plant
  misc_feature: MA Experiment ID: 20001247 Result: Up-regulated in Transcription
  misc_feature: MA Experiment 20001247 PARAMETER Experiment Name: At_Far-red-induction_P Parameter: Age (day) Value: 7
  misc_feature: MA Experiment 20001247 PARAMETER Experiment Name: At_Far-red-induction_P Parameter: Light Value: Far-red vs. White
  misc_feature: MA Experiment 20001247 PARAMETER Experiment Name: At_Far-red-induction_P Parameter: Organism Value: A. thaliana
  misc_feature: MA Experiment 20001247 PARAMETER Experiment Name: At_Far-red-induction_P Parameter: Plant Line Value: Columbia
  misc_feature: MA Experiment 20001247 PARAMETER Experiment Name: At_Far-red-induction_P Parameter: Timepoint (hr) Value: 1
  misc_feature: MA Experiment 20001247 PARAMETER Experiment Name: At_Far-red-induction_P Parameter: Tissue Value: Whole Plant
  misc_feature: MA Experiment ID: 20001248 Result: Up-regulated in Transcription
  misc_feature: MA Experiment 20001248 PARAMETER Experiment Name: At_Far-red-induction_P Parameter: Age (day) Value: 7
  misc_feature: MA Experiment 20001248 PARAMETER Experiment Name: At_Far-red-induction_P Parameter: Light Value: Far-red vs. White
  misc_feature: MA Experiment 20001248 PARAMETER Experiment Name: At_Far-red-induction_P Parameter: Organism Value: A. thaliana
  misc_feature: MA Experiment 20001248 PARAMETER Experiment Name: At_Far-red-induction_P Parameter: Plant Line Value: Columbia
  misc_feature: MA Experiment 20001248 PARAMETER Experiment Name: At_Far-red-induction_P Parameter: Timepoint (hr) Value: 4
  misc_feature: MA Experiment 20001248 PARAMETER Experiment Name: At_Far-red-induction_P Parameter: Tissue Value: Whole Plant
  misc_feature: MA Experiment ID: 20001450 Result: Up-regulated in Transcription
  misc_feature: MA Experiment 20001450 PARAMETER Experiment Name: At_Far-red-induction_P Parameter: Age (day) Value: 7
  misc_feature: MA Experiment 20001450 PARAMETER Experiment Name: At_Far-red-induction_P Parameter: Light Value: Far-red vs. White
  misc_feature: MA Experiment 20001450 PARAMETER Experiment Name: At_Far-red-induction_P Parameter: Organism Value: A. thaliana
  misc_feature: MA Experiment 20001450 PARAMETER Experiment Name: At_Far-red-induction_P Parameter: Plant Line Value: Columbia
  misc_feature: MA Experiment 20001450 PARAMETER Experiment Name: At_Far-red-induction_P Parameter: Timepoint (hr) Value: 8
  misc_feature: MA Experiment 20001450 PARAMETER Experiment Name: At_Far-red-induction_P Parameter: Tissue Value: Whole Plant
  misc_feature: MA Experiment ID: 20001451 Result: Up-regulated in Transcription
  misc_feature: MA Experiment 20001451 PARAMETER Experiment Name: At_Far-red-induction_P Parameter: Age (day) Value: 7
  misc_feature: MA Experiment 20001451 PARAMETER Experiment Name: At_Far-red-induction_P Parameter: Light Value: Far-red vs. White
  misc_feature: MA Experiment 20001451 PARAMETER Experiment Name: At_Far-red-induction_P Parameter: Organism Value: A. thaliana
  misc_feature: MA Experiment 20001451 PARAMETER Experiment Name: At_Far-red-induction_P Parameter: Plant Line Value: Columbia
  misc_feature: MA Experiment 20001451 PARAMETER Experiment Name: At_Far-red-induction_P Parameter: Timepoint (hr) Value: 24
  misc_feature: MA Experiment 20001451 PARAMETER Experiment Name: At_Far-red-induction_P Parameter: Tissue Value: Whole Plant
  misc_feature: MA Experiment ID: 20001555 Result: Down-regulated in Transcription
  misc_feature: MA Experiment 20001555 PARAMETER Experiment Name: At_Drought_Soil_Dry_P Parameter: Age (day) Value: 24
  misc_feature: MA Experiment 20001555 PARAMETER Experiment Name: At_Drought_Soil_Dry_P Parameter: Organism Value: A. thaliana
  misc_feature: MA Experiment 20001555 PARAMETER Experiment Name: At_Drought_Soil_Dry_P Parameter: Plant Line Value: WS
  misc_feature: MA Experiment 20001555 PARAMETER Experiment Name: At_Drought_Soil_Dry_P Parameter: Post Timepoint (hr) Value: None
  misc_feature: MA Experiment 20001555 PARAMETER Experiment Name: At_Drought_Soil_Dry_P Parameter: Post-Treatment Value: None
  misc_feature: MA Experiment 20001555 PARAMETER Experiment Name: At_Drought_Soil_Dry_P Parameter: Timepoint (day) Value: 10
  misc_feature: MA Experiment 20001555 PARAMETER Experiment Name: At_Drought_Soil_Dry_P Parameter: Treatment Value: Drought vs. No Drought
  misc_feature: MA Experiment ID: 20001556 Result: Down-regulated in Transcription
  misc_feature: MA Experiment 20001556 PARAMETER Experiment Name: At_Drought_Soil_Dry_P Parameter: Age (day) Value: 26
  misc_feature: MA Experiment 20001556 PARAMETER Experiment Name: At_Drought_Soil_Dry_P Parameter: Organism Value: A. thaliana
  misc_feature: MA Experiment 20001556 PARAMETER Experiment Name: At_Drought_Soil_Dry_P Parameter: Plant Line Value: WS
  misc_feature: MA Experiment 20001556 PARAMETER Experiment Name: At_Drought_Soil_Dry_P Parameter: Post Timepoint (hr) Value: None
  misc_feature: MA Experiment 20001556 PARAMETER Experiment Name: At_Drought_Soil_Dry_P Parameter: Post-Treatment Value: None
  misc_feature: MA Experiment 20001556 PARAMETER Experiment Name: At_Drought_Soil_Dry_P Parameter: Timepoint (day) Value: 12
  misc_feature: MA Experiment 20001556 PARAMETER Experiment Name: At_Drought_Soil_Dry_P Parameter: Treatment Value: Drought vs. No Drought
  misc_feature: MA Experiment ID: 20001558 Result: Down-regulated in Transcription
  misc_feature: MA Experiment 20001558 PARAMETER Experiment Name: At_Drought_Soil_Dry_P Parameter: Age (day) Value: 27
  misc_feature: MA Experiment 20001558 PARAMETER Experiment Name: At_Drought_Soil_Dry_P Parameter: Organism Value: A. thaliana
  misc_feature: MA Experiment 20001558 PARAMETER Experiment Name: At_Drought_Soil_Dry_P Parameter: Plant Line Value: WS
  misc_feature: MA Experiment 20001558 PARAMETER Experiment Name: At_Drought_Soil_Dry_P Parameter: Post Timepoint (hr) Value: 6
  misc_feature: MA Experiment 20001558 PARAMETER Experiment Name: At_Drought_Soil_Dry_P Parameter: Post-Treatment Value: Re-Water vs. No Drought
  misc_feature: MA Experiment 20001558 PARAMETER Experiment Name: At_Drought_Soil_Dry_P Parameter: Timepoint (day) Value: 13
  misc_feature: MA Experiment 20001558 PARAMETER Experiment Name: At_Drought_Soil_Dry_P Parameter: Treatment Value: Drought vs. No Drought
  misc_feature: MA Experiment ID: 20001559 Result: Down-regulated in Transcription
  misc_feature: MA Experiment 20001559 PARAMETER Experiment Name: At_Drought_Soil_Dry_P Parameter: Age (day) Value: 28
  misc_feature: MA Experiment 20001559 PARAMETER Experiment Name: At_Drought_Soil_Dry_P Parameter: Organism Value: A. thaliana
  misc_feature: MA Experiment 20001559 PARAMETER Experiment Name: At_Drought_Soil_Dry_P Parameter: Plant Line Value: WS
  misc_feature: MA Experiment 20001559 PARAMETER Experiment Name: At_Drought_Soil_Dry_P Parameter: Post Timepoint (hr) Value: 29
  misc_feature: MA Experiment 20001559 PARAMETER Experiment Name: At_Drought_Soil_Dry_P Parameter: Post-Treatment Value: Re-Water vs. No Drought
  misc_feature: MA Experiment 20001559 PARAMETER Experiment Name: At_Drought_Soil_Dry_P Parameter: Timepoint (day) Value: 14
  misc_feature: MA Experiment 20001559 PARAMETER Experiment Name: At_Drought_Soil_Dry_P Parameter: Treatment Value: Drought vs. No Drought
  misc_feature: MA Experiment ID: 20001560 Result: Down-regulated in Transcription
  misc_feature: MA Experiment 20001560 PARAMETER Experiment Name: At_Drought_Soil_Dry_P Parameter: Age (day) Value: 28
  misc_feature: MA Experiment 20001560 PARAMETER Experiment Name: At_Drought_Soil_Dry_P Parameter: Organism Value: A. thaliana
  misc_feature: MA Experiment 20001560 PARAMETER Experiment Name: At_Drought_Soil_Dry_P Parameter: Plant Line Value: WS
  misc_feature: MA Experiment 20001560 PARAMETER Experiment Name: At_Drought_Soil_Dry_P Parameter: Post Timepoint (hr) Value: None
  misc_feature: MA Experiment 20001560 PARAMETER Experiment Name: At_Drought_Soil_Dry_P Parameter: Post-Treatment Value: None
  misc_feature: MA Experiment 20001560 PARAMETER Experiment Name: At_Drought_Soil_Dry_P Parameter: Timepoint (day) Value: 14
  misc_feature: MA Experiment 20001560 PARAMETER Experiment Name: At_Drought_Soil_Dry_P Parameter: Treatment Value: Drought vs. No Drought
  misc_feature: MA Experiment ID: 20001757 Result: Up-regulated in Transcription
  misc_feature: MA Experiment 20001757 PARAMETER Experiment Name: At_50mM_NH4NO3_L-to-H_P Parameter: Timepoint (hr) Value: 6
  misc_feature: MA Experiment 20001757 PARAMETER Experiment Name: At_50mM_NH4NO3_L-to-H_P Parameter: Tissue Value: Leaf
  misc_feature: MA Experiment 20001757 PARAMETER Experiment Name: At_50mM_NH4NO3_L-to-H_P Parameter: Treatment Value: 50mM NH4NO3 vs 100mM Mannitol
  misc_feature: MA Experiment ID: 20001769 Result: Down-regulated in Transcription
  misc_feature: MA Experiment 20001769 PARAMETER Experiment Name: At_Far-red-enriched-adult_P Parameter: Age (day) Value: 28
  misc_feature: MA Experiment 20001769 PARAMETER Experiment Name: At_Far-red-enriched-adult_P Parameter: Light Value: Far-red enriched vs. White
  misc_feature: MA Experiment 20001769 PARAMETER Experiment Name: At_Far-red-enriched-adult_P Parameter: Organism Value: A. thaliana
  misc_feature: MA Experiment 20001769 PARAMETER Experiment Name: At_Far-red-enriched-adult_P Parameter: Plant Line Value: Columbia
  misc_feature: MA Experiment 20001769 PARAMETER Experiment Name: At_Far-red-enriched-adult_P Parameter: Timepoint (hr) Value: 4
  misc_feature: MA Experiment 20001769 PARAMETER Experiment Name: At_Far-red-enriched-adult_P Parameter: Tissue Value: Aerial
  misc_feature: MA Experiment ID: 20001770 Result: Down-regulated in Transcription
  misc_feature: MA Experiment 20001770 PARAMETER Experiment Name: At_Far-red-enriched-adult_P Parameter: Age (day) Value: 28
  misc_feature: MA Experiment 20001770 PARAMETER Experiment Name: At_Far-red-enriched-adult_P Parameter: Light Value: Far-red enriched vs. White
  misc_feature: MA Experiment 20001770 PARAMETER Experiment Name: At_Far-red-enriched-adult_P Parameter: Organism Value: A. thaliana
  misc_feature: MA Experiment 20001770 PARAMETER Experiment Name: At_Far-red-enriched-adult_P Parameter: Plant Line Value: Columbia
  misc_feature: MA Experiment 20001770 PARAMETER Experiment Name: At_Far-red-enriched-adult_P Parameter: Timepoint (hr) Value: 8
  misc_feature: MA Experiment 20001770 PARAMETER Experiment Name: At_Far-red-enriched-adult_P Parameter: Tissue Value: Aerial
  misc_feature: MA Experiment ID: 20001773 Result: Up-regulated in Transcription
  misc_feature: MA Experiment 20001773 PARAMETER Experiment Name: At_Far-red-enriched-adult_P Parameter: Age (day) Value: 30
  misc_feature: MA Experiment 20001773 PARAMETER Experiment Name: At_Far-red-enriched-adult_P Parameter: Light Value: Far-red enriched vs. White
  misc_feature: MA Experiment 20001773 PARAMETER Experiment Name: At_Far-red-enriched-adult_P Parameter: Organism Value: A. thaliana
  misc_feature: MA Experiment 20001773 PARAMETER Experiment Name: At_Far-red-enriched-adult_P Parameter: Plant Line Value: Columbia
  misc_feature: MA Experiment 20001773 PARAMETER Experiment Name: At_Far-red-enriched-adult_P Parameter: Timepoint (hr) Value: 48
  misc_feature: MA Experiment 20001773 PARAMETER Experiment Name: At_Far-red-enriched-adult_P Parameter: Tissue Value: Aerial
  misc_feature: MA Experiment ID: 20001905 Result: Down-regulated in Transcription
  misc_feature: MA Experiment 20001905 PARAMETER Experiment Name: At_Drought_Reproduction_P Parameter: Age (day) Value: 40
  misc_feature: MA Experiment 20001905 PARAMETER Experiment Name: At_Drought_Reproduction_P Parameter: Organism Value: A. thaliana
  misc_feature: MA Experiment 20001905 PARAMETER Experiment Name: At_Drought_Reproduction_P Parameter: Plant Line Value: WS
  misc_feature: MA Experiment 20001905 PARAMETER Experiment Name: At_Drought_Reproduction_P Parameter: Timepoint (day) Value: 10
  misc_feature: MA Experiment 20001905 PARAMETER Experiment Name: At_Drought_Reproduction_P Parameter: Tissue Value: Rosettes
  misc_feature: MA Experiment 20001905 PARAMETER Experiment Name: At_Drought_Reproduction_P Parameter: Treatment Value: Drought vs. No Drought
tatatatataactccaaaacaatcatttaatccaaacccaacatatccttttaacagaatcttctttatctgaaaatatctaaagaaaatggtattgaactttagagataagtcctgcatttttctggcaattctttgttgtttatcattgagttgtatagtaaaagcatcagtctcttatgatcgtaaagctgtgatcatcaatggacaaagaagaatccttctctccggttccattcactatccacgaagcacccctgagatgtggcctggcctaatacagaaagccaaagaaggaggcttggatgttattgagacttatgttttttggaatggccatgaaccttctcctggacaatattattttggagacaggtatgatttggttaagttcatcaagttggtgcaccaagctggtctctatgttaatctcagaattggcccttatgtttgtgctgaatggaattttgggggatttccggtttggctcaaatttgttcccggtatggcttttaggacggataatgaacctttcaaggctgcaatgaagaaattcactgaaaagattgtatggatgatgaaagcagaaaagttgtttcaaactcaaggaggacccatcattcttgcacagattgagaatgaatatggaccagtggaatgggaaataggagcaccgggaaaggcttatacaaaatgggtagctcaaatggcattaggactctcaactggtgttccatggattatgtgcaagcaagaagatgctcctggtcctatcatagacacatgcaatggttattactgtgaagatttcaaaccgaactcaatcaacaagccaaagatgtggacagagaattggactggttggtacacagattttggaggtgcggtaccatacagaccagtcgaagatattgcatactccgttgcacgatttatccaaaaaggaggttccctcgtcaattactatatgtatcatggaggaacaaatttcgacagaacagccggtgagttcatggcttcaagctatgactatgacgctcctctcgatgaatacggcttaccaagagaaccaaagtatagtcacttgaaagcattgcataaagccatcaaacttagtgagccagctttgctttctgctgatgctaccgttacatcgcttggagctaagcaagaagcttatgtgttctggtctaaatcatcttgtgctgcgtttttatcgaacaaagatgagaactctgcagcgagagttctgttccgtggattcccatatgatttgcctccttggtcagtcagtattttacctgattgcaaaacagaggtttacaacactgcaaaggtcaatgcaccaagcgtacacaggaatatggttcctactggtactaaattctcttggggatcattcaacgaagcgactcctacagcgaatgaagctggtacgtttgcaagaaacgggcttgtggaacaaataagcatgacttgggacaaatctgactatttttggtatataacagacattacaatcggttccggtgagacatttttgaagactggtgattcacctcttcttacagttatgtcagctggacatgctcttcatgtgtttgtcaatggtcagctttcaggaactgcttatggaggacttgaccacccaaaactaacctttagccagaagatcaaactacatgcaggtgtcaacaagattgctcttctgagtgttgcagtgggtctcccgaacgttggtacacattttgaacagtggaataaaggagttcttggtccggtcacattgaagggagtaaactcaggaacatgggacatgtcgaaatggaaatggtcctataagattggtgtaaagggtgaggctttgagtcttcataccaacacagagagttccggtgtgagatggactcaaggatcatttgtggcgaagaagcaaccattaacctggtacaagtctacgtttgctacaccagcaggaaatgaaccattggctttagacatgaacacaatgggaaaaggtcaagtttggataaacggtagaaatattggacgtcattggcctgcatataaagctcaaggatcttgtggacgttgtaactacgctggaactttcgacgcaaagaaatgcttaagtaattgtggtgaagcttcacaaagatggtaccatgtacctcgttcatggcttaagtctcaaaaccttatagttgtgttcgaagagttaggtggtgatcctaacggaatctctttggttaaaagaacatgaaaagcttcttctgattccgagttttcaggacagaagcaagctgtttgattcgtttgtctatatctttctctggctttgctttgaagatagagacagagctggaattttttttcttttatggctttgtgcagtgattacaaaaattatacaacatgtatatgtataactgtatcctactactagtcatcatctatggctaaataaaattcacagaataaaggagtgtttctatttaccataacattttcgtttgttcaagcaaataactgtttcaatcatctcttgaagttggaacc

SEQ ID NO: 99249 - protein, 724 aa, Arabidopsis thaliana
  peptide (1)..(724): Ceres Seq. ID no. 13602482
  misc_feature (8)..(723): Homolog of NCBI NO: 3869280 NR Description: beta-galactosidase precursor [Carica papaya]
  misc_feature (19)..(723): Homolog of NCBI NO: 1352078 NR Description: Beta-galactosidase precursor (Lactase) (Acid beta-
  misc_feature (19)..(723): Homolog of NCBI NO: 12583687 NR Description: beta-D-galactosidase [Pyrus pyrifolia]
  misc_feature (23)..(724): Homolog of NCBI NO: 7682677 NR Description: beta galactosidase [Vigna radiata]
  misc_feature (13)..(723): Homolog of NCBI NO: 14970839 NR Description: beta-galactosidase [Fragaria x ananassa]
  misc_feature (11)..(723): Homolog of NCBI NO: 1352077 NR Description: Beta-galactosidase precursor (Lactase) (Acid beta-
  misc_feature (27)..(723): Homolog of NCBI NO: 4138137 NR Description: ss-galactosidase [Lycopersicon esculentum]
  misc_feature (11)..(724): Homolog of NCBI NO: 1168654 NR Description: Beta-galactosidase precursor (Lactase)
  misc_feature (21)..(723): Homolog of NCBI NO: 15231354 NR Description: glycosyl hydrolase family 35 (beta-galactosidase)
  misc_feature (21)..(723): Homolog of NCBI NO: 20260596 NR Description: galactosidase, putative [Arabidopsis thaliana]
MVLNFRDKSCIFLAILCCLSLSCIVKASVSYDRKAVIINGQRRILLSGSIHYPRSTPEMWPGLIQKAKEGGLDVIETYVFWNGHEPSPGQYYFGDRYDLVKFIKLVHQAGLYVNLRIGPYVCAEWNFGGFPVWLKFVPGMAFRTDNEPFKAAMKKFTEKIVWMMKAEKLFQTQGGPIILAQIENEYGPVEWEIGAPGKAYTKWVAQMALGLSTGVPWIMCKQEDAPGPIIDTCNGYYCEDFKPNSINKPKMWTENWTGWYTDFGGAVPYRPVEDIAYSVARFIQKGGSLVNYYMYHGGTNFDRTAGEFMASSYDYDAPLDEYGLPREPKYSHLKALHKAIKLSEPALLSADATVTSLGAKQEAYVFWSKSSCAAFLSNKDENSAARVLFRGFPYDLPPWSVSILPDCKTEVYNTAKVNAPSVHRNMVPTGTKFSWGSFNEATPTANEAGTFARNGLVEQISMTWDKSDYFWYITDITIGSGETFLKTGDSPLLTVMSAGHALHVFVNGQLSGTAYGGLDHPKLTFSQKIKLHAGVNKIALLSVAVGLPNVGTHFEQWNKGVLGPVTLKGVNSGTWDMSKWKWSYKIGVKGEALSLHTNTESSGVRWTQGSFVAKKQPLTWYKSTFATPAGNEPLALDMNTMGKGQVWINGRNIGRHWPAYKAQGSCGRCNYAGTFDAKKCLSNCGEASQRWYHVPRSWLKSQNLIVVFEELGGDPNGISLVKRT

SEQ ID NO: 99250 - protein, 666 aa, Arabidopsis thaliana
  peptide (1)..(666): Ceres Seq. ID no. 13602483
  misc_feature (1)..(665): Homolog of NCBI NO: 3869280 NR Description: beta-galactosidase precursor [Carica papaya]
  misc_feature (1)..(665): Homolog of NCBI NO: 1352078 NR Description: Beta-galactosidase precursor (Lactase) (Acid beta-
  misc_feature (1)..(665): Homolog of NCBI NO: 12583687 NR Description: beta-D-galactosidase [Pyrus pyrifolia]
  misc_feature (1)..(666): Homolog of NCBI NO: 7682677 NR Description: beta galactosidase [Vigna radiata]
  misc_feature (1)..(665): Homolog of NCBI NO: 14970839 NR Description: beta-galactosidase [Fragaria x ananassa]
  misc_feature (1)..(665): Homolog of NCBI NO: 1352077 NR Description: Beta-galactosidase precursor (Lactase) (Acid beta-
  misc_feature (1)..(665): Homolog of NCBI NO: 4138137 NR Description: ss-galactosidase [Lycopersicon esculentum]
  misc_feature (1)..(666): Homolog of NCBI NO: 1168654 NR Description: Beta-galactosidase precursor (Lactase)
  misc_feature (1)..(665): Homolog of NCBI NO: 15231354 NR Description: glycosyl hydrolase family 35 (beta-galactosidase)
  misc_feature (1)..(665): Homolog of NCBI NO: 20260596 NR Description: galactosidase, putative [Arabidopsis thaliana]
MWPGLIQKAKEGGLDVIETYVFWNGHEPSPGQYYFGDRYDLVKFIKLVHQAGLYVNLRIGPYVCAEWNFGGFPVWLKFVPGMAFRTDNEPFKAAMKKFTEKIVWMMKAEKLFQTQGGPIILAQIENEYGPVEWEIGAPGKAYTKWVAQMALGLSTGVPWIMCKQEDAPGPIIDTCNGYYCEDFKPNSINKPKMWTENWTGWYTDFGGAVPYRPVEDIAYSVARFIQKGGSLVNYYMYHGGTNFDRTAGEFMASSYDYDAPLDEYGLPREPKYSHLKALHKAIKLSEPALLSADATVTSLGAKQEAYVFWSKSSCAAFLSNKDENSAARVLFRGFPYDLPPWSVSILPDCKTEVYNTAKVNAPSVHRNMVPTGTKFSWGSFNEATPTANEAGTFARNGLVEQISMTWDKSDYFWYITDITIGSGETFLKTGDSPLLTVMSAGHALHVFVNGQLSGTAYGGLDHPKLTFSQKIKLHAGVNKIALLSVAVGLPNVGTHFEQWNKGVLGPVTLKGVNSGTWDMSKWKWSYKIGVKGEALSLHTNTESSGVRWTQGSFVAKKQPLTWYKSTFATPAGNEPLALDMNTMGKGQVWINGRNIGRHWPAYKAQGSCGRCNYAGTFDAKKCLSNCGEASQRWYHVPRSWLKSQNLIVVFEELGGDPNGISLVKRT

SEQ ID NO: 99251 - protein, 585 aa, Arabidopsis thaliana
  peptide (1)..(585): Ceres Seq. ID no. 13602484
  misc_feature (1)..(584): Homolog of NCBI NO: 3869280 NR Description: beta-galactosidase precursor [Carica papaya]
  misc_feature (1)..(584): Homolog of NCBI NO: 1352078 NR Description: Beta-galactosidase precursor (Lactase) (Acid beta-
  misc_feature (1)..(584): Homolog of NCBI NO: 12583687 NR Description: beta-D-galactosidase [Pyrus pyrifolia]
  misc_feature (1)..(585): Homolog of NCBI NO: 7682677 NR Description: beta galactosidase [Vigna radiata]
  misc_feature (1)..(584): Homolog of NCBI NO: 14970839 NR Description: beta-galactosidase [Fragaria x ananassa]
  misc_feature (1)..(584): Homolog of NCBI NO: 1352077 NR Description: Beta-galactosidase precursor (Lactase) (Acid beta-
  misc_feature (1)..(584): Homolog of NCBI NO: 4138137 NR Description: ss-galactosidase [Lycopersicon esculentum]
  misc_feature (1)..(585): Homolog of NCBI NO: 1168654 NR Description: Beta-galactosidase precursor (Lactase)
  misc_feature (1)..(584): Homolog of NCBI NO: 15231354 NR Description: glycosyl hydrolase family 35 (beta-galactosidase)
  misc_feature (1)..(584): Homolog of NCBI NO: 20260596 NR Description: galactosidase, putative [Arabidopsis thaliana]
MAFRTDNEPFKAAMKKFTEKIVWMMKAEKLFQTQGGPIILAQIENEYGPVEWEIGAPGKAYTKWVAQMALGLSTGVPWIMCKQEDAPGPIIDTCNGYYCEDFKPNSINKPKMWTENWTGWYTDFGGAVPYRPVEDIAYSVARFIQKGGSLVNYYMYHGGTNFDRTAGEFMASSYDYDAPLDEYGLPREPKYSHLKALHKAIKLSEPALLSADATVTSLGAKQEAYVFWSKSSCAAFLSNKDENSAARVLFRGFPYDLPPWSVSILPDCKTEVYNTAKVNAPSVHRNMVPTGTKFSWGSFNEATPTANEAGTFARNGLVEQISMTWDKSDYFWYITDITIGSGETFLKTGDSPLLTVMSAGHALHVFVNGQLSGTAYGGLDHPKLTFSQKIKLHAGVNKIALLSVAVGLPNVGTHFEQWNKGVLGPVTLKGVNSGTWDMSKWKWSYKIGVKGEALSLHTNTESSGVRWTQGSFVAKKQPLTWYKSTFATPAGNEPLALDMNTMGKGQVWINGRNIGRHWPAYKAQGSCGRCNYAGTFDAKKCLSNCGEASQRWYHVPRSWLKSQNLIVVFEELGGDPNGISLVKRT

SEQ ID NO: 99252 - DNA, 1006 bp, Arabidopsis thaliana
  misc_feature (1)..(1006): Ceres Seq. ID no. 13602513
  misc_feature: MA Experiment ID: 108434 Result: Up-regulated in Transcription
  misc_feature: MA Experiment 108434 PARAMETER Experiment Name: At_Root_Tips_cDNA_P Parameter: Tissue Value: Root Tips
  misc_feature: MA Experiment ID: 108462 Result: Down-regulated in Transcription
  misc_feature: MA Experiment 108462 PARAMETER Experiment Name: At_Germinating_Seeds_cDNA_P Parameter: Age (day) Value: 2 vs. 0
  misc_feature: MA Experiment 108462 PARAMETER Experiment Name: At_Germinating_Seeds_cDNA_P Parameter: Tissue Value: Germinating Seeds
  misc_feature: MA Experiment ID: 108463 Result: Down-regulated in Transcription
  misc_feature: MA Experiment 108463 PARAMETER Experiment Name: At_Germinating_Seeds_cDNA_P Parameter: Age (day) Value: 3 vs. 0
  misc_feature: MA Experiment 108463 PARAMETER Experiment Name: At_Germinating_Seeds_cDNA_P Parameter: Tissue Value: Germinating Seeds
  misc_feature: MA Experiment ID: 108464 Result: Down-regulated in Transcription
  misc_feature: MA Experiment 108464 PARAMETER Experiment Name: At_Germinating_Seeds_cDNA_P Parameter: Age (day) Value: 4 vs. 0
  misc_feature: MA Experiment 108464 PARAMETER Experiment Name: At_Germinating_Seeds_cDNA_P Parameter: Tissue Value: Germinating Seeds
  misc_feature: MA Experiment ID: 20000111 Result: Up-regulated in Transcription
  misc_feature: MA Experiment 20000111 PARAMETER Experiment Name: At_42deg_Heat_cDNA_P Parameter: Temperature (deg C) Value: 42 vs. 22
  misc_feature: MA Experiment 20000111 PARAMETER Experiment Name: At_42deg_Heat_cDNA_P Parameter: Timepoint (hr) Value: 6
  misc_feature: MA Experiment 20000111 PARAMETER Experiment Name: At_42deg_Heat_cDNA_P Parameter: Tissue Value: Aerial
  misc_feature: MA Experiment ID: 20000113 Result: Up-regulated in Transcription
  misc_feature: MA Experiment 20000113 PARAMETER Experiment Name: At_42deg_Heat_cDNA_P Parameter: Temperature (deg C) Value: 42 vs. 22
  misc_feature: MA Experiment 20000113 PARAMETER Experiment Name: At_42deg_Heat_cDNA_P Parameter: Timepoint (hr) Value: 8
  misc_feature: MA Experiment 20000113 PARAMETER Experiment Name: At_42deg_Heat_cDNA_P Parameter: Tissue Value: Aerial
aaattggggaagaaaatttacagtgttgaaattggttaaaccctgacactagcaccttcctcagtcgcatcaccaccatgtcagagcgcgaccgccgcgaacgagagagggataaggaccgtgaaccagaccgtgatagacgccgaggtagagacgaccgtgaccgtgaccgtgatcgagaccgggaaagagatagagagcgcgaccgtgaccgagggcttagaaacaaaaaatcccgatctcgtactccagaccaccacgctcgtgctcgccacgtgcgctctccggagaggtatcgctctcgttcccgctcgattgaccgtgaccgggaccgggaccgtcaacgacaccacaggcgcaggtctccttctccagatgctccgtcgcgaaaacggcctcgccagggttcagtagacgatgagaaagaaaggaatcgcaaaagagtagtgactgattccgttgacgagaatgcgtctactattactaagaagaaggataaacaaccaagtgatgctgctgataatggcggaggcgaagatgaagaaggaatggatgtgaatgagattgagatgatgaagatgttagggattcctactggatttgattccacaaaaggcaaaccagttgctggtgctgatgttagtggtattagagctgtaactaagcgtcagccaagacagtacatgaaccgtcgcggtggatttaaccgtcctctaccggccgagcgtaatcgctagtcttctcaaggtccctctaacgctgtcttgaacactagtcaaaaagatgagggctagagctgcatttcccagatagtagttactagttactccaattcttccccagactctgttctgatgtcttatagagaacaaacttgtactctctgaatttggttggaaacaactcgtgagttatttctttttcgagatttaaaaatgttaatgtttgtgtgtaatctcccggctctaactgtcagactatggttcatttgaaatcaggcttattc

SEQ ID NO: 99253 - protein, 219 aa, Arabidopsis thaliana; identical to SEQ ID NO: 21848
  peptide (1)..(219): Ceres Seq. ID no. 13602514
  misc_feature (1)..(169): Pfam Name: SART-1 family Pfam Description: SART-1 family
  misc_feature (1)..(219): Homolog of NCBI NO: 18423973 NR Description: expressed protein [Arabidopsis thaliana] gene_id:MSF19.3~unknown protein [Arabidopsis thaliana] unknown protein [Arabidopsis thaliana]
  misc_feature (1)..(219): Homolog of NCBI NO: 21592725 NR Description: unknown [Arabidopsis thaliana]
  misc_feature (1)..(215): Homolog of NCBI NO: 23478750 NR Description: cyclophilin-RNA interacting protein [Plasmodium
  misc_feature (2)..(217): Homolog of NCBI NO: 40738944 NR Description: hypothetical protein AN6605.2 [Aspergillus
  misc_feature (3)..(142): Homolog of NCBI NO: 23508822 NR Description: eukaryotic translation initiation factor 3 eukaryotic translation initiation factor 3 subunit 10, putative
  misc_feature (2)..(122): Homolog of NCBI NO: 23508822 NR Description: eukaryotic translation initiation factor 3 eukaryotic translation initiation factor 3 subunit 10, putative
  misc_feature (3)..(163): Homolog of NCBI NO: 23508822 NR Description: eukaryotic translation initiation factor 3 eukaryotic translation initiation factor 3 subunit 10, putative
  misc_feature (49)..(213): Homolog of NCBI NO: 34856367 NR Description: similar to putative nucleic acid binding protein
  misc_feature (44)..(213): Homolog of NCBI NO: 7513213 NR Description: nucleic acid binding protein - human (fragment)
  misc_feature (3)..(157): Homolog of NCBI NO: 23482058 NR Description: hypothetical protein [Plasmodium yoelii yoelii]

SEQ ID NO: 99254 - DNA, 1172 bp, Arabidopsis thaliana
  misc_feature (1)..(1172): Ceres Seq. ID no. 13602519
  misc_feature: MA Experiment ID: 108434 Result: Down-regulated in Transcription
  misc_feature: MA Experiment 108434 PARAMETER Experiment Name: At_Root_Tips_cDNA_P Parameter: Tissue Value: Root Tips
  misc_feature: MA Experiment ID: 108461 Result: Up-regulated in Transcription
  misc_feature: MA Experiment 108461 PARAMETER Experiment Name: At_Germinating_Seeds_cDNA_P Parameter: Age (day) Value: 1 vs. 0
  misc_feature: MA Experiment 108461 PARAMETER Experiment Name: At_Germinating_Seeds_cDNA_P Parameter: Tissue Value: Germinating Seeds
  misc_feature: MA Experiment ID: 108594 Result: Down-regulated in Transcription
  misc_feature: MA Experiment 108594 PARAMETER Experiment Name: At_Ler-rhl_Root_cDNA_P Parameter: Plant Line Value: null
  misc_feature: MA Experiment ID: 20000227 Result: Up-regulated in Transcription
  misc_feature: MA Experiment 20000227 PARAMETER Experiment Name: At_Root-Tips-vs-Tops_P Parameter: Tissue Value: Root Tips vs. Root Tops
tttcctctgcttctcaacatctctaagctttcattgaacaaggaatatgaaatcttctccaagatcagaaggaagaaagttcattatcccttctttcttcttcatcatagctctttgtgtactagctttcatcaacgagatcagattcgatagcttattgagttttggaagatgtgctttgtcaaatgttcctatgaataatggttcatcagagactccattgttgtcttcttctcctgttgatgatgagattaggattcttattggaatccttacacttcctgatcagtattcacgtcgccattttctccggatgatctacgggacacaaaatgttccggacggtgttaaggttgatgtgaagtttgtgttctgtaatttgactaaagaagaccagaaagtgcttgttgctttggagattatgcgttatgatgacatcattatactcaactgcaatgagaatatgaacaaaggcaagacttacacatacttctcaagcttaccagacatattcaatgagaccgatgcacaaaaaccaccgtaccattacgtaatgaaagccgacgacgacacatacataagactagaaagtctcgttgcatctttgagaccactccctcgagaagatctttactacggctatgtaattccatgtccaagcatggacccatttgttcattacatgtcaggaatgggttacttagtgtcatgggatattgcggtttggctcaaagactcggaaattcccaagaaacatctagaaggtcctgaagacaaagtgtttggcgattggattcgagaaggaagacgaggaaaaaaccggtttaacgctaagtggtccatgtataatttccctgagccaccgactagatgcacacatgagctttggccagacactattgccgttcatttgttaaagaaccaagagaagtggatacgtacattgaactatttcaatgttactagcaatctcaagccttctaaactataccacataccgtagatagtctttttgtttgcttttaccggattcttatatttatactttacattgtttctcttgaaattggtaagaaatgttctttaataatcgattttttgggagggatttgtagtacactaattaaggattgttcaaacatgtttaatagtcaatctggtggggttttttc

SEQ ID NO: 99255 - protein, 318 aa, Arabidopsis thaliana
  peptide (1)..(318): Ceres Seq. ID no. 13602520
  misc_feature (83)..(259): Pfam Name: Galactosyltransferase Pfam Description: Galactosyltransferase
  misc_feature (1)..(318): Homolog of NCBI NO: 15242148 NR Description: expressed protein [Arabidopsis thaliana] gb|AAF08572.1~gene_id:MUA2.7~similar to unknown protein
  misc_feature (1)..(318): Homolog of NCBI NO: 21537037 NR Description: unknown [Arabidopsis thaliana]
  misc_feature (71)..(314): Homolog of NCBI NO: 18092341 NR Description: hypothetical protein [Zea mays]
  misc_feature (168)..(314): Homolog of NCBI NO: 14719291 NR Description: unknown [Zea mays]
MKSSPRSEGRKFIIPSFFFIIALCVLAFINEIRFDSLLSFGRCALSNVPMNNGSSETPLLSSSPVDDEIRILIGILTLPDQYSRRHFLRMIYGTQNVPDGVKVDVKFVFCNLTKEDQKVLVALEIMRYDDIIILNCNENMNKGKTYTYFSSLPDIFNETDAQKPPYHYVMKADDDTYIRLESLVASLRPLPREDLYYGYVIPCPSMDPFVHYMSGMGYLVSWDIAVWLKDSEIPKKHLEGPEDKVFGDWIREGRRGKNRFNAKWSMYNFPEPPTRCTHELWPDTIAVHLLKNQEKWIRTLNYFNVTSNLKPSKLYHIP

SEQ ID NO: 99256 - protein, 269 aa, Arabidopsis thaliana; identical to SEQ ID NO: 41093
  peptide (1)..(269): Ceres Seq. ID no. 13602521
  misc_feature (34)..(210): Pfam Name: Galactosyltransferase Pfam Description: Galactosyltransferase
  misc_feature (1)..(269): Homolog of NCBI NO: 15242148 NR Description: expressed protein [Arabidopsis thaliana] gb|AAF08572.1~gene_id:MUA2.7~similar to unknown protein
  misc_feature (1)..(269): Homolog of NCBI NO: 21537037 NR Description: unknown [Arabidopsis thaliana]
  misc_feature (22)..(265): Homolog of NCBI NO: 18092341 NR Description: hypothetical protein [Zea mays]
  misc_feature (119)..(265): Homolog of NCBI NO: 14719291 NR Description: unknown [Zea mays]

SEQ ID NO: 99257 - protein, 229 aa, Arabidopsis thaliana; identical to SEQ ID NO: 41094
  peptide (1)..(229): Ceres Seq. ID no. 13602522
  misc_feature (1)..(170): Pfam Name: Galactosyltransferase Pfam Description: Galactosyltransferase
  misc_feature (1)..(229): Homolog of NCBI NO: 15242148 NR Description: expressed protein [Arabidopsis thaliana] gb|AAF08572.1~gene_id:MUA2.7~similar to unknown protein
  misc_feature (1)..(229): Homolog of NCBI NO: 21537037 NR Description: unknown [Arabidopsis thaliana]
  misc_feature (1)..(225): Homolog of NCBI NO: 18092341 NR Description: hypothetical protein [Zea mays]
  misc_feature (79)..(225): Homolog of NCBI NO: 14719291 NR Description: unknown [Zea mays]

SEQ ID NO: 99258 - DNA, 1382 bp, Arabidopsis thaliana
  misc_feature (1)..(1382): Ceres Seq. ID no. 13602523
  misc_feature: MA Experiment ID: 108433 Result: Down-regulated in Transcription
  misc_feature: MA Experiment 108433 PARAMETER Experiment Name: At_rhl_Mutant2_cDNA_P Parameter: Age (day) Value: 7
  misc_feature: MA Experiment 108433 PARAMETER Experiment Name: At_rhl_Mutant2_cDNA_P Parameter: Organism Value: A. thaliana
  misc_feature: MA Experiment 108433 PARAMETER Experiment Name: At_rhl_Mutant2_cDNA_P Parameter: Plant Line Value: rhl Mutant vs. wt landsburg
  misc_feature: MA Experiment 108433 PARAMETER Experiment Name: At_rhl_Mutant2_cDNA_P Parameter: Tissue Value: Roots
  misc_feature: MA Experiment ID: 108462 Result: Up-regulated in Transcription
  misc_feature: MA Experiment 108462 PARAMETER Experiment Name: At_Germinating_Seeds_cDNA_P Parameter: Age (day) Value: 2 vs. 0
  misc_feature: MA Experiment 108462 PARAMETER Experiment Name: At_Germinating_Seeds_cDNA_P Parameter: Tissue Value: Germinating Seeds
  misc_feature: MA Experiment ID: 108463 Result: Up-regulated in Transcription
  misc_feature: MA Experiment 108463 PARAMETER Experiment Name: At_Germinating_Seeds_cDNA_P Parameter: Age (day) Value: 3 vs. 0
  misc_feature: MA Experiment 108463 PARAMETER Experiment Name: At_Germinating_Seeds_cDNA_P Parameter: Tissue Value: Germinating Seeds
  misc_feature: MA Experiment ID: 108464 Result: Up-regulated in Transcription
  misc_feature: MA Experiment 108464 PARAMETER Experiment Name: At_Germinating_Seeds_cDNA_P Parameter: Age (day) Value: 4 vs. 0
  misc_feature: MA Experiment 108464 PARAMETER Experiment Name: At_Germinating_Seeds_cDNA_P Parameter: Tissue Value: Germinating Seeds
  misc_feature: MA Experiment ID: 108594 Result: Down-regulated in Transcription
  misc_feature: MA Experiment 108594 PARAMETER Experiment Name: At_Ler-rhl_Root_cDNA_P Parameter: Plant Line Value: null
  misc_feature: MA Experiment ID: 20000227 Result: Down-regulated in Transcription
  misc_feature: MA Experiment 20000227 PARAMETER Experiment Name: At_Root-Tips-vs-Tops_P Parameter: Tissue Value: Root Tips vs. Root Tops
  misc_feature: MA Experiment ID: 20000439 Result: Up-regulated in Transcription
  misc_feature: MA Experiment 20000439 PARAMETER Experiment Name: At_Roots__P Parameter: Age (day) Value: 14 vs. 21
  misc_feature: MA Experiment 20000439 PARAMETER Experiment Name: At_Roots__P Parameter: Organism Value: A. thaliana
  misc_feature: MA Experiment 20000439 PARAMETER Experiment Name: At_Roots__P Parameter: Tissue Value: Roots vs. Whole Plant
  misc_feature: MA Experiment ID: 20001761 Result: Down-regulated in Transcription
  misc_feature: MA Experiment 20001761 PARAMETER Experiment Name: At_50mM_NH4NO3_L-to-H_P Parameter: Timepoint (hr) Value: 4
  misc_feature: MA Experiment 20001761 PARAMETER Experiment Name: At_50mM_NH4NO3_L-to-H_P Parameter: Tissue Value: Siliques
  misc_feature: MA Experiment 20001761 PARAMETER Experiment Name: At_50mM_NH4NO3_L-to-H_P Parameter: Treatment Value: 50mM NH4NO3 vs 100mM Mannitol
  misc_feature: MA Experiment ID: 20001904 Result: Up-regulated in Transcription
  misc_feature: MA Experiment 20001904 PARAMETER Experiment Name: At_Drought_Reproduction_P Parameter: Age (day) Value: 37
  misc_feature: MA Experiment 20001904 PARAMETER Experiment Name: At_Drought_Reproduction_P Parameter: Organism Value: A. thaliana
  misc_feature: MA Experiment 20001904 PARAMETER Experiment Name: At_Drought_Reproduction_P Parameter: Plant Line Value: WS
  misc_feature: MA Experiment 20001904 PARAMETER Experiment Name: At_Drought_Reproduction_P Parameter: Timepoint (day) Value: 7
  misc_feature: MA Experiment 20001904 PARAMETER Experiment Name: At_Drought_Reproduction_P Parameter: Tissue Value: Rosettes
  misc_feature: MA Experiment 20001904 PARAMETER Experiment Name: At_Drought_Reproduction_P Parameter: Treatment Value: Drought vs. No Drought
gtccaaattagagaataagtaactcaagaaggagtgaaatcaacacaaaacacaatgatgatccttaggctggctctagccatcgtcatctccacctatgcaaccgcacaaccagcatcaacatcgtcgcttgtaacctatatattcggcgactcgctaaccgaagttggtaacaacaatttcttgcaatattcgctagcaagagcagactttccatattatggagttgatttctccggtggtaaagctaccggaagattcaccaacggtagaactatcggcgatatcatatctacgaagctcgggattctatcgccaccaccatatctatcgttatcacaaaacgacgatgcatttctcagtggtataaattacgcatctggaggagctggaattctcaatgaaactggcatttacttcatccaaaggctaactttcaatgatcaaataaattgtttcaagaaaactaaagaagttattagggcgaaaatcggagatggagctgcgaacaagcatgtaaatgatgccatgtacttcattggtttgggaagcaacgattatgtaaacaatttcttgcagccatttatggcagatgggcagcaatatacacatgacgagtttgtcgaactcttgacctcaaccctacacaatcagcttacgacaatatacaaattaggagcgaggaaggtaatatttcatgggttaggcccattgggctgtatcccatcacagagagtgaagtcaaagacacgcatgtgcctgaaccgtgtcaacgaatgggtattggaattcaattcaagaacgaagaagctattaatagatctcaacaaacgcctccccggagctaaattctctttcgcagacacttatcccgccgttctcgatctcatcaacaatcccactcactacggatttaagatagcaaacacgtcatgttgcaatgtggacacaagtgttggaggtctttgtcttcccaattccaagatgtgtaaaaaccgtcaagactttgtcttctgggacgcatttcatccgtccgattcggctaatcaaatcctagccgatcatcttttctcttctcttctttcttcctcttctccttctcctgctcctaaaccacgtcaatagtttagcatttacaaaaataaaaacagttaaccaatttttgttaaattggacctacttgctatatacatgtgtaactaattttatgttcttgatgtaaccatcaggacaaatatgtgtgttttgttacacaagtattatatattataagataattatggtttgtatgtatcatgaacacattgttatatatacacatatattcgtgtttagtgtttctagacatgtgttataaataaacatctacaccaattttggtc

SEQ ID NO: 99259 - protein, 356 aa, Arabidopsis thaliana
  peptide (1)..(356): Ceres Seq. ID no. 13602524
  misc_feature (28)..(338): Pfam Name: GDSL-like Lipase/Acylhydrolase Pfam Description: GDSL-like Lipase/Acylhydrolase
  misc_feature (1)..(356): Homolog of NCBI NO: 30693137 NR Description: lipase family [Arabidopsis thaliana]
  misc_feature (1)..(355): Homolog of NCBI NO: 21537293 NR Description: GDSL-motif lipase/hydrolase-like protein
  misc_feature (26)..(352): Homolog of NCBI NO: 15221260 NR Description: GDSL-motif lipase/hydrolase protein [Arabidopsis
  misc_feature (29)..(348): Homolog of NCBI NO: 18417760 NR Description: GDSL-motif lipase/hydrolase protein [Arabidopsis
  misc_feature (1)..(355): Homolog of NCBI NO: 15227849 NR Description: GDSL-motif lipase/hydrolase protein [Arabidopsis
  misc_feature (29)..(348): Homolog of NCBI NO: 11280578 NR Description: hypothetical protein F14F8_100 - Arabidopsis >gi|9755617|emb|CAC01771.1| putative protein [Arabidopsis
  misc_feature (28)..(338): Homolog of NCBI NO: 15229742 NR Description: GDSL-motif lipase/hydrolase protein [Arabidopsis >gi|7630026|emb|CAB88323.1| putative protein [Arabidopsis >gi|26450386|dbj|BAC42308.1| unknown protein [Arabidopsis
  misc_feature (1)..(348): Homolog of NCBI NO: 15224005 NR Description: GDSL-motif lipase/hydrolase protein [Arabidopsis
  misc_feature (1)..(338): Homolog of NCBI NO: 34899288 NR Description: similar to GDSL-motif lipase/hydrolase [Oryza
  misc_feature (29)..(340): Homolog of NCBI NO: 18409881 NR Description: GDSL-motif lipase/hydrolase protein [Arabidopsis
MMILRLALAIVISTYATAQPASTSSLVTYIFGDSLTEVGNNNFLQYSLARADFPYYGVDFSGGKATGRFTNGRTIGDIISTKLGILSPPPYLSLSQNDDAFLSGINYASGGAGILNETGIYFIQRLTFNDQINCFKKTKEVIRAKIGDGAANKHVNDAMYFIGLGSNDYVNNFLQPFMADGQQYTHDEFVELLTSTLHNQLTTIYKLGARKVIFHGLGPLGCIPSQRVKSKTRMCLNRVNEWVLEFNSRTKKLLIDLNKRLPGAKFSFADTYPAVLDLINNPTHYGFKIANTSCCNVDTSVGGLCLPNSKMCKNRQDFVFWDAFHPSDSANQILADHLFSSLLSSSSPSPAPKPRQ

SEQ ID NO: 99260 - protein, 355 aa, Arabidopsis thaliana
  peptide (1)..(355): Ceres Seq. ID no. 13602525
  misc_feature (27)..(337): Pfam Name: GDSL-like Lipase/Acylhydrolase Pfam Description: GDSL-like Lipase/Acylhydrolase
  misc_feature (1)..(355): Homolog of NCBI NO: 30693137 NR Description: lipase family [Arabidopsis thaliana]
  misc_feature (1)..(354): Homolog of NCBI NO: 21537293 NR Description: GDSL-motif lipase/hydrolase-like protein
  misc_feature (25)..(351): Homolog of NCBI NO: 15221260 NR Description: GDSL-motif lipase/hydrolase protein [Arabidopsis
  misc_feature (28)..(347): Homolog of NCBI NO: 18417760 NR Description: GDSL-motif lipase/hydrolase protein [Arabidopsis
  misc_feature (1)..(354): Homolog of NCBI NO: 15227849 NR Description: GDSL-motif lipase/hydrolase protein [Arabidopsis
  misc_feature (28)..(347): Homolog of NCBI NO: 11280578 NR Description: hypothetical protein F14F8_100 - Arabidopsis >gi|9755617|emb|CAC01771.1| putative protein [Arabidopsis
  misc_feature (27)..(337): Homolog of NCBI NO: 15229742 NR Description: GDSL-motif lipase/hydrolase protein [Arabidopsis >gi|7630026|emb|CAB88323.1| putative protein [Arabidopsis >gi|26450386|dbj|BAC42308.1| unknown protein [Arabidopsis
  misc_feature (1)..(347): Homolog of NCBI NO: 15224005 NR Description: GDSL-motif lipase/hydrolase protein [Arabidopsis
  misc_feature (1)..(337): Homolog of NCBI NO: 34899288 NR Description: similar to GDSL-motif lipase/hydrolase [Oryza
  misc_feature (28)..(339): Homolog of NCBI NO: 18409881 NR Description: GDSL-motif lipase/hydrolase protein [Arabidopsis
MILRLALAIVISTYATAQPASTSSLVTYIFGDSLTEVGNNNFLQYSLARADFPYYGVDFSGGKATGRFTNGRTIGDIISTKLGILSPPPYLSLSQNDDAFLSGINYASGGAGILNETGIYFIQRLTFNDQINCFKKTKEVIRAKIGDGAANKHVNDAMYFIGLGSNDYVNNFLQPFMADGQQYTHDEFVELLTSTLHNQLTTIYKLGARKVIFHGLGPLGCIPSQRVKSKTRMCLNRVNEWVLEFNSRTKKLLIDLNKRLPGAKFSFADTYPAVLDLINNPTHYGFKIANTSCCNVDTSVGGLCLPNSKMCKNRQDFVFWDAFHPSDSANQILADHLFSSLLSSSSPSPAPKPRQ

SEQ ID NO: 99261 - protein, 198 aa, Arabidopsis thaliana
  peptide (1)..(198): Ceres Seq. ID no. 13602526
  misc_feature (1)..(180): Pfam Name: GDSL-like Lipase/Acylhydrolase Pfam Description: GDSL-like Lipase/Acylhydrolase
  misc_feature (1)..(198): Homolog of NCBI NO: 30693137 NR Description: lipase family [Arabidopsis thaliana]
  misc_feature (1)..(197): Homolog of NCBI NO: 21537293 NR Description: GDSL-motif lipase/hydrolase-like protein
  misc_feature (1)..(194): Homolog of NCBI NO: 15221260 NR Description: GDSL-motif lipase/hydrolase protein [Arabidopsis
  misc_feature (1)..(190): Homolog of NCBI NO: 18417760 NR Description: GDSL-motif lipase/hydrolase protein [Arabidopsis
  misc_feature (1)..(197): Homolog of NCBI NO: 15227849 NR Description: GDSL-motif lipase/hydrolase protein [Arabidopsis
  misc_feature (1)..(190): Homolog of NCBI NO: 11280578 NR Description: hypothetical protein F14F8_100 - Arabidopsis >gi|9755617|emb|CAC01771.1| putative protein [Arabidopsis
  misc_feature (1)..(180): Homolog of NCBI NO: 15229742 NR Description: GDSL-motif lipase/hydrolase protein [Arabidopsis >gi|7630026|emb|CAB88323.1| putative protein [Arabidopsis >gi|26450386|dbj|BAC42308.1| unknown protein [Arabidopsis
  misc_feature (1)..(190): Homolog of NCBI NO: 15224005 NR Description: GDSL-motif lipase/hydrolase protein [Arabidopsis
  misc_feature (1)..(180): Homolog of NCBI NO: 34899288 NR Description: similar to GDSL-motif lipase/hydrolase [Oryza
  misc_feature (1)..(182): Homolog of NCBI NO: 18409881 NR Description: GDSL-motif lipase/hydrolase protein [Arabidopsis
MYFIGLGSNDYVNNFLQPFMADGQQYTHDEFVELLTSTLHNQLTTIYKLGARKVIFHGLGPLGCIPSQRVKSKTRMCLNRVNEWVLEFNSRTKKLLIDLNKRLPGAKFSFADTYPAVLDLINNPTHYGFKIANTSCCNVDTSVGGLCLPNSKMCKNRQDFVFWDAFHPSDSANQILADHLFSSLLSSSSPSPAPKPRQ

SEQ ID NO: 99262 - DNA, 760 bp, Arabidopsis thaliana
  misc_feature (1)..(760): Ceres Seq. ID no. 13602531
  misc_feature: MA Experiment ID: 20000307 Result: Up-regulated in Transcription
  misc_feature: MA Experiment 20000307 PARAMETER Experiment Name: At_Germinating_Seeds_Sub_P Parameter: Age (hr) Value: 24 vs. 0
  misc_feature: MA Experiment 20000307 PARAMETER Experiment Name: At_Germinating_Seeds_Sub_P Parameter: Organism Value: A. thaliana
  misc_feature: MA Experiment 20000307 PARAMETER Experiment Name: At_Germinating_Seeds_Sub_P Parameter: Plant Line Value: WS
  misc_feature: MA Experiment 20000307 PARAMETER Experiment Name: At_Germinating_Seeds_Sub_P Parameter: Tissue Value: Germinating Seeds
  misc_feature: MA Experiment ID: 20000315 Result: Down-regulated in Transcription
  misc_feature: MA Experiment 20000315 PARAMETER Experiment Name: At_14day_Shoots-Roots_Sub_P Parameter: Age (day) Value: 14
  misc_feature: MA Experiment 20000315 PARAMETER Experiment Name: At_14day_Shoots-Roots_Sub_P Parameter: Organism Value: A. thaliana
  misc_feature: MA Experiment 20000315 PARAMETER Experiment Name: At_14day_Shoots-Roots_Sub_P Parameter: Plant Line Value: WS
  misc_feature: MA Experiment 20000315 PARAMETER Experiment Name: At_14day_Shoots-Roots_Sub_P Parameter: Tissue Value: Shoots vs. Whole Plant
aaagagagacgactctgaatccaaaaaaaaaaaaaactcattaagtaaagacaaaggaagagaagaaagacgatttctcgaagaagctatggcggatcaactcactgacgaacagatctccgaattcaaggaagcttttagcctcttcgacaaagatggcgatggttgcatcacaacaaaagagctgggaacagttatgcgttcactaggacaaaacccaacagaggctgagctccaagacatgatcaacgaggttgatgcagatggaaacggcactatcgacttccccgagttcctgaacctgatggctaagaagatgaaagacactgactccgaggaagagctaaaagaagccttcagggttttcgacaaagaccagaacggtttcatctccgctgctgagctacgccatgtgatgaccaatcttggtgagaagctaactgatgaagaagtggaagagatgatccgtgaggctgatgttgatggagatggtcagattaactatgaagagtttgtcaagattatgatggctaagtgatttgataaaggtgatgatgatgatgatgatgacctttttatgcttctaggagtttaaccaaaaacatttgcatgattggtggagatatgcttttaaacagacataatttgtttttcgttcttttgattttctggtttgtgacttttgtgtgtaatggaaaatcaagtaagttggattgaaaccgatgggttgggtttttactttttacccacattttgttgc

SEQ ID NO: 99263 - protein, 178 aa, Arabidopsis thaliana
  peptide (1)..(178): Ceres Seq. ID no. 13602532
  misc_feature (41)..(69): Pfam Name: EF hand Pfam Description: EF hand
  misc_feature (30)..(178): Homolog of NCBI NO: 15219652 NR Description: calmodulin 4 [Arabidopsis thaliana]
  misc_feature (30)..(178): Homolog of NCBI NO: 479693 NR Description: calmodulin 4 - Arabidopsis thaliana
  misc_feature (30)..(178): Homolog of NCBI NO: 115515 NR Description: Calmodulin >gi|71683|pir||MCAA calmodulin -
  misc_feature (30)..(178): Homolog of NCBI NO: 2809481 NR Description: calmodulin [Oryza sativa]
  misc_feature (30)..(178): Homolog of NCBI NO: 20186 NR Description: calmodulin [Oryza sativa] calmodulin [Zea mays] >gi|4103961|gb|AAD10246.1| calmodulin
  misc_feature (30)..(178): Homolog of NCBI NO: 15229784 NR Description: calmodulin [Arabidopsis thaliana]
  misc_feature (30)..(178): Homolog of NCBI NO: 34304715 NR Description: calmodulin 4 [Daucus carota]
  misc_feature (30)..(178): Homolog of NCBI NO: 3121848 NR Description: CALMODULIN >gi|1835521|gb|AAB46588.1| calmodulin annuum] >gi|7643792|gb|AAF65511.1| calmodulin [Capsicum annuum]
  misc_feature (30)..(178): Homolog of NCBI NO: 30683369 NR Description: calmodulin [Arabidopsis thaliana]
  misc_feature (30)..(178): Homolog of NCBI NO: 15225840 NR Description: calmodulin [Arabidopsis thaliana] calmodulin [Arabidopsis thaliana] >gi|30688531|ref|NP_850344.1| [Arabidopsis thaliana] >gi|115486|sp|P25069|CAL2_ARATH calmodulin
KRDDSESKKKKNSLSKDKGREERRFLEEAMADQLTDEQISEFKEAFSLFDKDGDGCITTKELGTVMRSLGQNPTEAELQDMINEVDADGNGTIDFPEFLNLMAKKMKDTDSEEELKEAFRVFDKDQNGFISAAELRHVMTNLGEKLTDEEVEEMIREADVDGDGQINYEEFVKIMMAK

SEQ ID NO: 99264 - protein, 149 aa, Arabidopsis thaliana; identical to SEQ ID NO: 27678
  peptide (1)..(149): Ceres Seq. ID no. 13602533
  misc_feature (12)..(40): Pfam Name: EF hand Pfam Description: EF hand
  misc_feature (1)..(149): Homolog of NCBI NO: 15219652 NR Description: calmodulin 4 [Arabidopsis thaliana]
  misc_feature (1)..(149): Homolog of NCBI NO: 479693 NR Description: calmodulin 4 - Arabidopsis thaliana
  misc_feature (1)..(149): Homolog of NCBI NO: 115515 NR Description: Calmodulin >gi|71683|pir||MCAA calmodulin -
  misc_feature (1)..(149): Homolog of NCBI NO: 2809481 NR Description: calmodulin [Oryza sativa]
  misc_feature (1)..(149): Homolog of NCBI NO: 20186 NR Description: calmodulin [Oryza sativa] calmodulin [Zea mays] >gi|4103961|gb|AAD10246.1| calmodulin
  misc_feature (1)..(149): Homolog of NCBI NO: 15229784 NR Description: calmodulin [Arabidopsis thaliana]
  misc_feature (1)..(149): Homolog of NCBI NO: 34304715 NR Description: calmodulin 4 [Daucus carota]
  misc_feature (1)..(149): Homolog of NCBI NO: 3121848 NR Description: CALMODULIN >gi|1835521|gb|AAB46588.1| calmodulin annuum] >gi|7643792|gb|AAF65511.1| calmodulin [Capsicum annuum]
  misc_feature (1)..(149): Homolog of NCBI NO: 15225840 NR Description: calmodulin [Arabidopsis thaliana] calmodulin [Arabidopsis thaliana] >gi|30688531|ref|NP_850344.1| [Arabidopsis thaliana] >gi|115486|sp|P25069|CAL2_ARATH calmodulin
  misc_feature (1)..(149): Homolog of NCBI NO: 30683369 NR Description: calmodulin [Arabidopsis thaliana]

SEQ ID NO: 99265 - protein, 113 aa, Arabidopsis thaliana; identical to SEQ ID NO: 27679
  peptide (1)..(113): Ceres Seq. ID no. 13602534
  misc_feature (1)..(113): Homolog of NCBI NO: 15219652 NR Description: calmodulin 4 [Arabidopsis thaliana]
  misc_feature (1)..(113): Homolog of NCBI NO: 479693 NR Description: calmodulin 4 - Arabidopsis thaliana
  misc_feature (1)..(113): Homolog of NCBI NO: 115515 NR Description: Calmodulin >gi|71683|pir||MCAA calmodulin -
  misc_feature (1)..(113): Homolog of NCBI NO: 2809481 NR Description: calmodulin [Oryza sativa]
  misc_feature (1)..(113): Homolog of NCBI NO: 20186 NR Description: calmodulin [Oryza sativa] calmodulin [Zea mays] >gi|4103961|gb|AAD10246.1| calmodulin
  misc_feature (1)..(113): Homolog of NCBI NO: 15229784 NR Description: calmodulin [Arabidopsis thaliana]
  misc_feature (1)..(113): Homolog of NCBI NO: 34304715 NR Description: calmodulin 4 [Daucus carota]
  misc_feature (1)..(113): Homolog of NCBI NO: 3121848 NR Description: CALMODULIN >gi|1835521|gb|AAB46588.1| calmodulin annuum] >gi|7643792|gb|AAF65511.1| calmodulin [Capsicum annuum]
  misc_feature (1)..(113): Homolog of NCBI NO: 30683369 NR Description: calmodulin [Arabidopsis thaliana]
  misc_feature (1)..(113): Homolog of NCBI NO: 15225840 NR Description: calmodulin [Arabidopsis thaliana] calmodulin [Arabidopsis thaliana] >gi|30688531|ref|NP_850344.1| [Arabidopsis thaliana] >gi|115486|sp|P25069|CAL2_ARATH calmodulin

SEQ ID NO: 99266 - DNA, 1870 bp, Arabidopsis thaliana
  misc_feature (1)..(1870): Ceres Seq. ID no. 13602535
  misc_feature: MA Experiment ID: 108434 Result: Up-regulated in Transcription
  misc_feature: MA Experiment 108434 PARAMETER Experiment Name: At_Root_Tips_cDNA_P Parameter: Tissue Value: Root Tips
  misc_feature: MA Experiment ID: 108461 Result: Up-regulated in Transcription
  misc_feature: MA Experiment 108461 PARAMETER Experiment Name: At_Germinating_Seeds_cDNA_P Parameter: Age (day) Value: 1 vs. 0
  misc_feature: MA Experiment 108461 PARAMETER Experiment Name: At_Germinating_Seeds_cDNA_P Parameter: Tissue Value: Germinating Seeds
  misc_feature: MA Experiment ID: 108462 Result: Up-regulated in Transcription
  misc_feature: MA Experiment 108462 PARAMETER Experiment Name: At_Germinating_Seeds_cDNA_P Parameter: Age (day) Value: 2 vs. 0
  misc_feature: MA Experiment 108462 PARAMETER Experiment Name: At_Germinating_Seeds_cDNA_P Parameter: Tissue Value: Germinating Seeds
  misc_feature: MA Experiment ID: 108463 Result: Up-regulated in Transcription
  misc_feature: MA Experiment 108463 PARAMETER Experiment Name: At_Germinating_Seeds_cDNA_P Parameter: Age (day) Value: 3 vs. 0
  misc_feature: MA Experiment 108463 PARAMETER Experiment Name: At_Germinating_Seeds_cDNA_P Parameter: Tissue Value: Germinating Seeds
  misc_feature: MA Experiment ID: 108464 Result: Up-regulated in Transcription
  misc_feature: MA Experiment 108464 PARAMETER Experiment Name: At_Germinating_Seeds_cDNA_P Parameter: Age (day) Value: 4 vs. 0
  misc_feature: MA Experiment 108464 PARAMETER Experiment Name: At_Germinating_Seeds_cDNA_P Parameter: Tissue Value: Germinating Seeds
  misc_feature: MA Experiment ID: 108577 Result: Down-regulated in Transcription
  misc_feature: MA Experiment 108577 PARAMETER Experiment Name: At_42deg_Heat_cDNA_P Parameter: Temperature (deg C) Value: 42 vs. 22
  misc_feature: MA Experiment 108577 PARAMETER Experiment Name: At_42deg_Heat_cDNA_P Parameter: Timepoint (hr) Value: 6
  misc_feature: MA Experiment 108577 PARAMETER Experiment Name: At_42deg_Heat_cDNA_P Parameter: Tissue Value: Aerial
  misc_feature: MA Experiment ID: 20000069 Result: Down-regulated in Transcription
  misc_feature: MA Experiment 20000069 PARAMETER Experiment Name: At_100uM_ABA_Mutants_cDNA_P Parameter: Plant Line Value: CS23
  misc_feature: MA Experiment 20000069 PARAMETER Experiment Name: At_100uM_ABA_Mutants_cDNA_P Parameter: Timepoint (hr) Value: 6
  misc_feature: MA Experiment 20000069 PARAMETER Experiment Name: At_100uM_ABA_Mutants_cDNA_P Parameter: Tissue Value: Aerial
  misc_feature: MA Experiment 20000069 PARAMETER Experiment Name: At_100uM_ABA_Mutants_cDNA_P Parameter: Treatment Value: 100uM ABA vs. No Treatment
  misc_feature: MA Experiment ID: 20000087 Result: Down-regulated in Transcription
  misc_feature: MA Experiment 20000087 PARAMETER Experiment Name: At_100uM_ABA_Mutants_cDNA_P Parameter: Plant Line Value: WS
  misc_feature: MA Experiment 20000087 PARAMETER Experiment Name: At_100uM_ABA_Mutants_cDNA_P Parameter: Timepoint (hr) Value: 6
  misc_feature: MA Experiment 20000087 PARAMETER Experiment Name: At_100uM_ABA_Mutants_cDNA_P Parameter: Tissue Value: Aerial
  misc_feature: MA Experiment 20000087 PARAMETER Experiment Name: At_100uM_ABA_Mutants_cDNA_P Parameter: Treatment Value: 100uM ABA vs. No Treatment
  misc_feature: MA Experiment ID: 20000113 Result: Down-regulated in Transcription
  misc_feature: MA Experiment 20000113 PARAMETER Experiment Name: At_42deg_Heat_cDNA_P Parameter: Temperature (deg C) Value: 42 vs. 22
  misc_feature: MA Experiment 20000113 PARAMETER Experiment Name: At_42deg_Heat_cDNA_P Parameter: Timepoint (hr) Value: 8
  misc_feature: MA Experiment 20000113 PARAMETER Experiment Name: At_42deg_Heat_cDNA_P Parameter: Tissue Value: Aerial
  misc_feature: MA Experiment ID: 20000173 Result: Down-regulated in Transcription
  misc_feature: MA Experiment 20000173 PARAMETER Experiment Name: At_42deg_Heat_P Parameter: Age (day) Value: 14
  misc_feature: MA Experiment 20000173 PARAMETER Experiment Name: At_42deg_Heat_P Parameter: Organism Value: A. thaliana
  misc_feature: MA Experiment 20000173 PARAMETER Experiment Name: At_42deg_Heat_P Parameter: Plant Line Value: WS
  misc_feature: MA Experiment 20000173 PARAMETER Experiment Name: At_42deg_Heat_P Parameter: Temperature (deg C) Value: 42 vs. 22
  misc_feature: MA Experiment 20000173 PARAMETER Experiment Name: At_42deg_Heat_P Parameter: Timepoint (hr) Value: 6
  misc_feature: MA Experiment 20000173 PARAMETER Experiment Name: At_42deg_Heat_P Parameter: Tissue Value: Aerial
  misc_feature: MA Experiment ID: 20000179 Result: Up-regulated in Transcription
  misc_feature: MA Experiment 20000179 PARAMETER Experiment Name: At_Germinating_Seeds_P Parameter: Age (hr) Value: 6 vs. 0
  misc_feature: MA Experiment 20000179 PARAMETER Experiment Name: At_Germinating_Seeds_P Parameter: Tissue Value: Germinating Seeds
  misc_feature: MA Experiment ID: 20000185 Result: Up-regulated in Transcription
  misc_feature: MA Experiment 20000185 PARAMETER Experiment Name: At_Roots__P Parameter: Age (day) Value: 7 vs. 21
  misc_feature: MA Experiment 20000185 PARAMETER Experiment Name: At_Roots__P Parameter: Organism Value: A. thaliana
  misc_feature: MA Experiment 20000185 PARAMETER Experiment Name: At_Roots__P Parameter: Tissue Value: Roots vs. Whole Plant
  misc_feature: MA Experiment ID: 20000227 Result: Up-regulated in Transcription
  misc_feature: MA Experiment 20000227 PARAMETER Experiment Name: At_Root-Tips-vs-Tops_P Parameter: Tissue Value: Root Tips vs. Root Tops
  misc_feature: MA Experiment ID: 20000264 Result: Up-regulated in Transcription
  misc_feature: MA Experiment 20000264 PARAMETER Experiment Name: At_Open_Flower_P Parameter: Age (day) Value: 21
  misc_feature: MA Experiment 20000264 PARAMETER Experiment Name: At_Open_Flower_P Parameter: Plant Line Value: WS
  misc_feature: MA Experiment 20000264 PARAMETER Experiment Name: At_Open_Flower_P Parameter: Tissue Value: Open Flower vs. Whole Plant
  misc_feature: MA Experiment ID: 20000286 Result: Up-regulated in Transcription
  misc_feature: MA Experiment 20000286 PARAMETER Experiment Name: At_Open_Flower_P Parameter: Age (day) Value: 21
  misc_feature: MA Experiment 20000286 PARAMETER Experiment Name: At_Open_Flower_P Parameter: Plant Line Value: WS
  misc_feature: MA Experiment 20000286 PARAMETER Experiment Name: At_Open_Flower_P Parameter: Tissue Value: Half Open vs. Whole Plant
  misc_feature: MA Experiment ID: 20000438 Result: Up-regulated in Transcription
  misc_feature: MA Experiment 20000438 PARAMETER Experiment Name: At_Shoots__P Parameter: Age (day) Value: 14
  misc_feature: MA Experiment 20000438 PARAMETER Experiment Name: At_Shoots__P Parameter: Tissue Value: Shoots vs. Whole Plant
  misc_feature: MA Experiment ID: 20000439 Result: Up-regulated in Transcription
  misc_feature: MA Experiment 20000439 PARAMETER Experiment Name: At_Roots__P Parameter: Age (day) Value: 14 vs. 21
  misc_feature: MA Experiment 20000439 PARAMETER Experiment Name: At_Roots__P Parameter: Organism Value: A. thaliana
  misc_feature: MA Experiment 20000439 PARAMETER Experiment Name: At_Roots__P Parameter: Tissue Value: Roots vs. Whole Plant
  misc_feature: MA Experiment ID: 20000573 Result: Down-regulated in Transcription
  misc_feature: MA Experiment 20000573 PARAMETER Experiment Name: At_100uM_ABA_Mutants__P Parameter: Organism Value: A. thaliana
  misc_feature: MA Experiment 20000573 PARAMETER Experiment Name: At_100uM_ABA_Mutants__P Parameter: Plant Line Value: CS22 vs. Ler wt
  misc_feature: MA Experiment 20000573 PARAMETER Experiment Name: At_100uM_ABA_Mutants__P Parameter: Timepoint (hr) Value: N/A
  misc_feature: MA Experiment 20000573 PARAMETER Experiment Name: At_100uM_ABA_Mutants__P Parameter: Tissue Value: Whole Plant
  misc_feature: MA Experiment 20000573 PARAMETER Experiment Name: At_100uM_ABA_Mutants__P Parameter: Treatment Value: None
  misc_feature: MA Experiment ID: 20000574 Result: Down-regulated in Transcription
  misc_feature: MA Experiment 20000574 PARAMETER Experiment Name: At_100uM_ABA_Mutants__P Parameter: Organism Value: A. thaliana
  misc_feature: MA Experiment 20000574 PARAMETER Experiment Name: At_100uM_ABA_Mutants__P Parameter: Plant Line Value: CS23 vs. Ler wt
  misc_feature: MA Experiment 20000574 PARAMETER Experiment Name: At_100uM_ABA_Mutants__P Parameter: Timepoint (hr) Value: N/A
  misc_feature: MA Experiment 20000574 PARAMETER Experiment Name: At_100uM_ABA_Mutants__P Parameter: Tissue Value: Whole Plant
  misc_feature: MA Experiment 20000574 PARAMETER Experiment Name: At_100uM_ABA_Mutants__P Parameter: Treatment Value: None
  misc_feature: MA Experiment ID: 20000794 Result: Up-regulated in Transcription
  misc_feature: MA Experiment 20000794 PARAMETER Experiment Name: At_Petals_P Parameter: Age (day) Value: 23-25 days
  misc_feature: MA Experiment 20000794 PARAMETER Experiment Name: At_Petals_P Parameter: Plant Line Value: WS
  misc_feature: MA Experiment 20000794 PARAMETER Experiment Name: At_Petals_P Parameter: Tissue Value: Petals vs. Whole plant
  misc_feature: MA Experiment ID: 20001557 Result: Down-regulated in Transcription
  misc_feature: MA Experiment 20001557 PARAMETER Experiment Name: At_Drought_Soil_Dry_P Parameter: Age (day) Value: 27
  misc_feature: MA Experiment 20001557 PARAMETER Experiment Name: At_Drought_Soil_Dry_P Parameter: Organism Value: A. thaliana
  misc_feature: MA Experiment 20001557 PARAMETER Experiment Name: At_Drought_Soil_Dry_P Parameter: Plant Line Value: WS
  misc_feature: MA Experiment 20001557 PARAMETER Experiment Name: At_Drought_Soil_Dry_P Parameter: Post Timepoint (hr) Value: 3
  misc_feature: MA Experiment 20001557 PARAMETER Experiment Name: At_Drought_Soil_Dry_P Parameter: Post-Treatment Value: Re-Water vs. No Drought
  misc_feature: MA Experiment 20001557 PARAMETER Experiment Name: At_Drought_Soil_Dry_P Parameter: Timepoint (day) Value: 13
  misc_feature: MA Experiment 20001557 PARAMETER Experiment Name: At_Drought_Soil_Dry_P Parameter: Treatment Value: Drought vs. No Drought
  misc_feature: MA Experiment ID: 20001911 Result: Down-regulated in Transcription
  misc_feature: MA Experiment 20001911 PARAMETER Experiment Name: At_Drought_Reproduction_P Parameter: Age (day) Value: 40
  misc_feature: MA Experiment 20001911 PARAMETER Experiment Name: At_Drought_Reproduction_P Parameter: Organism Value: A. thaliana
  misc_feature: MA Experiment 20001911 PARAMETER Experiment Name: At_Drought_Reproduction_P Parameter: Plant Line Value: WS
  misc_feature: MA Experiment 20001911 PARAMETER Experiment Name: At_Drought_Reproduction_P Parameter: Timepoint (day) Value: 10
  misc_feature: MA Experiment 20001911 PARAMETER Experiment Name: At_Drought_Reproduction_P Parameter: Tissue Value: Flowers
  misc_feature: MA Experiment 20001911 PARAMETER Experiment Name: At_Drought_Reproduction_P Parameter: Treatment Value: Drought vs. No Drought
ataaactttataagaaaaataaatacatattctctttctcttccatcaagcaaagcttttcaaaaagaatcaaacttttcgaatctttttgcttctcgagatctgttcatagagagagagataaagaatgggtttttatgaaggagcctctgttcatccaagaactccagaaaacaaaaacacagtgaatattccgatactcacttcttcttcttcatcatcagatcttgacggagataacaatgacaacaacaacaatacaggaatcaaaacccttttgaaaagaatgatctttgatttgggtttcgcttgtttccttcctcctttaagctcaaccgaaaactccggcaacaacaatggaggaggaacaagcggcggcggaggaggaggaggaggaggaggagagaataacaaagcttggctattggcggaaacagcaccggagaatatgaatcctgatcctcattcagttcattcatcgtttagattcagtctttgttcacaaatcgagcttgagaaaatgaaaggtgaagaaccgtccttgtctgcttcgtcttcttgtcggaatttgtcggtttctggtggttccacgacggttttgatggttaatttggagaatggtgttaaggagactactgggaatgcgactgatgatttgcggtggactagagctaggtcgcttgagaagagtatttctccggtggctaatactttggttcggtttagctacggtgagattgtggcagctactcgtaatttctctaaagggagagtgttgggaagaggagcttgtagctatgtgtttagaggcaaaatcggaatgtggagaacggctttagcaatcaagagacttgataaggaagacaaagaatctcctaaatctttttgtagagagttgatgattgcaagctctcttcatagctccaacattgtacctcttcttggattctgtattgatcctgaagaagggttattcttggtttacaagtatgtctctggtggtagcctcgaacattatttacacgataagaagaagaagaaaggcgtaaaagccgcttttggtttgccttggtcagcaaggtacaaggtagcgttaggtatagcagatgccatagcttatttgcataatggaacagagcaatgtgttgttcacagagatatcaaaccctccaatattcttctttcctcaaagaaaataccaaagttgtgtgattttgggttagctacttggaccgctgcaccttcggttcctttcctctgcaagaccgtgaaaggcacattcggctatctggctcctgagtatttccagcatggtaagatatctgacaagaccgatgtttacgccttcggggttgtgttgcttgagctaataactggccggaaaccaatcgaagcaagaagagcatctggtcaagaaaatctggttgtttgggcgaaaccgttgttggatagagggatagaagctatagtggagctgcttgatccaaggctaaaatgcacaagaaaaaactcggttcaaatggagcggatgatccgtgctgcagcggcgtgtgtgatcaatgaggagtcccgaagacccggtatggaagagattgtctcaatcttgaaaggcgaagaaggtgtagagccagaaacacattcaagcaggaaaactacaaatatttcgggtatgattgactcttatacacaattgcaacaaaccaaatccgagatgaaatgtcatcttgatcttgcgatgctcggagtaaccgagtttgaagatgatgatcatgtgtacggccgataaaagattctaagaaatggatttaaaagtgtgtaaataggtatttatgaaaagtttgaaacagagttcttagtttctgaattagtg

SEQ ID NO: 99267 - protein, 552 aa, Arabidopsis thaliana; identical to SEQ ID NO: 39282
  peptide (1)..(552): Ceres Seq. ID no. 13602536
  misc_feature (1)..(552): Homolog of NCBI NO: 15240345 NR Description: protein kinase family [Arabidopsis thaliana]
  misc_feature (93)..(547): Homolog of NCBI NO: 15219657 NR Description: protein kinase family [Arabidopsis thaliana]
  misc_feature (317)..(552): Homolog of NCBI NO: 10177167 NR Description: Ser/Thr protein kinase-like protein [Arabidopsis
  misc_feature (232)..(303): Homolog of NCBI NO: 10177167 NR Description: Ser/Thr protein kinase-like protein [Arabidopsis
  misc_feature (1)..(217): Homolog of NCBI NO: 10177168 NR Description: gene_id:K22F20.5~unknown protein [Arabidopsis
  misc_feature (199)..(435): Homolog of NCBI NO: 15223890 NR Description: hypothetical protein [Arabidopsis thaliana]
  misc_feature (434)..(546): Homolog of NCBI NO: 15223890 NR Description: hypothetical protein [Arabidopsis thaliana]
  misc_feature (199)..(546): Homolog of NCBI NO: 22329713 NR Description: expressed protein [Arabidopsis thaliana] At1g21590/F24J8_9 [Arabidopsis thaliana]
  misc_feature (193)..(546): Homolog of NCBI NO: 15237563 NR Description: expressed protein [Arabidopsis thaliana] contains similarity to protein kinase~gene_id:MBM17.4 thaliana] >gi|20260318|gb|AAM13057.1| unknown protein
  misc_feature (176)..(546): Homolog of NCBI NO: 28376688 NR Description: putative serine/threonine kinase [Oryza sativa

SEQ ID NO: 99268 - protein, 499 aa, Arabidopsis thaliana; identical to SEQ ID NO: 39283
  peptide (1)..(499): Ceres Seq. ID no. 13602537
  misc_feature (1)..(499): Homolog of NCBI NO: 15240345 NR Description: protein kinase family [Arabidopsis thaliana]
  misc_feature (40)..(494): Homolog of NCBI NO: 15219657 NR Description: protein kinase family [Arabidopsis thaliana]
  misc_feature (264)..(499): Homolog of NCBI NO: 10177167 NR Description: Ser/Thr protein kinase-like protein [Arabidopsis
  misc_feature (179)..(250): Homolog of NCBI NO: 10177167 NR Description: Ser/Thr protein kinase-like protein [Arabidopsis
  misc_feature (1)..(164): Homolog of NCBI NO: 10177168 NR Description: gene_id:K22F20.5~unknown protein [Arabidopsis
  misc_feature (146)..(382): Homolog of NCBI NO: 15223890 NR Description: hypothetical protein [Arabidopsis thaliana]
  misc_feature (381)..(493): Homolog of NCBI NO: 15223890 NR Description: hypothetical protein [Arabidopsis thaliana]
  misc_feature (146)..(493): Homolog of NCBI NO: 22329713 NR Description: expressed protein [Arabidopsis thaliana] At1g21590/F24J8_9 [Arabidopsis thaliana]
  misc_feature (140)..(493): Homolog of NCBI NO: 15237563 NR Description: expressed protein [Arabidopsis thaliana] contains similarity to protein kinase~gene_id:MBM17.4 thaliana] >gi|20260318|gb|AAM13057.1| unknown protein
  misc_feature (123)..(493): Homolog of NCBI NO: 28376688 NR Description: putative serine/threonine kinase [Oryza sativa

SEQ ID NO: 99269 - protein, 445 aa, Arabidopsis thaliana; identical to SEQ ID NO: 39284
  peptide (1)..(445): Ceres Seq. ID no. 13602538
  misc_feature (1)..(445): Homolog of NCBI NO: 15240345 NR Description: protein kinase family [Arabidopsis thaliana]
  misc_feature (1)..(440): Homolog of NCBI NO: 15219657 NR Description: protein kinase family [Arabidopsis thaliana]
  misc_feature (210)..(445): Homolog of NCBI NO: 10177167 NR Description: Ser/Thr protein kinase-like protein [Arabidopsis
  misc_feature (125)..(196): Homolog of NCBI NO: 10177167 NR Description: Ser/Thr protein kinase-like protein [Arabidopsis
  misc_feature (1)..(110): Homolog of NCBI NO: 10177168 NR Description: gene_id:K22F20.5~unknown protein [Arabidopsis
  misc_feature (92)..(328): Homolog of NCBI NO: 15223890 NR Description: hypothetical protein [Arabidopsis thaliana]
  misc_feature (327)..(439): Homolog of NCBI NO: 15223890 NR Description: hypothetical protein [Arabidopsis thaliana]
  misc_feature (92)..(439): Homolog of NCBI NO: 22329713 NR Description: expressed protein [Arabidopsis thaliana] At1g21590/F24J8_9 [Arabidopsis thaliana]
  misc_feature (86)..(439): Homolog of NCBI NO: 15237563 NR Description: expressed protein [Arabidopsis thaliana] contains similarity to protein kinase~gene_id:MBM17.4 thaliana] >gi|20260318|gb|AAM13057.1| unknown protein
  misc_feature (69)..(439): Homolog of NCBI NO: 28376688 NR Description: putative serine/threonine kinase [Oryza sativa

SEQ ID NO: 99270 - DNA, 1252 bp, Arabidopsis thaliana
  misc_feature (1)..(1252): Ceres Seq. ID no. 13602539
  misc_feature: MA Experiment ID: 108463 Result: Up-regulated in Transcription
  misc_feature: MA Experiment 108463 PARAMETER Experiment Name: At_Germinating_Seeds_cDNA_P Parameter: Age (day) Value: 3 vs. 0
  misc_feature: MA Experiment 108463 PARAMETER Experiment Name: At_Germinating_Seeds_cDNA_P Parameter: Tissue Value: Germinating Seeds
  misc_feature: MA Experiment ID: 108464 Result: Up-regulated in Transcription
  misc_feature: MA Experiment 108464 PARAMETER Experiment Name: At_Germinating_Seeds_cDNA_P Parameter: Age (day) Value: 4 vs. 0
  misc_feature: MA Experiment 108464 PARAMETER Experiment Name: At_Germinating_Seeds_cDNA_P Parameter: Tissue Value: Germinating Seeds
  misc_feature: MA Experiment ID: 20000234 Result: Up-regulated in Transcription
  misc_feature: MA Experiment 20000234 PARAMETER Experiment Name: At_Siliques_P Parameter: Age (day) Value: 21
  misc_feature: MA Experiment 20000234 PARAMETER Experiment Name: At_Siliques_P Parameter: Organism Value: A. thaliana
  misc_feature: MA Experiment 20000234 PARAMETER Experiment Name: At_Siliques_P Parameter: Plant Line Value: WS
  misc_feature: MA Experiment 20000234 PARAMETER Experiment Name: At_Siliques_P Parameter: Tissue Value: Less Than 5mm Siliques vs. Whole Plant
  misc_feature: MA Experiment ID: 20000264 Result: Up-regulated in Transcription
  misc_feature: MA Experiment 20000264 PARAMETER Experiment Name: At_Open_Flower_P Parameter: Age (day) Value: 21
  misc_feature: MA Experiment 20000264 PARAMETER Experiment Name: At_Open_Flower_P Parameter: Plant Line Value: WS
  misc_feature: MA Experiment 20000264 PARAMETER Experiment Name: At_Open_Flower_P Parameter: Tissue Value: Open Flower vs. Whole Plant
  misc_feature: MA Experiment ID: 20000265 Result: Up-regulated in Transcription
  misc_feature: MA Experiment 20000265 PARAMETER Experiment Name: At_Open_Flower_P Parameter: Age (day) Value: 21
  misc_feature: MA Experiment 20000265 PARAMETER Experiment Name: At_Open_Flower_P Parameter: Plant Line Value: WS
  misc_feature: MA Experiment 20000265 PARAMETER Experiment Name: At_Open_Flower_P Parameter: Tissue Value: Closed Flower vs. Whole Plant
  misc_feature: MA Experiment ID: 20000269 Result: Up-regulated in Transcription
  misc_feature: MA Experiment 20000269 PARAMETER Experiment Name: At_1mM_KNO3_L-vs-H_Roots_P Parameter: Age (day) Value: 7,10,12
  misc_feature: MA Experiment 20000269 PARAMETER Experiment Name: At_1mM_KNO3_L-vs-H_Roots_P Parameter: Organism Value: A. thaliana
  misc_feature: MA Experiment 20000269 PARAMETER Experiment Name: At_1mM_KNO3_L-vs-H_Roots_P Parameter: Plant Line Value: WS
  misc_feature: MA Experiment 20000269 PARAMETER Experiment Name: At_1mM_KNO3_L-vs-H_Roots_P Parameter: Timepoint (day) Value: 7,10,12
  misc_feature: MA Experiment 20000269 PARAMETER Experiment Name: At_1mM_KNO3_L-vs-H_Roots_P Parameter: Tissue Value: Roots
  misc_feature: MA Experiment 20000269 PARAMETER Experiment Name: At_1mM_KNO3_L-vs-H_Roots_P Parameter: Treatment Value: 1mM KNO3 vs. 50mM KNO3
  misc_feature: MA Experiment ID: 20000286 Result: Up-regulated in Transcription
  misc_feature: MA Experiment 20000286 PARAMETER Experiment Name: At_Open_Flower_P Parameter: Age (day) Value: 21
  misc_feature: MA Experiment 20000286 PARAMETER Experiment Name: At_Open_Flower_P Parameter: Plant Line Value: WS
  misc_feature: MA Experiment 20000286 PARAMETER Experiment Name: At_Open_Flower_P Parameter: Tissue Value: Half Open vs. Whole Plant
  misc_feature: MA Experiment ID: 20000441 Result: Down-regulated in Transcription
  misc_feature: MA Experiment 20000441 PARAMETER Experiment Name: At_1uM_BR-BRZ__P Parameter: Tissue Value: Shoot Apices
  misc_feature: MA Experiment 20000441 PARAMETER Experiment Name: At_1uM_BR-BRZ__P Parameter: Treatment Value: 1uM BR vs. No Treatment
  misc_feature: MA Experiment ID: 20000443 Result: Down-regulated in Transcription
  misc_feature: MA Experiment 20000443 PARAMETER Experiment Name: At_1uM_BR-BRZ__P Parameter: Tissue Value: Shoot Apices
  misc_feature: MA Experiment 20000443 PARAMETER Experiment Name: At_1uM_BR-BRZ__P Parameter: Treatment Value: 1uM BRZ vs. No Treatment
  misc_feature: MA Experiment ID: 20000527 Result: Down-regulated in Transcription
  misc_feature: MA Experiment 20000527 PARAMETER Experiment Name: At_10percent_PEG_P Parameter: Age (day) Value: 20
  misc_feature: MA Experiment 20000527 PARAMETER Experiment Name: At_10percent_PEG_P Parameter: Organism Value: A. thaliana
  misc_feature: MA Experiment 20000527 PARAMETER Experiment Name: At_10percent_PEG_P Parameter: Plant Line Value: WS
  misc_feature: MA Experiment 20000527 PARAMETER Experiment Name: At_10percent_PEG_P Parameter: Timepoint (day) Value: 20
  misc_feature: MA Experiment 20000527 PARAMETER Experiment Name: At_10percent_PEG_P Parameter: Tissue Value: Whole Plant
  misc_feature: MA Experiment 20000527 PARAMETER Experiment Name: At_10percent_PEG_P Parameter: Treatment Value: 10percent PEG vs. No Treatment
  misc_feature: MA Experiment ID: 20001911 Result: Down-regulated in Transcription
  misc_feature: MA Experiment 20001911 PARAMETER Experiment Name: At_Drought_Reproduction_P Parameter: Age (day) Value: 40
  misc_feature: MA Experiment 20001911 PARAMETER Experiment Name: At_Drought_Reproduction_P Parameter: Organism Value: A. thaliana
  misc_feature: MA Experiment 20001911 PARAMETER Experiment Name: At_Drought_Reproduction_P Parameter: Plant Line Value: WS
  misc_feature: MA Experiment 20001911 PARAMETER Experiment Name: At_Drought_Reproduction_P Parameter: Timepoint (day) Value: 10
  misc_feature: MA Experiment 20001911 PARAMETER Experiment Name: At_Drought_Reproduction_P Parameter: Tissue Value: Flowers
  misc_feature: MA Experiment 20001911 PARAMETER Experiment Name: At_Drought_Reproduction_P Parameter: Treatment Value: Drought vs. No Drought
aggaaattatcatcttcgtccctaccaaatttttcagcagcgaaaatggcaaacatcagcgtagtgacgacagcgactaacaaccaggtgattctccgtaactacgtgagtggattccctaaagaatccgacctctacatcgccgcaaccaccgttgacttacgtgtacctcccggatccatggcggttctagtcaagaatctctacttatcttgcgatcctttcagccgcattcgcatggaaaaacccgacccttcgtcacctgcttccgtcgctcgcgcttactctatcggcaagccaatctctggatttggagtggctaaagcaatagattcatgtcatccaaattacaaaacaggagatttactttggggaagagttggatgggaagagtatagtgttattactccaactccttcttcacatttcaagattcatcacactgatgttccattatctttctacactggacttcttggtattccgggtctcactgcgtatgttgggttttacgagatatgttctccgaagaaaggagagactgtatttgtatcagctgcttctggtgcagtaggtcaacttgtaggacagtttgcgaagatggcgggatgctatgtcgttggaagtgccagtagtaaagagaaggttgatcttctcaagactaagttcgggtatgacgaagctttcaattacaaggaagagcatgatcttagtgctgccctaaagaggtgtttcccagaaggaatagacatatactttgagaatgtgggaggtaaaatgttagacgcagtgctcgaaaacatgagaacacatggccgaatcgctgcgtgtggaatgatctcacaatacaatctaaaggagccagaaggtgtacataacttagccagcattgtttacaaacggattcgggttcaaggttttgcagctgtagaattctttgataaatactccaagtttttggactttatacttccatatgtaagagaaggaaagataacatatgtcgaggatatagctcaaggacttgagaatggaccttctgctttgattggactcttccacggtaagaacgtcgggaaacaacttgttgcggttgctcgtgagtgatattgaattaataaatgtggttattatgacaaagctttgtttgtaggtcagaaataattggactattgttaattgtttactatatcgtaatagtccgctggtttaattatgttgtttgtgtgatattatatgcataaaggttctc

SEQ ID NO: 99271 - protein, 368 aa, Arabidopsis thaliana
  peptide (1)..(368): Ceres Seq. ID no. 13602540
  misc_feature (149)..(365): Pfam Name: Zinc-binding dehydrogenase Pfam Description: Zinc-binding dehydrogenase
  misc_feature (16)..(368): Homolog of NCBI NO: 15240810 NR Description: NADP-dependent oxidoreductase, putative
  misc_feature (16)..(368): Homolog of NCBI NO: 21536967 NR Description: quinone oxidoreductase-like protein [Arabidopsis
  misc_feature (16)..(368): Homolog of NCBI NO: 15240806 NR Description: NADP-dependent oxidoreductase, putative
  misc_feature (16)..(367): Homolog of NCBI NO: 15240812 NR Description: NADP-dependent oxidoreductase, putative
  misc_feature (16)..(368): Homolog of NCBI NO: 21537356 NR Description: quinone oxidoreductase-like protein [Arabidopsis
  misc_feature (24)..(368): Homolog of NCBI NO: 22326861 NR Description: NADP-dependent oxidoreductase, putative thaliana] >gi|16604344|gb|AAL24178.1| AT5g16970/F2K13_120 thaliana] >gi|23297366|gb|AAN12951.1| putative quinone
  misc_feature (24)..(368): Homolog of NCBI NO: 17529140 NR Description: putative quinone oxidoreductase [Arabidopsis
  misc_feature (24)..(368): Homolog of NCBI NO: 15237888 NR Description: NADP-dependent oxidoreductase (P1), putative
  misc_feature (16)..(368): Homolog of NCBI NO: 21593645 NR Description: allyl alcohol dehydrogenase, putative
  misc_feature (24)..(368): Homolog of NCBI NO: 21539447 NR Description: quinone oxidoreductase-like protein [Arabidopsis
RKLSSSSLPNFSAAKMANISVVTTATNNQVILRNYVSGFPKESDLYIAATTVDLRVPPGSMAVLVKNLYLSCDPFSRIRMEKPDPSSPASVARAYSIGKPISGFGVAKAIDSCHPNYKTGDLLWGRVGWEEYSVITPTPSSHFKIHHTDVPLSFYTGLLGIPGLTAYVGFYEICSPKKGETVFVSAASGAVGQLVGQFAKMAGCYVVGSASSKEKVDLLKTKFGYDEAFNYKEEHDLSAALKRCFPEGIDIYFENVGGKMLDAVLENMRTHGRIAACGMISQYNLKEPEGVHNLASIVYKRIRVQGFAAVEFFDKYSKFLDFILPYVREGKITYVEDIAQGLENGPSALIGLFHGKNVGKQLVAVARE

SEQ ID NO: 99272 - protein, 353 aa, Arabidopsis thaliana
  peptide (1)..(353): Ceres Seq. ID no. 13602541
  misc_feature (134)..(350): Pfam Name: Zinc-binding dehydrogenase Pfam Description: Zinc-binding dehydrogenase
  misc_feature (1)..(353): Homolog of NCBI NO: 15240810 NR Description: NADP-dependent oxidoreductase, putative
  misc_feature (1)..(353): Homolog of NCBI NO: 21536967 NR Description: quinone oxidoreductase-like protein [Arabidopsis
  misc_feature (1)..(353): Homolog of NCBI NO: 15240806 NR Description: NADP-dependent oxidoreductase, putative
  misc_feature (1)..(352): Homolog of NCBI NO: 15240812 NR Description: NADP-dependent oxidoreductase, putative
  misc_feature (1)..(353): Homolog of NCBI NO: 21537356 NR Description: quinone oxidoreductase-like protein [Arabidopsis
  misc_feature (9)..(353): Homolog of NCBI NO: 22326861 NR Description: NADP-dependent oxidoreductase, putative thaliana] >gi|16604344|gb|AAL24178.1| AT5g16970/F2K13_120 thaliana] >gi|23297366|gb|AAN12951.1| putative quinone
  misc_feature (9)..(353): Homolog of NCBI NO: 17529140 NR Description: putative quinone oxidoreductase [Arabidopsis
  misc_feature (9)..(353): Homolog of NCBI NO: 15237888 NR Description: NADP-dependent oxidoreductase (P1), putative
  misc_feature (1)..(353): Homolog of NCBI NO: 21593645 NR Description: allyl alcohol dehydrogenase, putative
  misc_feature (9)..(353): Homolog of NCBI NO: 21539447 NR Description: quinone oxidoreductase-like protein [Arabidopsis
MANISVVTTATNNQVILRNYVSGFPKESDLYIAATTVDLRVPPGSMAVLVKNLYLSCDPFSRIRMEKPDPSSPASVARAYSIGKPISGFGVAKAIDSCHPNYKTGDLLWGRVGWEEYSVITPTPSSHFKIHHTDVPLSFYTGLLGIPGLTAYVGFYEICSPKKGETVFVSAASGAVGQLVGQFAKMAGCYVVGSASSKEKVDLLKTKFGYDEAFNYKEEHDLSAALKRCFPEGIDIYFENVGGKMLDAVLENMRTHGRIAACGMISQYNLKEPEGVHNLASIVYKRIRVQGFAAVEFFDKYSKFLDFILPYVREGKITYVEDIAQGLENGPSALIGLFHGKNVGKQLVAVARE

SEQ ID NO: 99273 - protein, 308 aa, Arabidopsis thaliana
  peptide (1)..(308): Ceres Seq. ID no. 13602542
  misc_feature (89)..(305): Pfam Name: Zinc-binding dehydrogenase Pfam Description: Zinc-binding dehydrogenase
  misc_feature (1)..(308): Homolog of NCBI NO: 15240810 NR Description: NADP-dependent oxidoreductase, putative
  misc_feature (1)..(308): Homolog of NCBI NO: 21536967 NR Description: quinone oxidoreductase-like protein [Arabidopsis
  misc_feature (1)..(308): Homolog of NCBI NO: 15240806 NR Description: NADP-dependent oxidoreductase, putative
  misc_feature (1)..(307): Homolog of NCBI NO: 15240812 NR Description: NADP-dependent oxidoreductase, putative
  misc_feature (1)..(308): Homolog of NCBI NO: 21537356 NR Description: quinone oxidoreductase-like protein [Arabidopsis
  misc_feature (1)..(308): Homolog of NCBI NO: 22326861 NR Description: NADP-dependent oxidoreductase, putative thaliana] >gi|16604344|gb|AAL24178.1| AT5g16970/F2K13_120 thaliana] >gi|23297366|gb|AAN12951.1| putative quinone
  misc_feature (1)..(308): Homolog of NCBI NO: 17529140 NR Description: putative quinone oxidoreductase [Arabidopsis
  misc_feature (1)..(308): Homolog of NCBI NO: 15237888 NR Description: NADP-dependent oxidoreductase (P1), putative
  misc_feature (1)..(308): Homolog of NCBI NO: 21593645 NR Description: allyl alcohol dehydrogenase, putative
  misc_feature (1)..(308): Homolog of NCBI NO: 21539447 NR Description: quinone oxidoreductase-like protein [Arabidopsis
MAVLVKNLYLSCDPFSRIRMEKPDPSSPASVARAYSIGKPISGFGVAKAIDSCHPNYKTGDLLWGRVGWEEYSVITPTPSSHFKIHHTDVPLSFYTGLLGIPGLTAYVGFYEICSPKKGETVFVSAASGAVGQLVGQFAKMAGCYVVGSASSKEKVDLLKTKFGYDEAFNYKEEHDLSAALKRCFPEGIDIYFENVGGKMLDAVLENMRTHGRIAACGMISQYNLKEPEGVHNLASIVYKRIRVQGFAAVEFFDKYSKFLDFILPYVREGKITYVEDIAQGLENGPSALIGLFHGKNVGKQLVAVARE

SEQ ID NO: 99274 - DNA, 1302 bp, Arabidopsis thaliana
  misc_feature (1)..(1302): Ceres Seq. ID no. 13602547
  misc_feature: MA Experiment ID: 20000171 Result: Down-regulated in Transcription
  misc_feature: MA Experiment 20000171 PARAMETER Experiment Name: At_42deg_Heat_P Parameter: Age (day) Value: 14
  misc_feature: MA Experiment 20000171 PARAMETER Experiment Name: At_42deg_Heat_P Parameter: Organism Value: A. thaliana
  misc_feature: MA Experiment 20000171 PARAMETER Experiment Name: At_42deg_Heat_P Parameter: Plant Line Value: WS
  misc_feature: MA Experiment 20000171 PARAMETER Experiment Name: At_42deg_Heat_P Parameter: Temperature (deg C) Value: 42 vs. 22
  misc_feature: MA Experiment 20000171 PARAMETER Experiment Name: At_42deg_Heat_P Parameter: Timepoint (hr) Value: 1
  misc_feature: MA Experiment 20000171 PARAMETER Experiment Name: At_42deg_Heat_P Parameter: Tissue Value: Aerial
  misc_feature: MA Experiment ID: 20000173 Result: Down-regulated in Transcription
  misc_feature: MA Experiment 20000173 PARAMETER Experiment Name: At_42deg_Heat_P Parameter: Age (day) Value: 14
  misc_feature: MA Experiment 20000173 PARAMETER Experiment Name: At_42deg_Heat_P Parameter: Organism Value: A. thaliana
  misc_feature: MA Experiment 20000173 PARAMETER Experiment Name: At_42deg_Heat_P Parameter: Plant Line Value: WS
  misc_feature: MA Experiment 20000173 PARAMETER Experiment Name: At_42deg_Heat_P Parameter: Temperature (deg C) Value: 42 vs. 22
  misc_feature: MA Experiment 20000173 PARAMETER Experiment Name: At_42deg_Heat_P Parameter: Timepoint (hr) Value: 6
  misc_feature: MA Experiment 20000173 PARAMETER Experiment Name: At_42deg_Heat_P Parameter: Tissue Value: Aerial
  misc_feature: MA Experiment ID: 20000184 Result: Down-regulated in Transcription
  misc_feature: MA Experiment 20000184 PARAMETER Experiment Name: At_Shoots__P Parameter: Age (day) Value: 7
  misc_feature: MA Experiment 20000184 PARAMETER Experiment Name: At_Shoots__P Parameter: Tissue Value: Shoots vs. Whole Plant
  misc_feature: MA Experiment ID: 20000437 Result: Up-regulated in Transcription
  misc_feature: MA Experiment 20000437 PARAMETER Experiment Name: At_Drought_P Parameter: Age (day) Value: 8
  misc_feature: MA Experiment 20000437 PARAMETER Experiment Name: At_Drought_P Parameter: Organism Value: A. thaliana
  misc_feature: MA Experiment 20000437 PARAMETER Experiment Name: At_Drought_P Parameter: Plant Line Value: WS
  misc_feature: MA Experiment 20000437 PARAMETER Experiment Name: At_Drought_P Parameter: Timepoint (hr) Value: 24
  misc_feature: MA Experiment 20000437 PARAMETER Experiment Name: At_Drought_P Parameter: Tissue Value: Whole Plant
  misc_feature: MA Experiment 20000437 PARAMETER Experiment Name: At_Drought_P Parameter: Treatment Value: Drought vs. No Drought
  misc_feature: MA Experiment ID: 20000794 Result: Up-regulated in Transcription
  misc_feature: MA Experiment 20000794 PARAMETER Experiment Name: At_Petals_P Parameter: Age (day) Value: 23-25 days
  misc_feature: MA Experiment 20000794 PARAMETER Experiment Name: At_Petals_P Parameter: Plant Line Value: WS
  misc_feature: MA Experiment 20000794 PARAMETER Experiment Name: At_Petals_P Parameter: Tissue Value: Petals vs. Whole plant
  misc_feature: MA Experiment ID: 20001905 Result: Up-regulated in Transcription
  misc_feature: MA Experiment 20001905 PARAMETER Experiment Name: At_Drought_Reproduction_P Parameter: Age (day) Value: 40
  misc_feature: MA Experiment 20001905 PARAMETER Experiment Name: At_Drought_Reproduction_P Parameter: Organism Value: A. thaliana
  misc_feature: MA Experiment 20001905 PARAMETER Experiment Name: At_Drought_Reproduction_P Parameter: Plant Line Value: WS
  misc_feature: MA Experiment 20001905 PARAMETER Experiment Name: At_Drought_Reproduction_P Parameter: Timepoint (day) Value: 10
  misc_feature: MA Experiment 20001905 PARAMETER Experiment Name: At_Drought_Reproduction_P Parameter: Tissue Value: Rosettes
  misc_feature: MA Experiment 20001905 PARAMETER Experiment Name: At_Drought_Reproduction_P Parameter: Treatment Value: Drought vs. No Drought
gttcaatcattttctcctttccttcacctcaagatctcaaaaacacaaaaagagaaatcaatcaaaaccttagggttttctactaatttatctgtgtgatgttaagagaatcatcatcatcttcgtcgtcatgggaggagtaacttcatcaatcgctgcaaaattcgcttttttcccgccatcaccaccgtcttatggatttgtttccgacgttgaccgattatacataacagaagtacctcgccgtgatgatgtagatgtattgaagctaaagactcgtcgtggtaacgagattgtagctatttatattaaacatcctaaagctaatggtacgcttttgtattcacatggtaacgctgctgatttgggtcaaatgtttgagctttttatcgaacttagtaatcgtctccgacttaatctcatggggtatgattactctggttatggtcagtctactggaaaggcaagtgaatgtaatacctatgctgatatagatgcagcatatacttgcctcaaggaacattatggtgtaaaagatgatcaactgatattatatggtcagtctgttggtagtggaccaacgattgatttagcttcacgcacgcctaatttgcgaggagtggttttgcacagccctattctctctgggatgagagttttgtatccggttaaacgtacctattggtttgacatttacaagaatattgacaagatcggtgcagttacctgtcctgtcttagtaatccatgggactgcagatgaagtggttgattgttctcatggaaaacaactttgggaactttcaaaagaaaagtatgagcctttatgggtatctggaggaggacactgcaatctagaactctatccagagttcataaaacatctgaagaaatacgtaatttctatttccaagggaccaagaactggttcgaacaagactgcaacgacggatgcagccaaaaaacagagcaagcctgcagagaacgggcgtgctgatacgtttcaacttggctgttgccttccagaagtttctagaaacagtgtagacagtcagctggagaaatctaagaagactagtaaacccgagaagtctcgtatgagcattgataggtttagaaggaaaaaaggttcagtctggtgacatataaaggtccatcgacaaaacaggttatttgtaactcctgtttctgtaattcatatgtttctgcataaaattatgacgtgtggttttgtttttttctttctcaggtttgtgtatgtattttctaatagaaacagatcaaactcaaaagtcttgatttc

SEQ ID NO: 99275 - protein, 336 aa, Arabidopsis thaliana
  peptide (1)..(336): Ceres Seq. ID no. 13602548
  misc_feature (98)..(166): Pfam Name: alpha/beta hydrolase fold Pfam Description: alpha/beta hydrolase fold
  misc_feature (1)..(336): Homolog of NCBI NO: 10177798 NR Description: emb|CAB87778.1~gene_id:MXA21.9~strong similarity unknown protein [Arabidopsis thaliana] unknown protein [Arabidopsis thaliana]
  misc_feature (1)..(336): Homolog of NCBI NO: 15240861 NR Description: expressed protein [Arabidopsis thaliana]
  misc_feature (1)..(259): Homolog of NCBI NO: 22330474 NR Description: expressed protein [Arabidopsis thaliana] unknown protein [Arabidopsis thaliana]
  misc_feature (40)..(336): Homolog of NCBI NO: 34911338 NR Description: P0519D04.38 [Oryza sativa (japonica
  misc_feature (1)..(38): Homolog of NCBI NO: 34911338 NR Description: P0519D04.38 [Oryza sativa (japonica
  misc_feature (1)..(259): Homolog of NCBI NO: 25404647 NR Description: hypothetical protein T4O24.3 [imported] - thaliana >gi|12320929|gb|AAG50594.1|AC083891_8 hypothetical
  misc_feature (1)..(336): Homolog of NCBI NO: 15241394 NR Description: expressed protein [Arabidopsis thaliana]
  misc_feature (1)..(335): Homolog of NCBI NO: 15232168 NR Description: expressed protein [Arabidopsis thaliana] unknown protein [Arabidopsis thaliana] unknown protein [Arabidopsis thaliana]
  misc_feature (1)..(335): Homolog of NCBI NO: 15233975 NR Description: expressed protein [Arabidopsis thaliana]
  misc_feature (1)..(335): Homolog of NCBI NO: 15230760 NR Description: hypothetical protein [Arabidopsis thaliana] contains similarity to unknown
MGGVTSSIAAKFAFFPPSPPSYGFVSDVDRLYITEVPRRDDVDVLKLKTRRGNEIVAIYIKHPKANGTLLYSHGNAADLGQMFELFIELSNRLRLNLMGYDYSGYGQSTGKASECNTYADIDAAYTCLKEHYGVKDDQLILYGQSVGSGPTIDLASRTPNLRGVVLHSPILSGMRVLYPVKRTYWFDIYKNIDKIGAVTCPVLVIHGTADEVVDCSHGKQLWELSKEKYEPLWVSGGGHCNLELYPEFIKHLKKYVISISKGPRTGSNKTATTDAAKKQSKPAENGRADTFQLGCCLPEVSRNSVDSQLEKSKKTSKPEKSRMSIDRFRRKKGSVW

SEQ ID NO: 99276 - protein, 255 aa, Arabidopsis thaliana
  peptide (1)..(255): Ceres Seq. ID no. 13602549
  misc_feature (17)..(85): Pfam Name: alpha/beta hydrolase fold Pfam Description: alpha/beta hydrolase fold
  misc_feature (1)..(255): Homolog of NCBI NO: 10177798 NR Description: emb|CAB87778.1~gene_id:MXA21.9~strong similarity unknown protein [Arabidopsis thaliana] unknown protein [Arabidopsis thaliana]
  misc_feature (1)..(255): Homolog of NCBI NO: 15240861 NR Description: expressed protein [Arabidopsis thaliana]
  misc_feature (1)..(178): Homolog of NCBI NO: 22330474 NR Description: expressed protein [Arabidopsis thaliana] unknown protein [Arabidopsis thaliana]
  misc_feature (1)..(255): Homolog of NCBI NO: 34911338 NR Description: P0519D04.38 [Oryza sativa (japonica
  misc_feature (1)..(178): Homolog of NCBI NO: 25404647 NR Description: hypothetical protein T4O24.3 [imported] - thaliana >gi|12320929|gb|AAG50594.1|AC083891_8 hypothetical
  misc_feature (1)..(255): Homolog of NCBI NO: 15241394 NR Description: expressed protein [Arabidopsis thaliana]
  misc_feature (1)..(254): Homolog of NCBI NO: 15232168 NR Description: expressed protein [Arabidopsis thaliana] unknown protein [Arabidopsis thaliana] unknown protein [Arabidopsis thaliana]
  misc_feature (1)..(254): Homolog of NCBI NO: 15233975 NR Description: expressed protein [Arabidopsis thaliana]
  misc_feature (1)..(254): Homolog of NCBI NO: 15230760 NR Description: hypothetical protein [Arabidopsis thaliana] contains similarity to unknown
  misc_feature (1)..(180): Homolog of NCBI NO: 28393521 NR Description: unknown protein [Arabidopsis thaliana]
MFELFIELSNRLRLNLMGYDYSGYGQSTGKASECNTYADIDAAYTCLKEHYGVKDDQLILYGQSVGSGPTIDLASRTPNLRGVVLHSPILSGMRVLYPVKRTYWFDIYKNIDKIGAVTCPVLVIHGTADEVVDCSHGKQLWELSKEKYEPLWVSGGGHCNLELYPEFIKHLKKYVISISKGPRTGSNKTATTDAAKKQSKPAENGRADTFQLGCCLPEVSRNSVDSQLEKSKKTSKPEKSRMSIDRFRRKKGSVW

SEQ ID NO: 99277 - protein, 239 aa, Arabidopsis thaliana
  peptide (1)..(239): Ceres Seq. ID no. 13602550
  misc_feature (1)..(69): Pfam Name: alpha/beta hydrolase fold Pfam Description: alpha/beta hydrolase fold
  misc_feature (1)..(239): Homolog of NCBI NO: 10177798 NR Description: emb|CAB87778.1~gene_id:MXA21.9~strong similarity unknown protein [Arabidopsis thaliana] unknown protein [Arabidopsis thaliana]
  misc_feature (1)..(239): Homolog of NCBI NO: 15240861 NR Description: expressed protein [Arabidopsis thaliana]
  misc_feature (1)..(162): Homolog of NCBI NO: 22330474 NR Description: expressed protein [Arabidopsis thaliana] unknown protein [Arabidopsis thaliana]
  misc_feature (1)..(239): Homolog of NCBI NO: 34911338 NR Description: P0519D04.38 [Oryza sativa (japonica
  misc_feature (1)..(162): Homolog of NCBI NO: 25404647 NR Description: hypothetical protein T4O24.3 [imported] - thaliana >gi|12320929|gb|AAG50594.1|AC083891_8 hypothetical
  misc_feature (1)..(239): Homolog of NCBI NO: 15241394 NR Description: expressed protein [Arabidopsis thaliana]
  misc_feature (1)..(238): Homolog of NCBI NO: 15232168 NR Description: expressed protein [Arabidopsis thaliana] unknown protein [Arabidopsis thaliana] unknown protein [Arabidopsis thaliana]
  misc_feature (1)..(238): Homolog of NCBI NO: 15233975 NR Description: expressed protein [Arabidopsis thaliana]
  misc_feature (1)..(238): Homolog of NCBI NO: 15230760 NR Description: hypothetical protein [Arabidopsis thaliana] contains similarity to unknown
  misc_feature (1)..(164): Homolog of NCBI NO: 28393521 NR Description: unknown protein [Arabidopsis thaliana]
MGYDYSGYGQSTGKASECNTYADIDAAYTCLKEHYGVKDDQLILYGQSVGSGPTIDLASRTPNLRGVVLHSPILSGMRVLYPVKRTYWFDIYKNIDKIGAVTCPVLVIHGTADEVVDCSHGKQLWELSKEKYEPLWVSGGGHCNLELYPEFIKHLKKYVISISKGPRTGSNKTATTDAAKKQSKPAENGRADTFQLGCCLPEVSRNSVDSQLEKSKKTSKPEKSRMSIDRFRRKKGSVW

SEQ ID NO: 99278 - DNA, 1552 bp, Arabidopsis thaliana
  misc_feature (1)..(1552): Ceres Seq. ID no. 13602571
  misc_feature: MA Experiment ID: 108434 Result: Down-regulated in Transcription
  misc_feature: MA Experiment 108434 PARAMETER Experiment Name: At_Root_Tips_cDNA_P Parameter: Tissue Value: Root Tips
  misc_feature: MA Experiment ID: 108435 Result: Down-regulated in Transcription
  misc_feature: MA Experiment 108435 PARAMETER Experiment Name: At_stm_Mutants_cDNA_P Parameter: Plant Line Value: wt Landsburg vs stm
  misc_feature: MA Experiment 108435 PARAMETER Experiment Name: At_stm_Mutants_cDNA_P Parameter: Tissue Value: Shoot Apical Meristem Region
  misc_feature: MA Experiment ID: 108569 Result: Down-regulated in Transcription
  misc_feature: MA Experiment 108569 PARAMETER Experiment Name: At_0.001%_MeJA__cDNA_P Parameter: Timepoint (hr) Value: 6
  misc_feature: MA Experiment 108569 PARAMETER Experiment Name: At_0.001%_MeJA__cDNA_P Parameter: Tissue Value: Aerial
  misc_feature: MA Experiment 108569 PARAMETER Experiment Name: At_0.001%_MeJA__cDNA_P Parameter: Treatment Value: 0.001% MeJA vs. No Treatment
  misc_feature: MA Experiment ID: 108595 Result: Down-regulated in Transcription
  misc_feature: MA Experiment 108595 PARAMETER Experiment Name: At_Ler-pi_Ovule_cDNA_P Parameter: Plant Line Value: null
  misc_feature: MA Experiment ID: 108607 Result: Up-regulated in Transcription
  misc_feature: MA Experiment 108607 PARAMETER Experiment Name: At_100uM_ABA_cDNA_P Parameter: Timepoint (hr) Value: 4
  misc_feature: MA Experiment 108607 PARAMETER Experiment Name: At_100uM_ABA_cDNA_P Parameter: Tissue Value: Aerial
  misc_feature: MA Experiment 108607 PARAMETER Experiment Name: At_100uM_ABA_cDNA_P Parameter: Treatment Value: 100uM ABA vs. No Treatment
  misc_feature: MA Experiment ID: 20000069 Result: Up-regulated in Transcription
  misc_feature: MA Experiment 20000069 PARAMETER Experiment Name: At_100uM_ABA_Mutants_cDNA_P Parameter: Plant Line Value: CS23
  misc_feature: MA Experiment 20000069 PARAMETER Experiment Name: At_100uM_ABA_Mutants_cDNA_P Parameter: Timepoint (hr) Value: 6
  misc_feature: MA Experiment 20000069 PARAMETER Experiment Name: At_100uM_ABA_Mutants_cDNA_P Parameter: Tissue Value: Aerial
  misc_feature: MA Experiment 20000069 PARAMETER Experiment Name: At_100uM_ABA_Mutants_cDNA_P Parameter: Treatment Value: 100uM ABA vs. No Treatment
  misc_feature: MA Experiment ID: 20000071 Result: Up-regulated in Transcription
  misc_feature: MA Experiment 20000071 PARAMETER Experiment Name: At_100uM_ABA_Mutants_cDNA_P Parameter: Plant Line Value: CS8104
  misc_feature: MA Experiment 20000071 PARAMETER Experiment Name: At_100uM_ABA_Mutants_cDNA_P Parameter: Timepoint (hr) Value: 6
  misc_feature: MA Experiment 20000071 PARAMETER Experiment Name: At_100uM_ABA_Mutants_cDNA_P Parameter: Tissue Value: Aerial
  misc_feature: MA Experiment 20000071 PARAMETER Experiment Name: At_100uM_ABA_Mutants_cDNA_P Parameter: Treatment Value: 100uM ABA vs. No Treatment
  misc_feature: MA Experiment ID: 20000086 Result: Up-regulated in Transcription
  misc_feature: MA Experiment 20000086 PARAMETER Experiment Name: At_100uM_ABA_Mutants_cDNA_P Parameter: Plant Line Value: CS22
  misc_feature: MA Experiment 20000086 PARAMETER Experiment Name: At_100uM_ABA_Mutants_cDNA_P Parameter: Timepoint (hr) Value: 6
  misc_feature: MA Experiment 20000086 PARAMETER Experiment Name: At_100uM_ABA_Mutants_cDNA_P Parameter: Tissue Value: Aerial
  misc_feature: MA Experiment 20000086 PARAMETER Experiment Name: At_100uM_ABA_Mutants_cDNA_P Parameter: Treatment Value: 100uM ABA vs. No Treatment
  misc_feature: MA Experiment ID: 20000087 Result: Up-regulated in Transcription
  misc_feature: MA Experiment 20000087 PARAMETER Experiment Name: At_100uM_ABA_Mutants_cDNA_P Parameter: Plant Line Value: WS
  misc_feature: MA Experiment 20000087 PARAMETER Experiment Name: At_100uM_ABA_Mutants_cDNA_P Parameter: Timepoint (hr) Value: 6
  misc_feature: MA Experiment 20000087 PARAMETER Experiment Name: At_100uM_ABA_Mutants_cDNA_P Parameter: Tissue Value: Aerial
  misc_feature: MA Experiment 20000087 PARAMETER Experiment Name: At_100uM_ABA_Mutants_cDNA_P Parameter: Treatment Value: 100uM ABA vs. No Treatment
  misc_feature: MA Experiment ID: 20000088 Result: Up-regulated in Transcription
  misc_feature: MA Experiment 20000088 PARAMETER Experiment Name: At_100uM_ABA_Mutants_cDNA_P Parameter: Plant Line Value: Landsberg
  misc_feature: MA Experiment 20000088 PARAMETER Experiment Name: At_100uM_ABA_Mutants_cDNA_P Parameter: Timepoint (hr) Value: 6
  misc_feature: MA Experiment 20000088 PARAMETER Experiment Name: At_100uM_ABA_Mutants_cDNA_P Parameter: Tissue Value: Aerial
  misc_feature: MA Experiment 20000088 PARAMETER Experiment Name: At_100uM_ABA_Mutants_cDNA_P Parameter: Treatment Value: 100uM ABA vs. No Treatment
  misc_feature: MA Experiment ID: 20000089 Result: Up-regulated in Transcription
  misc_feature: MA Experiment ID: 20000090 Result: Up-regulated in Transcription
  misc_feature: MA Experiment ID: 20000112 Result: Down-regulated in Transcription
  misc_feature: MA Experiment 20000112 PARAMETER Experiment Name: At_42deg_Heat_cDNA_P Parameter: Temperature (deg C) Value: 42 vs. 22
  misc_feature: MA Experiment 20000112 PARAMETER Experiment Name: At_42deg_Heat_cDNA_P Parameter: Timepoint (hr) Value: 2
  misc_feature: MA Experiment 20000112 PARAMETER Experiment Name: At_42deg_Heat_cDNA_P Parameter: Tissue Value: Aerial
  misc_feature: MA Experiment ID: 20000113 Result: Down-regulated in Transcription
  misc_feature: MA Experiment 20000113 PARAMETER Experiment Name: At_42deg_Heat_cDNA_P Parameter: Temperature (deg C) Value: 42 vs. 22
  misc_feature: MA Experiment 20000113 PARAMETER Experiment Name: At_42deg_Heat_cDNA_P Parameter: Timepoint (hr) Value: 8
  misc_feature: MA Experiment 20000113 PARAMETER Experiment Name: At_42deg_Heat_cDNA_P Parameter: Tissue Value: Aerial
  misc_feature: MA Experiment ID: 20000117 Result: Up-regulated in Transcription
  misc_feature: MA Experiment 20000117 PARAMETER Experiment Name: At_100uM_ABA_Mutants_cDNA_P Parameter: Plant Line Value: Columbia
  misc_feature: MA Experiment 20000117 PARAMETER Experiment Name: At_100uM_ABA_Mutants_cDNA_P Parameter: Timepoint (hr) Value: 6
  misc_feature: MA Experiment 20000117 PARAMETER Experiment Name: At_100uM_ABA_Mutants_cDNA_P Parameter: Tissue Value: Aerial
  misc_feature: MA Experiment 20000117 PARAMETER Experiment Name: At_100uM_ABA_Mutants_cDNA_P Parameter: Treatment Value: 100uM ABA vs. No Treatment
  misc_feature: MA Experiment ID: 20000173 Result: Down-regulated in Transcription
  misc_feature: MA Experiment 20000173 PARAMETER Experiment Name: At_42deg_Heat_P Parameter: Age (day) Value: 14
  misc_feature: MA Experiment 20000173 PARAMETER Experiment Name: At_42deg_Heat_P Parameter: Organism Value: A. thaliana
  misc_feature: MA Experiment 20000173 PARAMETER Experiment Name: At_42deg_Heat_P Parameter: Plant Line Value: WS
  misc_feature: MA Experiment 20000173 PARAMETER Experiment Name: At_42deg_Heat_P Parameter: Temperature (deg C) Value: 42 vs. 22
  misc_feature: MA Experiment 20000173 PARAMETER Experiment Name: At_42deg_Heat_P Parameter: Timepoint (hr) Value: 6
  misc_feature: MA Experiment 20000173 PARAMETER Experiment Name: At_42deg_Heat_P Parameter: Tissue Value: Aerial
  misc_feature: MA Experiment ID: 20000182 Result: Down-regulated in Transcription
  misc_feature: MA Experiment 20000182 PARAMETER Experiment Name: At_2mM_SA_P Parameter: Age (day) Value: 14
  misc_feature: MA Experiment 20000182 PARAMETER Experiment Name: At_2mM_SA_P Parameter: Organism Value: A. thaliana
  misc_feature: MA Experiment 20000182 PARAMETER Experiment Name: At_2mM_SA_P Parameter: Plant Line Value: WS
  misc_feature: MA Experiment 20000182 PARAMETER Experiment Name: At_2mM_SA_P Parameter: Timepoint (hr) Value: 6
  misc_feature: MA Experiment 20000182 PARAMETER Experiment Name: At_2mM_SA_P Parameter: Tissue Value: Aerial
  misc_feature: MA Experiment 20000182 PARAMETER Experiment Name: At_2mM_SA_P Parameter: Treatment Value: 2mM SA vs. No Treatment
  misc_feature: MA Experiment ID: 20000184 Result: Down-regulated in Transcription
  misc_feature: MA Experiment 20000184 PARAMETER Experiment Name: At_Shoots__P Parameter: Age (day) Value: 7
  misc_feature: MA Experiment 20000184 PARAMETER Experiment Name: At_Shoots__P Parameter: Tissue Value: Shoots vs. Whole Plant
  misc_feature: MA Experiment ID: 20000211 Result: Up-regulated in Transcription
  misc_feature: MA Experiment 20000211 PARAMETER Experiment Name: At_0.001percent_MeJA__P Parameter: Age (day) Value: 14
  misc_feature: MA Experiment 20000211 PARAMETER Experiment Name: At_0.001percent_MeJA__P Parameter: Organism Value: A. thaliana
  misc_feature: MA Experiment 20000211 PARAMETER Experiment Name: At_0.001percent_MeJA__P Parameter: Plant Line Value: WS
  misc_feature: MA Experiment 20000211 PARAMETER Experiment Name: At_0.001percent_MeJA__P Parameter: Timepoint (hr) Value: 1
  misc_feature: MA Experiment 20000211 PARAMETER Experiment Name: At_0.001percent_MeJA__P Parameter: Tissue Value: Aerial
  misc_feature: MA Experiment 20000211 PARAMETER Experiment Name: At_0.001percent_MeJA__P Parameter: Treatment Value: 0.001percent MeJA vs. No Treatment
  misc_feature: MA Experiment ID: 20000224 Result: Up-regulated in Transcription
  misc_feature: MA Experiment ID: 20000234 Result: Down-regulated in Transcription
  misc_feature: MA Experiment 20000234 PARAMETER Experiment Name: At_Siliques_P Parameter: Age (day) Value: 21
  misc_feature: MA Experiment 20000234 PARAMETER Experiment Name: At_Siliques_P Parameter: Organism Value: A. thaliana
  misc_feature: MA Experiment 20000234 PARAMETER Experiment Name: At_Siliques_P Parameter: Plant Line Value: WS
  misc_feature: MA Experiment 20000234 PARAMETER Experiment Name: At_Siliques_P Parameter: Tissue Value: Less Than 5mm Siliques vs. Whole Plant
  misc_feature: MA Experiment ID: 20000235 Result: Down-regulated in Transcription
  misc_feature: MA Experiment 20000235 PARAMETER Experiment Name: At_Siliques_P Parameter: Age (day) Value: 21
  misc_feature: MA Experiment 20000235 PARAMETER Experiment Name: At_Siliques_P Parameter: Organism Value: A. thaliana
  misc_feature: MA Experiment 20000235 PARAMETER Experiment Name: At_Siliques_P Parameter: Plant Line Value: WS
  misc_feature: MA Experiment 20000235 PARAMETER Experiment Name: At_Siliques_P Parameter: Tissue Value: 5-10mm Siliques vs. Whole Plant
  misc_feature: MA Experiment ID: 20000264 Result: Down-regulated in Transcription
  misc_feature: MA Experiment 20000264 PARAMETER Experiment Name: At_Open_Flower_P Parameter: Age (day) Value: 21
  misc_feature: MA Experiment 20000264 PARAMETER Experiment Name: At_Open_Flower_P Parameter: Plant Line Value: WS
  misc_feature: MA Experiment 20000264 PARAMETER Experiment Name: At_Open_Flower_P Parameter: Tissue Value: Open Flower vs. Whole Plant
  misc_feature: MA Experiment ID: 20000265 Result: Down-regulated in Transcription
  misc_feature: MA Experiment 20000265 PARAMETER Experiment Name: At_Open_Flower_P Parameter: Age (day) Value: 21
  misc_feature: MA Experiment 20000265 PARAMETER Experiment Name: At_Open_Flower_P Parameter: Plant Line Value: WS
  misc_feature: MA Experiment 20000265 PARAMETER Experiment Name: At_Open_Flower_P Parameter: Tissue Value: Closed Flower vs. Whole Plant
  misc_feature: MA Experiment ID: 20000286 Result: Down-regulated in Transcription
  misc_feature: MA Experiment 20000286 PARAMETER Experiment Name: At_Open_Flower_P Parameter: Age (day) Value: 21
  misc_feature: MA Experiment 20000286 PARAMETER Experiment Name: At_Open_Flower_P Parameter: Plant Line Value: WS
  misc_feature: MA Experiment 20000286 PARAMETER Experiment Name: At_Open_Flower_P Parameter: Tissue Value: Half Open vs. Whole Plant
  misc_feature: MA Experiment ID: 20000438 Result: Down-regulated in Transcription
  misc_feature: MA Experiment 20000438 PARAMETER Experiment Name: At_Shoots__P Parameter: Age (day) Value: 14
  misc_feature: MA Experiment 20000438 PARAMETER Experiment Name: At_Shoots__P Parameter: Tissue Value: Shoots vs. Whole Plant
  misc_feature: MA Experiment ID: 20000794 Result: Down-regulated in Transcription
  misc_feature: MA Experiment 20000794 PARAMETER Experiment Name: At_Petals_P Parameter: Age (day) Value: 23-25 days
  misc_feature: MA Experiment 20000794 PARAMETER Experiment Name: At_Petals_P Parameter: Plant Line Value: WS
  misc_feature: MA Experiment 20000794 PARAMETER Experiment Name: At_Petals_P Parameter: Tissue Value: Petals vs. Whole plant
  misc_feature: MA Experiment ID: 20001248 Result: Up-regulated in Transcription
  misc_feature: MA Experiment 20001248 PARAMETER Experiment Name: At_Far-red-induction_P Parameter: Age (day) Value: 7
  misc_feature: MA Experiment 20001248 PARAMETER Experiment Name: At_Far-red-induction_P Parameter: Light Value: Far-red vs. White
  misc_feature: MA Experiment 20001248 PARAMETER Experiment Name: At_Far-red-induction_P Parameter: Organism Value: A. thaliana
  misc_feature: MA Experiment 20001248 PARAMETER Experiment Name: At_Far-red-induction_P Parameter: Plant Line Value: Columbia
  misc_feature: MA Experiment 20001248 PARAMETER Experiment Name: At_Far-red-induction_P Parameter: Timepoint (hr) Value: 4
  misc_feature: MA Experiment 20001248 PARAMETER Experiment Name: At_Far-red-induction_P Parameter: Tissue Value: Whole Plant
  misc_feature: MA Experiment ID: 20001558 Result: Down-regulated in Transcription
  misc_feature: MA Experiment 20001558 PARAMETER Experiment Name: At_Drought_Soil_Dry_P Parameter: Age (day) Value: 27
  misc_feature: MA Experiment 20001558 PARAMETER Experiment Name: At_Drought_Soil_Dry_P Parameter: Organism Value: A. thaliana
  misc_feature: MA Experiment 20001558 PARAMETER Experiment Name: At_Drought_Soil_Dry_P Parameter: Plant Line Value: WS
  misc_feature: MA Experiment 20001558 PARAMETER Experiment Name: At_Drought_Soil_Dry_P Parameter: Post Timepoint (hr) Value: 6
  misc_feature: MA Experiment 20001558 PARAMETER Experiment Name: At_Drought_Soil_Dry_P Parameter: Post-Treatment Value: Re-Water vs. No Drought
  misc_feature: MA Experiment 20001558 PARAMETER Experiment Name: At_Drought_Soil_Dry_P Parameter: Timepoint (day) Value: 13
  misc_feature: MA Experiment 20001558 PARAMETER Experiment Name: At_Drought_Soil_Dry_P Parameter: Treatment Value: Drought vs. No Drought
  misc_feature: MA Experiment ID: 20001560 Result: Down-regulated in Transcription
  misc_feature: MA Experiment 20001560 PARAMETER Experiment Name: At_Drought_Soil_Dry_P Parameter: Age (day) Value: 28
  misc_feature: MA Experiment 20001560 PARAMETER Experiment Name: At_Drought_Soil_Dry_P Parameter: Organism Value: A. thaliana
  misc_feature: MA Experiment 20001560 PARAMETER Experiment Name: At_Drought_Soil_Dry_P Parameter: Plant Line Value: WS
  misc_feature: MA Experiment 20001560 PARAMETER Experiment Name: At_Drought_Soil_Dry_P Parameter: Post Timepoint (hr) Value: None
  misc_feature: MA Experiment 20001560 PARAMETER Experiment Name: At_Drought_Soil_Dry_P Parameter: Post-Treatment Value: None
  misc_feature: MA Experiment 20001560 PARAMETER Experiment Name: At_Drought_Soil_Dry_P Parameter: Timepoint (day) Value: 14
  misc_feature: MA Experiment 20001560 PARAMETER Experiment Name: At_Drought_Soil_Dry_P Parameter: Treatment Value: Drought vs. No Drought
  misc_feature: MA Experiment ID: 20001904 Result: Down-regulated in Transcription
  misc_feature: MA Experiment 20001904 PARAMETER Experiment Name: At_Drought_Reproduction_P Parameter: Age (day) Value: 37
  misc_feature: MA Experiment 20001904 PARAMETER Experiment Name: At_Drought_Reproduction_P Parameter: Organism Value: A. thaliana
  misc_feature: MA Experiment 20001904 PARAMETER Experiment Name: At_Drought_Reproduction_P Parameter: Plant Line Value: WS
  misc_feature: MA Experiment 20001904 PARAMETER Experiment Name: At_Drought_Reproduction_P Parameter: Timepoint (day) Value: 7
  misc_feature: MA Experiment 20001904 PARAMETER Experiment Name: At_Drought_Reproduction_P Parameter: Tissue Value: Rosettes
  misc_feature: MA Experiment 20001904 PARAMETER Experiment Name: At_Drought_Reproduction_P Parameter: Treatment Value: Drought vs. No Drought
aattcgaacccttcaagattttcttctctctatctctctgtttctctctgtttctgagatgggtttgtttggaacgaagaagatcgggaagtatgagataggaagaacaatcggagaagggaatttcgcaaaagtgaaacttggttacgacacgaccaatggtacttacgtagctgtcaaaatcatagacaaggctttggttattcaaaagggtcttgagtctcaagtcaagagagagatacgaacgatgaagcttcttaaccatcccaacatcgtccaaatacacgaggtgattggaaccaagacaaagatctgtatagttatggaatacgtttcaggtggtcagctttcagacagacttggaagacagaaaatgaaagaatcagatgctagaaaacttttccaacaattgattgatgctgttgattattgtcataacagaggagtttatcatagagatcttaagccacaaaacttgttactagattcaaagggtaatctcaaagtttctgactttggattaagtgcagttcctaaatcgggggatatgctctctacagcttgtggctctccatgttatatagcaccagagttgattatgaacaaaggctactcaggagcagcagtagatgtatggtcttgtggagtgattctatttgaattgcttgctggttatccacctttcgatgatcatacacttccggttttgtataagaagatactcagagcagattacacgttcccacctggattcactggagagcagaagaggctaatctttaacattcttgacccaaatcctctaagtcgtataacactagctgagataatcatcaaagattcttggttcaagataggttatacaccagtttatcatcaactttcagactcaatcaaggacaatgtcgcggagataaatgcagcaaccgcgtcatcaaatttcataaatgcttttcagataatagcaatgtctagtgatctagatttgtcaggtctcttcgaagaaaatgatgataagagatataaaacaagaattgggtccaagaacacagcacaagaaacaatcaagaagattgaagctgcagcaacttatgttagtttatcagttgagagaataaagcacttcaaggttaagattcagccaaaggagataagatcaagatcttcttatgacttattatcagcagaggtgatagaggtgactccaacaaattgtgttatagaaatatcgaaatccgcaggcgagttaagactatacatggagttttgccagagcttatcaagcttacttaccgcggaagtaagctaagatagagagccatagattctcaagtaaaaatgttaaaacagaggaagcaaatgaagcatatttttgcagattgaagttgaagtgtaaagaagacaatgaagagaagaaatccaaagaatttagttatgtcttggatcttggtgatcccaaagggttcttattcaggatgtaaaatgatagattggtttctaatcaaactcgtttataaaatagatatataaaaagctgaacaagttctatttc

SEQ ID NO: 99279 - protein, 435 aa, Arabidopsis thaliana
  peptide (1)..(435): Ceres Seq. ID no. 13602572
  misc_feature (31)..(283): Pfam Name: Protein kinase domain Pfam Description: Protein kinase domain
  misc_feature (20)..(435): Homolog of NCBI NO: 18424001 NR Description: CBL-interacting protein kinase 21 [Arabidopsis
  misc_feature (20)..(435): Homolog of NCBI NO: 20260304 NR Description: unknown protein [Arabidopsis thaliana]
  misc_feature (20)..(435): Homolog of NCBI NO: 9758325 NR Description: SNF1 related protein kinase-like protein
  misc_feature (26)..(430): Homolog of NCBI NO: 7446371 NR Description: probable serine/threonine kinase (EC 2.7.1.-) - sorghum >gi|2632252|emb|CAA73067.1| serine/threonine kinase
  misc_feature (26)..(430): Homolog of NCBI NO: 7446372 NR Description: probable serine/threonine kinase (EC 2.7.1.-) - sorghum >gi|2632254|emb|CAA73068.1| serine/threonine kinase
  misc_feature (24)..(428): Homolog of NCBI NO: 25387051 NR Description: probable serine/threonine kinase [imported] - thaliana >gi|12320856|gb|AAG50566.1|AC073506_8 serine/threonine
  misc_feature (24)..(428): Homolog of NCBI NO: 34393400 NR Description: putative CBL-interacting protein kinase 23 [Oryza
  misc_feature (24)..(428): Homolog of NCBI NO: 18397430 NR Description: CBL-interacting protein kinase 23 [Arabidopsis
  misc_feature (28)..(430): Homolog of NCBI NO: 34894358 NR Description: unnamed protein product [Oryza sativa (japonica group)] >gi|8468028|dbj|BAA96628.1| unnamed protein product
  misc_feature (27)..(423): Homolog of NCBI NO: 9294138 NR Description: serine/threonine kinase [Arabidopsis thaliana]
IRTLQDFLLSISLFLSVSEMGLFGTKKIGKYEIGRTIGEGNFAKVKLGYDTTNGTYVAVKIIDKALVIQKGLESQVKREIRTMKLLNHPNIVQIHEVIGTKTKICIVMEYVSGGQLSDRLGRQKMKESDARKLFQQLIDAVDYCHNRGVYHRDLKPQNLLLDSKGNLKVSDFGLSAVPKSGDMLSTACGSPCYIAPELIMNKGYSGAAVDVWSCGVILFELLAGYPPFDDHTLPVLYKKILRADYTFPPGFTGEQKRLIFNILDPNPLSRITLAEIIIKDSWFKIGYTPVYHQLSDSIKDNVAEINAATASSNFINAFQIIAMSSDLDLSGLFEENDDKRYKTRIGSKNTAQETIKKIEAAATYVSLSVERIKHFKVKIQPKEIRSRSSYDLLSAEVIEVTPTNCVIEISKSAGELRLYMEFCQSLSSLLTAEVS

SEQ ID NO: 99280 - protein, 416 aa, Arabidopsis thaliana
  peptide (1)..(416): Ceres Seq. ID no. 13602573
  misc_feature (12)..(264): Pfam Name: Protein kinase domain Pfam Description: Protein kinase domain
  misc_feature (1)..(416): Homolog of NCBI NO: 18424001 NR Description: CBL-interacting protein kinase 21 [Arabidopsis
  misc_feature (1)..(416): Homolog of NCBI NO: 20260304 NR Description: unknown protein [Arabidopsis thaliana]
  misc_feature (1)..(416): Homolog of NCBI NO: 9758325 NR Description: SNF1 related protein kinase-like protein
  misc_feature (7)..(411): Homolog of NCBI NO: 7446371 NR Description: probable serine/threonine kinase (EC 2.7.1.-) - sorghum >gi|2632252|emb|CAA73067.1| serine/threonine kinase
  misc_feature (7)..(411): Homolog of NCBI NO: 7446372 NR Description: probable serine/threonine kinase (EC 2.7.1.-) - sorghum >gi|2632254|emb|CAA73068.1| serine/threonine kinase
  misc_feature (5)..(409): Homolog of NCBI NO: 25387051 NR Description: probable serine/threonine kinase [imported] - thaliana >gi|12320856|gb|AAG50566.1|AC073506_8 serine/threonine
  misc_feature (5)..(409): Homolog of NCBI NO: 34393400 NR Description: putative CBL-interacting protein kinase 23 [Oryza
  misc_feature (5)..(409): Homolog of NCBI NO: 18397430 NR Description: CBL-interacting protein kinase 23 [Arabidopsis
  misc_feature (9)..(411): Homolog of NCBI NO: 34894358 NR Description: unnamed protein product [Oryza sativa (japonica group)] >gi|8468028|dbj|BAA96628.1| unnamed protein product
  misc_feature (8)..(404): Homolog of NCBI NO: 9294138 NR Description: serine/threonine kinase [Arabidopsis thaliana]
MGLFGTKKIGKYEIGRTIGEGNFAKVKLGYDTTNGTYVAVKIIDKALVIQKGLESQVKREIRTMKLLNHPNIVQIHEVIGTKTKICIVMEYVSGGQLSDRLGRQKMKESDARKLFQQLIDAVDYCHNRGVYHRDLKPQNLLLDSKGNLKVSDFGLSAVPKSGDMLSTACGSPCYIAPELIMNKGYSGAAVDVWSCGVILFELLAGYPPFDDHTLPVLYKKILRADYTFPPGFTGEQKRLIFNILDPNPLSRITLAEIIIKDSWFKIGYTPVYHQLSDSIKDNVAEINAATASSNFINAFQIIAMSSDLDLSGLFEENDDKRYKTRIGSKNTAQETIKKIEAAATYVSLSVERIKHFKVKIQPKEIRSRSSYDLLSAEVIEVTPTNCVIEISKSAGELRLYMEFCQSLSSLLTAEVS

SEQ ID NO: 99281 - protein, 353 aa, Arabidopsis thaliana
  peptide (1)..(353): Ceres Seq. ID no. 13602574
  misc_feature (1)..(201): Pfam Name: Protein kinase domain Pfam Description: Protein kinase domain
  misc_feature (1)..(353): Homolog of NCBI NO: 18424001 NR Description: CBL-interacting protein kinase 21 [Arabidopsis
  misc_feature (1)..(353): Homolog of NCBI NO: 20260304 NR Description: unknown protein [Arabidopsis thaliana]
  misc_feature (1)..(353): Homolog of NCBI NO: 9758325 NR Description: SNF1 related protein kinase-like protein
  misc_feature (1)..(348): Homolog of NCBI NO: 7446371 NR Description: probable serine/threonine kinase (EC 2.7.1.-) - sorghum >gi|2632252|emb|CAA73067.1| serine/threonine kinase
  misc_feature (1)..(348): Homolog of NCBI NO: 7446372 NR Description: probable serine/threonine kinase (EC 2.7.1.-) - sorghum >gi|2632254|emb|CAA73068.1| serine/threonine kinase
  misc_feature (1)..(346): Homolog of NCBI NO: 25387051 NR Description: probable serine/threonine kinase [imported] - thaliana >gi|12320856|gb|AAG50566.1|AC073506_8 serine/threonine
  misc_feature (1)..(346): Homolog of NCBI NO: 34393400 NR Description: putative CBL-interacting protein kinase 23 [Oryza
  misc_feature (1)..(346): Homolog of NCBI NO: 18397430 NR Description: CBL-interacting protein kinase 23 [Arabidopsis
  misc_feature (1)..(348): Homolog of NCBI NO: 34894358 NR Description: unnamed protein product [Oryza sativa (japonica group)] >gi|8468028|dbj|BAA96628.1| unnamed protein product
  misc_feature (1)..(341): Homolog of NCBI NO: 9294138 NR Description: serine/threonine kinase [Arabidopsis thaliana]
MKLLNHPNIVQIHEVIGTKTKICIVMEYVSGGQLSDRLGRQKMKESDARKLFQQLIDAVDYCHNRGVYHRDLKPQNLLLDSKGNLKVSDFGLSAVPKSGDMLSTACGSPCYIAPELIMNKGYSGAAVDVWSCGVILFELLAGYPPFDDHTLPVLYKKILRADYTFPPGFTGEQKRLIFNILDPNPLSRITLAEIIIKDSWFKIGYTPVYHQLSDSIKDNVAEINAATASSNFINAFQIIAMSSDLDLSGLFEENDDKRYKTRIGSKNTAQETIKKIEAAATYVSLSVERIKHFKVKIQPKEIRSRSSYDLLSAEVIEVTPTNCVIEISKSAGELRLYMEFCQSLSSLLTAEVS

SEQ ID NO: 99282 - DNA, 1382 bp, Arabidopsis thaliana
  misc_feature (1)..(1382): Ceres Seq. ID no. 13602579
  misc_feature: MA Experiment ID: 108461 Result: Down-regulated in Transcription
  misc_feature: MA Experiment 108461 PARAMETER Experiment Name: At_Germinating_Seeds_cDNA_P Parameter: Age (day) Value: 1 vs. 0
  misc_feature: MA Experiment 108461 PARAMETER Experiment Name: At_Germinating_Seeds_cDNA_P Parameter: Tissue Value: Germinating Seeds
  misc_feature: MA Experiment ID: 108464 Result: Down-regulated in Transcription
  misc_feature: MA Experiment 108464 PARAMETER Experiment Name: At_Germinating_Seeds_cDNA_P Parameter: Age (day) Value: 4 vs. 0
  misc_feature: MA Experiment 108464 PARAMETER Experiment Name: At_Germinating_Seeds_cDNA_P Parameter: Tissue Value: Germinating Seeds
  misc_feature: MA Experiment ID: 20000173 Result: Up-regulated in Transcription
  misc_feature: MA Experiment 20000173 PARAMETER Experiment Name: At_42deg_Heat_P Parameter: Age (day) Value: 14
  misc_feature: MA Experiment 20000173 PARAMETER Experiment Name: At_42deg_Heat_P Parameter: Organism Value: A. thaliana
  misc_feature: MA Experiment 20000173 PARAMETER Experiment Name: At_42deg_Heat_P Parameter: Plant Line Value: WS
  misc_feature: MA Experiment 20000173 PARAMETER Experiment Name: At_42deg_Heat_P Parameter: Temperature (deg C) Value: 42 vs. 22
  misc_feature: MA Experiment 20000173 PARAMETER Experiment Name: At_42deg_Heat_P Parameter: Timepoint (hr) Value: 6
  misc_feature: MA Experiment 20000173 PARAMETER Experiment Name: At_42deg_Heat_P Parameter: Tissue Value: Aerial
  misc_feature: MA Experiment ID: 20000180 Result: Down-regulated in Transcription
  misc_feature: MA Experiment 20000180 PARAMETER Experiment Name: At_Germinating_Seeds_P Parameter: Age (hr) Value: 24 vs. 0
  misc_feature: MA Experiment 20000180 PARAMETER Experiment Name: At_Germinating_Seeds_P Parameter: Tissue Value: Germinating Seeds
aagagttccaaaaaggtggctcctttttgtttctggagatgcgttattgtgacccttctttgaaatttagggttcattttctcagatttcgagttcgttgtgtttgaatctctattgggtttactttcttattcgatttgggggaaatggctgattggtatcagcttgcacagtctataatctttggtttgatcttcgcttaccttctcgctaagctaatctctatcctcctcgcttttaaagacgagaatctctcactcactcgtaaccacacgactcaatcggagtatgagaacttgcgaaaggtcgaaactttaactgggattagcggcgagactgattctcttatagctgagcaaggtagcttgagaggtgatgaagatgaatcagatgatgatgattgggaaggtgtcgaaagtacagaacttgatgaggcatttagtgctgctacggcttttgttgctgctgctgcatcggataggctttcgcagaaagtttctaatgagttgcaacttcagctttatggattgtataaaattgctactgaaggaccttgtactgctcctcaaccatcagctcttaaaatgactgctcgtgccaagtggcaagcatggcagaaattgggtgctatgcctcctgaggaagcgatggagaagtatatcgaccttgttactcagctttacccagcttgggttgaaggtggctcgaaacgaagaaatcggagtggtgaggctgcaggccccatgggaccggtttttagctcattggtgtacgaagaggaatctgacaatgagttgaagattgacgccatacacgcctttgctagagaaggagaagtcgagaatctattgaaatgcatagaaaatggcatacccgtaaatgcaagagatagtgaaggtcgaacaccactgcattgggctatagaccgtggccatcttaacgttgctgaagctctggttgataagaacgcagatgtgaatgctaaagacaatgaaggccaaacctctctacactatgctgttgtgtgcgaaagagaagcactcgccgagtttctggtgaagcagaaagctgatacaaccattaaagacgaagacggaaactcgcctcttgatctctgtgaatcagaatggtcttggatgcgagagaagaaggattccaattagtgttttttaagtctttaaaattgtgtgtcaaagctagatgcttgtgtttttcttacatttcctctgagcctctttgcttcctcttaagcttatgttttaacatacaacaacacaagttacatatgatatagtagctctagtttttattggttactatattgaacccagagagatcatcatcatcaatcatcataactcaataatagttttttttttgtt

SEQ ID NO: 99283 - protein, 338 aa, Arabidopsis thaliana; identical to SEQ ID NO: 23209
  peptide (1)..(338): Ceres Seq. ID no. 13602580
  misc_feature (94)..(180): Pfam Name: Acyl CoA binding protein Pfam Description: Acyl CoA binding protein
  misc_feature (1)..(338): Homolog of NCBI NO: 15238757 NR Description: acyl-CoA binding protein (ACBP) [Arabidopsis
  misc_feature (1)..(338): Homolog of NCBI NO: 21284389 NR Description: acyl-CoA binding protein [Arabidopsis thaliana]
  misc_feature (1)..(338): Homolog of NCBI NO: 21593070 NR Description: putative acyl-CoA binding protein [Arabidopsis
  misc_feature (1)..(333): Homolog of NCBI NO: 15234270 NR Description: acyl-CoA binding protein -related [Arabidopsis
  misc_feature (1)..(258): Homolog of NCBI NO: 12039034 NR Description: acyl-CoA binding protein 2 [Arabidopsis thaliana]
  misc_feature (3)..(331): Homolog of NCBI NO: 32488636 NR Description: OSJNBa0032F06.12 [Oryza sativa (japonica
  misc_feature (72)..(320): Homolog of NCBI NO: 14150169 NR Description: hypothetical protein MGC2404 [Homo sapiens]
  misc_feature (69)..(320): Homolog of NCBI NO: 34880749 NR Description: similar to RIKEN cDNA 2610100E10 [Rattus
  misc_feature (69)..(320): Homolog of NCBI NO: 21312284 NR Description: RIKEN cDNA 2610100E10 [Mus musculus]
  misc_feature (67)..(327): Homolog of NCBI NO: 31204677 NR Description: ENSANGP00000017422 [Anopheles gambiae]

SEQ ID NO: 99284 - protein, 192 aa, Arabidopsis thaliana; identical to SEQ ID NO: 23210
  peptide (1)..(192): Ceres Seq. ID no. 13602581
  misc_feature (104)..(136): Pfam Name: Ankyrin repeat Pfam Description: Ankyrin repeat
  misc_feature (1)..(192): Homolog of NCBI NO: 15238757 NR Description: acyl-CoA binding protein (ACBP) [Arabidopsis
  misc_feature (1)..(192): Homolog of NCBI NO: 21284389 NR Description: acyl-CoA binding protein [Arabidopsis thaliana]
  misc_feature (1)..(192): Homolog of NCBI NO: 21593070 NR Description: putative acyl-CoA binding protein [Arabidopsis
  misc_feature (1)..(187): Homolog of NCBI NO: 15234270 NR Description: acyl-CoA binding protein -related [Arabidopsis
  misc_feature (1)..(112): Homolog of NCBI NO: 12039034 NR Description: acyl-CoA binding protein 2 [Arabidopsis thaliana]
  misc_feature (1)..(185): Homolog of NCBI NO: 32488636 NR Description: OSJNBa0032F06.12 [Oryza sativa (japonica
  misc_feature (1)..(174): Homolog of NCBI NO: 14150169 NR Description: hypothetical protein MGC2404 [Homo sapiens]
  misc_feature (1)..(174): Homolog of NCBI NO: 34880749 NR Description: similar to RIKEN cDNA 2610100E10 [Rattus
  misc_feature (1)..(174): Homolog of NCBI NO: 21312284 NR Description: RIKEN cDNA 2610100E10 [Mus musculus]
  misc_feature (1)..(181): Homolog of NCBI NO: 31204677 NR Description: ENSANGP00000017422 [Anopheles gambiae]

SEQ ID NO: 99285 - protein, 177 aa, Arabidopsis thaliana; identical to SEQ ID NO: 23211
  peptide (1)..(177): Ceres Seq. ID no. 13602582
  misc_feature (89)..(121): Pfam Name: Ankyrin repeat Pfam Description: Ankyrin repeat
  misc_feature (1)..(177): Homolog of NCBI NO: 15238757 NR Description: acyl-CoA binding protein (ACBP) [Arabidopsis
  misc_feature (1)..(177): Homolog of NCBI NO: 21284389 NR Description: acyl-CoA binding protein [Arabidopsis thaliana]
  misc_feature (1)..(177): Homolog of NCBI NO: 21593070 NR Description: putative acyl-CoA binding protein [Arabidopsis
  misc_feature (1)..(172): Homolog of NCBI NO: 15234270 NR Description: acyl-CoA binding protein -related [Arabidopsis
  misc_feature (1)..(97): Homolog of NCBI NO: 12039034 NR Description: acyl-CoA binding protein 2 [Arabidopsis thaliana]
  misc_feature (1)..(170): Homolog of NCBI NO: 32488636 NR Description: OSJNBa0032F06.12 [Oryza sativa (japonica
  misc_feature (1)..(159): Homolog of NCBI NO: 14150169 NR Description: hypothetical protein MGC2404 [Homo sapiens]
  misc_feature (1)..(159): Homolog of NCBI NO: 34880749 NR Description: similar to RIKEN cDNA 2610100E10 [Rattus
  misc_feature (1)..(159): Homolog of NCBI NO: 21312284 NR Description: RIKEN cDNA 2610100E10 [Mus musculus]
  misc_feature (1)..(166): Homolog of NCBI NO: 31204677 NR Description: ENSANGP00000017422 [Anopheles gambiae]

SEQ ID NO: 99286 - DNA, 1495 bp, Arabidopsis thaliana
  misc_feature (1)..(1495): Ceres Seq. ID no. 13602587
  misc_feature: MA Experiment ID: 108462 Result: Down-regulated in Transcription
  misc_feature: MA Experiment 108462 PARAMETER Experiment Name: At_Germinating_Seeds_cDNA_P Parameter: Age (day) Value: 2 vs. 0
  misc_feature: MA Experiment 108462 PARAMETER Experiment Name: At_Germinating_Seeds_cDNA_P Parameter: Tissue Value: Germinating Seeds
  misc_feature: MA Experiment ID: 108463 Result: Down-regulated in Transcription
  misc_feature: MA Experiment 108463 PARAMETER Experiment Name: At_Germinating_Seeds_cDNA_P Parameter: Age (day) Value: 3 vs. 0
  misc_feature: MA Experiment 108463 PARAMETER Experiment Name: At_Germinating_Seeds_cDNA_P Parameter: Tissue Value: Germinating Seeds
  misc_feature: MA Experiment ID: 108464 Result: Down-regulated in Transcription
  misc_feature: MA Experiment 108464 PARAMETER Experiment Name: At_Germinating_Seeds_cDNA_P Parameter: Age (day) Value: 4 vs. 0
  misc_feature: MA Experiment 108464 PARAMETER Experiment Name: At_Germinating_Seeds_cDNA_P Parameter: Tissue Value: Germinating Seeds
  misc_feature: MA Experiment ID: 108595 Result: Down-regulated in Transcription
  misc_feature: MA Experiment 108595 PARAMETER Experiment Name: At_Ler-pi_Ovule_cDNA_P Parameter: Plant Line Value: null
aatgccaccaactgttcttttcctgtaatttccagtttagagctttcttcttcctttccctatcctcaaccccaaacgaacgctcttcaagaattagggtttcgttttgaatcttctctgattcccaaatccaaagatatgaagagatcttcagggagaaaggattcaaatttcatagaacaattgatactttacgtcgctagtgctgcattgagtagcttggttctctacgttggtctccgtcaacttgacccgaaccgtgacgccgctaaaaagtctctcgagcacaaaagagaaatcgccaaacgtttgggtcgtcctcttattcaaaccaatcaatacgaggatgtgattgcgtgtgatgtaataaacccattacacatagatgttgaatttggttctattggaggattggagtcaattaagcaagctttgtatgagcttgtgattctaccattgaaaagacctgagctttttgcttatgggaagttactgggtcctcaaaagggtgttttgttgtatggtcctcctggaactgggaagactatgcttgctaaagcgattgcgagagagtctgaagctgtttttattaatgtaaaggtttctaatttgatgagcaagtggtttggtgatgcacagaagcttgtgtctgctgtgtttagcttggcgtataaactccaacctgctattatttttatcgatgaggtggatagctttcttggccagcgacggtcgactgataatgaagcaatgtcgaatatgaagaccgagtttatggctttatgggatggatttactacagaccagaatgcgagggtgatggttcttgctgcaactaacagaccatcagagctcgatgaagcgatattgaggcgttttcctcagtcatttgagatcgggatgcctgattgccaggagagagcgcaaatattgaaagttgttttgaaaggagagagtgttgaatcagatattaactatgatcgtatagctcgtttatgtgaggactataccggatcagatatttttgaactctgcaaaaaagcagcttacttcccaatccgagaaatcctagaggcagagaaagagggcaaacgagtttctgttcctagaccattgacacaactggacttggagaaggttcttgctacctcaaagaagacacaagttgctgcaagcgagtacactggtttaagctctcaatcttctgtctggggaagtccaagcaatgccgatgaggtccaagcagctataaacggcatctccaagctttttgtctcgcagcttagaaacattcagccagattctcaggattcatatcaacaacatccttcagaaggagattcggaatagaagcaaactcttcactagagcttcgtatagtccaaaaagagtacaacccaagaatatacactttttgtaaacctcatatttctctgaataagttggagcattgttgccgtaagatgtttttagaaaatttaattcatgtctcgtt

SEQ ID NO: 99287 - protein, 449 aa, Arabidopsis thaliana; identical to SEQ ID NO: 24378
  peptide (1)..(449): Ceres Seq. ID no. 13602588
  misc_feature (170)..(354): Pfam Name: ATPase family associated with various cellular Pfam Description: ATPase family associated with various cellular
  misc_feature (47)..(449): Homolog of NCBI NO: 15238774 NR Description: 26S proteasome regulatory particle chain protein [Arabidopsis thaliana] >gi|9759193|dbj|BAB09730.1| 26S
  misc_feature (52)..(448): Homolog of NCBI NO: 15234242 NR Description: expressed protein [Arabidopsis thaliana]
  misc_feature (94)..(414): Homolog of NCBI NO: 7487016 NR Description: hypothetical protein T14P8.7 - Arabidopsis >gi|3193292|gb|AAC19276.1| similar to ATPases associated with
  misc_feature (94)..(414): Homolog of NCBI NO: 20259341 NR Description: unknown protein [Arabidopsis thaliana]
  misc_feature (94)..(414): Homolog of NCBI NO: 30679158 NR Description: expressed protein [Arabidopsis thaliana]
  misc_feature (101)..(403): Homolog of NCBI NO: 25518408 NR Description: hypothetical protein F22D16.11 - Arabidopsis >gi|6056413|gb|AAF02877.1|AC009525_11 Unknown protein
  misc_feature (94)..(403): Homolog of NCBI NO: 30678418 NR Description: expressed protein [Arabidopsis thaliana]
  misc_feature (106)..(373): Homolog of NCBI NO: 15234019 NR Description: expressed protein [Arabidopsis thaliana]
  misc_feature (109)..(386): Homolog of NCBI NO: 15222886 NR Description: expressed protein [Arabidopsis thaliana]
  misc_feature (109)..(386): Homolog of NCBI NO: 25405352 NR Description: hypothetical protein F2J10.1 [imported] - thaliana >gi|8569089|gb|AAF76434.1|AC015445_1 Contains similarity p60 katanin from Chlamydomonas reinhardtii gb|AF205377 and

SEQ ID NO: 99288 - protein, 403 aa, Arabidopsis thaliana; identical to SEQ ID NO: 24379
  peptide (1)..(403): Ceres Seq. ID no. 13602589
  misc_feature (124)..(308): Pfam Name: ATPase family associated with various cellular Pfam Description: ATPase family associated with various cellular
  misc_feature (1)..(403): Homolog of NCBI NO: 15238774 NR Description: 26S proteasome regulatory particle chain protein [Arabidopsis thaliana] >gi|9759193|dbj|BAB09730.1| 26S
  misc_feature (6)..(402): Homolog of NCBI NO: 15234242 NR Description: expressed protein [Arabidopsis thaliana]
  misc_feature (48)..(368): Homolog of NCBI NO: 7487016 NR Description: hypothetical protein T14P8.7 - Arabidopsis >gi|3193292|gb|AAC19276.1| similar to ATPases associated with
  misc_feature (48)..(368): Homolog of NCBI NO: 20259341 NR Description: unknown protein [Arabidopsis thaliana]
  misc_feature (48)..(368): Homolog of NCBI NO: 30679158 NR Description: expressed protein [Arabidopsis thaliana]
  misc_feature (55)..(357): Homolog of NCBI NO: 25518408 NR Description: hypothetical protein F22D16.11 - Arabidopsis >gi|6056413|gb|AAF02877.1|AC009525_11 Unknown protein
  misc_feature (48)..(357): Homolog of NCBI NO: 30678418 NR Description: expressed protein [Arabidopsis thaliana]
  misc_feature (60)..(327): Homolog of NCBI NO: 15234019 NR Description: expressed protein [Arabidopsis thaliana]
  misc_feature (63)..(340): Homolog of NCBI NO: 15222886 NR Description: expressed protein [Arabidopsis thaliana]
  misc_feature (63)..(340): Homolog of NCBI NO: 25405352 NR Description: hypothetical protein F2J10.1 [imported] - thaliana >gi|8569089|gb|AAF76434.1|AC015445_1 Contains similarity p60 katanin from Chlamydomonas reinhardtii gb|AF205377 and

SEQ ID NO: 99289 - protein, 267 aa, Arabidopsis thaliana; identical to SEQ ID NO: 24380
  peptide (1)..(267): Ceres Seq. ID no. 13602590
  misc_feature (1)..(172): Pfam Name: ATPase family associated with various cellular Pfam Description: ATPase family associated with various cellular
  misc_feature (1)..(267): Homolog of NCBI NO: 15238774 NR Description: 26S proteasome regulatory particle chain protein [Arabidopsis thaliana] >gi|9759193|dbj|BAB09730.1| 26S
  misc_feature (1)..(266): Homolog of NCBI NO: 15234242 NR Description: expressed protein [Arabidopsis thaliana]
  misc_feature (1)..(232): Homolog of NCBI NO: 7487016 NR Description: hypothetical protein T14P8.7 - Arabidopsis >gi|3193292|gb|AAC19276.1| similar to ATPases associated with
  misc_feature (1)..(232): Homolog of NCBI NO: 20259341 NR Description: unknown protein [Arabidopsis thaliana]
  misc_feature (1)..(232): Homolog of NCBI NO: 30679158 NR Description: expressed protein [Arabidopsis thaliana]
  misc_feature (1)..(221): Homolog of NCBI NO: 25518408 NR Description: hypothetical protein F22D16.11 - Arabidopsis >gi|6056413|gb|AAF02877.1|AC009525_11 Unknown protein
  misc_feature (1)..(221): Homolog of NCBI NO: 30678418 NR Description: expressed protein [Arabidopsis thaliana]
  misc_feature (1)..(191): Homolog of NCBI NO: 15234019 NR Description: expressed protein [Arabidopsis thaliana]
  misc_feature (1)..(204): Homolog of NCBI NO: 15222886 NR Description: expressed protein [Arabidopsis thaliana]
  misc_feature (1)..(204): Homolog of NCBI NO: 25405352 NR Description: hypothetical protein F2J10.1 [imported] - thaliana >gi|8569089|gb|AAF76434.1|AC015445_1 Contains similarity p60 katanin from Chlamydomonas reinhardtii gb|AF205377 and

SEQ ID NO: 99290 - DNA, 1371 bp, Arabidopsis thaliana
  misc_feature (1)..(1371): Ceres Seq. ID no. 13602599
  misc_feature: MA Experiment ID: 20000264 Result: Up-regulated in Transcription
  misc_feature: MA Experiment 20000264 PARAMETER Experiment Name: At_Open_Flower_P Parameter: Age (day) Value: 21
  misc_feature: MA Experiment 20000264 PARAMETER Experiment Name: At_Open_Flower_P Parameter: Plant Line Value: WS
  misc_feature: MA Experiment 20000264 PARAMETER Experiment Name: At_Open_Flower_P Parameter: Tissue Value: Open Flower vs. Whole Plant
  misc_feature: MA Experiment ID: 20000286 Result: Up-regulated in Transcription
  misc_feature: MA Experiment 20000286 PARAMETER Experiment Name: At_Open_Flower_P Parameter: Age (day) Value: 21
  misc_feature: MA Experiment 20000286 PARAMETER Experiment Name: At_Open_Flower_P Parameter: Plant Line Value: WS
  misc_feature: MA Experiment 20000286 PARAMETER Experiment Name: At_Open_Flower_P Parameter: Tissue Value: Half Open vs. Whole Plant
  misc_feature: MA Experiment ID: 20000441 Result: Down-regulated in Transcription
  misc_feature: MA Experiment 20000441 PARAMETER Experiment Name: At_1uM_BR-BRZ__P Parameter: Tissue Value: Shoot Apices
  misc_feature: MA Experiment 20000441 PARAMETER Experiment Name: At_1uM_BR-BRZ__P Parameter: Treatment Value: 1uM BR vs. No Treatment
  misc_feature: MA Experiment ID: 20000443 Result: Down-regulated in Transcription
  misc_feature: MA Experiment 20000443 PARAMETER Experiment Name: At_1uM_BR-BRZ__P Parameter: Tissue Value: Shoot Apices
  misc_feature: MA Experiment 20000443 PARAMETER Experiment Name: At_1uM_BR-BRZ__P Parameter: Treatment Value: 1uM BRZ vs. No Treatment
  misc_feature: MA Experiment ID: 20000794 Result: Up-regulated in Transcription
  misc_feature: MA Experiment 20000794 PARAMETER Experiment Name: At_Petals_P Parameter: Age (day) Value: 23-25 days
  misc_feature: MA Experiment 20000794 PARAMETER Experiment Name: At_Petals_P Parameter: Plant Line Value: WS
  misc_feature: MA Experiment 20000794 PARAMETER Experiment Name: At_Petals_P Parameter: Tissue Value: Petals vs. Whole plant
  misc_feature: MA Experiment ID: 20001911 Result: Down-regulated in Transcription
  misc_feature: MA Experiment 20001911 PARAMETER Experiment Name: At_Drought_Reproduction_P Parameter: Age (day) Value: 40
  misc_feature: MA Experiment 20001911 PARAMETER Experiment Name: At_Drought_Reproduction_P Parameter: Organism Value: A. thaliana
  misc_feature: MA Experiment 20001911 PARAMETER Experiment Name: At_Drought_Reproduction_P Parameter: Plant Line Value: WS
  misc_feature: MA Experiment 20001911 PARAMETER Experiment Name: At_Drought_Reproduction_P Parameter: Timepoint (day) Value: 10
  misc_feature: MA Experiment 20001911 PARAMETER Experiment Name: At_Drought_Reproduction_P Parameter: Tissue Value: Flowers
  misc_feature: MA Experiment 20001911 PARAMETER Experiment Name: At_Drought_Reproduction_P Parameter: Treatment Value: Drought vs. No Drought
ataaaatggcacaaagtatgaaagttgaaacctatcctcatatttagcatcactcctctaatattattttttcaaacaagaacaatggcaaaccatctccaagtccccttaaccaaaccggatcgagttaaagaagaacaagaggttgaagaagaggcaagattgctagcgagaaggctcgcgaatgcagccgcatcacctatggttctcaaagccgccttggagctcggcgtgatcgacaccatcaccacagtaggaggtggcgatttgtggctctcaccttctgaaatagcactaagactcccaaccaaaccatgcaacctggaagctccggctttgctagaccgtatgcttcgatttctcgtcagccattcggtcttaaaatgccgtactgtaatagaagagaacggtcaaaccggaaaagttgagagggtatatgcagctgaaccggtctgcaaatatctcttgaacaaaagtgacgacgtctcgggttcttttgcatcgctctttatgcttgacctcagcgacgtatttatcaagacatggacacatctcgaagatgtgatattagaaggaagagatgcatttagttctgcccatgggatgaaactattcgaatacatccaagccgatgagcgatttggtaaagtgtttaaccgggctatgttggaatcttccaccatggttacggagaaggttcttaaattttatgaaggattcaaagatgtgaagactttggtggatgtagggggaggacttggcaacacactaggtctcatcacttccaagtatcctcatcttattggtatcaatttcgatttagctccggtgttagccaatgctcattcttatcccggtgtgaaccatgtggctggtgatatgttcatcaagattccaaagggggatgccattttcatgaagtggatactacatgattggacggacgaacaatgcgtagcaattcttaaaaactgttggaaaagtctcgaagaaaatggaaaactgataatagtggaaatggttacaccggtggaagcaaagagcggagatatatgttctaacattgtgtttggtatggacatgacaatgttaacacaatgttcaggtggtaaagagagagatctctatgagtttgaaaatttagcatatgcatcgggtttttctcgttgtgcaatcgtatgcgctgtttatccattttccgtcatcgaaatctacaaatagattcattcaacatatgccattttacgatatttacacaacccgtttcttcttctatttgggatgtaatgtttgtgattatcatttgtgtgtggtcgatcttttgtaatattttcgtgtgatgttcttaccgttgtaatgatatatgtgtct

SEQ ID NO: 99291 - protein, 378 aa, Arabidopsis thaliana
  peptide (1)..(378): Ceres Seq. ID no. 13602600
  misc_feature (111)..(355): Pfam Name: O-methyltransferase Pfam Description: O-methyltransferase
  misc_feature (1)..(378): Homolog of NCBI NO: 15238847 NR Description: O-methyltransferase 1, putative [Arabidopsis
  misc_feature (1)..(378): Homolog of NCBI NO: 21618183 NR Description: caffeic acid 3-O-methyltransferase-like protein
  misc_feature (1)..(378): Homolog of NCBI NO: 15223977 NR Description: O-methyltransferase family 2 [Arabidopsis
  misc_feature (1)..(378): Homolog of NCBI NO: 27808586 NR Description: At1g77520 [Arabidopsis thaliana]
  misc_feature (1)..(378): Homolog of NCBI NO: 15223976 NR Description: O-methyltransferase family 2 [Arabidopsis
  misc_feature (40)..(378): Homolog of NCBI NO: 21593350 NR Description: putative caffeic acid 3-O-methyltransferase
  misc_feature (1)..(378): Homolog of NCBI NO: 25315953 NR Description: hypothetical protein F16M19.12 [imported] -
  misc_feature (22)..(378): Homolog of NCBI NO: 21618219 NR Description: O-methyltransferase, putative [Arabidopsis
  misc_feature (22)..(378): Homolog of NCBI NO: 15218133 NR Description: O-methyltransferase 1, putative [Arabidopsis
  misc_feature (22)..(378): Homolog of NCBI NO: 15218138 NR Description: O-methyltransferase 1, putative [Arabidopsis
MANHLQVPLTKPDRVKEEQEVEEEARLLARRLANAAASPMVLKAALELGVIDTITTVGGGDLWLSPSEIALRLPTKPCNLEAPALLDRMLRFLVSHSVLKCRTVIEENGQTGKVERVYAAEPVCKYLLNKSDDVSGSFASLFMLDLSDVFIKTWTHLEDVILEGRDAFSSAHGMKLFEYIQADERFGKVFNRAMLESSTMVTEKVLKFYEGFKDVKTLVDVGGGLGNTLGLITSKYPHLIGINFDLAPVLANAHSYPGVNHVAGDMFIKIPKGDAIFMKWILHDWTDEQCVAILKNCWKSLEENGKLIIVEMVTPVEAKSGDICSNIVFGMDMTMLTQCSGGKERDLYEFENLAYASGFSRCAIVCAVYPFSVIEIYK

SEQ ID NO: 99292 - protein, 339 aa, Arabidopsis thaliana
  peptide (1)..(339): Ceres Seq. ID no. 13602601
  misc_feature (72)..(316): Pfam Name: O-methyltransferase Pfam Description: O-methyltransferase
  misc_feature (1)..(339): Homolog of NCBI NO: 15238847 NR Description: O-methyltransferase 1, putative [Arabidopsis
  misc_feature (1)..(339): Homolog of NCBI NO: 21618183 NR Description: caffeic acid 3-O-methyltransferase-like protein
  misc_feature (1)..(339): Homolog of NCBI NO: 15223977 NR Description: O-methyltransferase family 2 [Arabidopsis
  misc_feature (1)..(339): Homolog of NCBI NO: 27808586 NR Description: At1g77520 [Arabidopsis thaliana]
  misc_feature (1)..(339): Homolog of NCBI NO: 15223976 NR Description: O-methyltransferase family 2 [Arabidopsis
  misc_feature (1)..(339): Homolog of NCBI NO: 21593350 NR Description: putative caffeic acid 3-O-methyltransferase
  misc_feature (1)..(339): Homolog of NCBI NO: 25315953 NR Description: hypothetical protein F16M19.12 [imported] -
  misc_feature (1)..(339): Homolog of NCBI NO: 21618219 NR Description: O-methyltransferase, putative [Arabidopsis
  misc_feature (1)..(339): Homolog of NCBI NO: 15218133 NR Description: O-methyltransferase 1, putative [Arabidopsis
  misc_feature (1)..(339): Homolog of NCBI NO: 15218138 NR Description: O-methyltransferase 1, putative [Arabidopsis
MVLKAALELGVIDTITTVGGGDLWLSPSEIALRLPTKPCNLEAPALLDRMLRFLVSHSVLKCRTVIEENGQTGKVERVYAAEPVCKYLLNKSDDVSGSFASLFMLDLSDVFIKTWTHLEDVILEGRDAFSSAHGMKLFEYIQADERFGKVFNRAMLESSTMVTEKVLKFYEGFKDVKTLVDVGGGLGNTLGLITSKYPHLIGINFDLAPVLANAHSYPGVNHVAGDMFIKIPKGDAIFMKWILHDWTDEQCVAILKNCWKSLEENGKLIIVEMVTPVEAKSGDICSNIVFGMDMTMLTQCSGGKERDLYEFENLAYASGFSRCAIVCAVYPFSVIEIYK

SEQ ID NO: 99293 - protein, 290 aa, Arabidopsis thaliana
  peptide (1)..(290): Ceres Seq. ID no. 13602602
  misc_feature (23)..(267): Pfam Name: O-methyltransferase Pfam Description: O-methyltransferase
  misc_feature (1)..(290): Homolog of NCBI NO: 15238847 NR Description: O-methyltransferase 1, putative [Arabidopsis
  misc_feature (1)..(290): Homolog of NCBI NO: 21618183 NR Description: caffeic acid 3-O-methyltransferase-like protein
  misc_feature (1)..(290): Homolog of NCBI NO: 15223977 NR Description: O-methyltransferase family 2 [Arabidopsis
  misc_feature (1)..(290): Homolog of NCBI NO: 27808586 NR Description: At1g77520 [Arabidopsis thaliana]
  misc_feature (1)..(290): Homolog of NCBI NO: 15223976 NR Description: O-methyltransferase family 2 [Arabidopsis
  misc_feature (1)..(290): Homolog of NCBI NO: 21593350 NR Description: putative caffeic acid 3-O-methyltransferase
  misc_feature (1)..(290): Homolog of NCBI NO: 25315953 NR Description: hypothetical protein F16M19.12 [imported] -
  misc_feature (1)..(290): Homolog of NCBI NO: 21618219 NR Description: O-methyltransferase, putative [Arabidopsis
  misc_feature (1)..(290): Homolog of NCBI NO: 15218133 NR Description: O-methyltransferase 1, putative [Arabidopsis
  misc_feature (1)..(290): Homolog of NCBI NO: 15218138 NR Description: O-methyltransferase 1, putative [Arabidopsis
MLRFLVSHSVLKCRTVIEENGQTGKVERVYAAEPVCKYLLNKSDDVSGSFASLFMLDLSDVFIKTWTHLEDVILEGRDAFSSAHGMKLFEYIQADERFGKVFNRAMLESSTMVTEKVLKFYEGFKDVKTLVDVGGGLGNTLGLITSKYPHLIGINFDLAPVLANAHSYPGVNHVAGDMFIKIPKGDAIFMKWILHDWTDEQCVAILKNCWKSLEENGKLIIVEMVTPVEAKSGDICSNIVFGMDMTMLTQCSGGKERDLYEFENLAYASGFSRCAIVCAVYPFSVIEIYK

SEQ ID NO: 99294 - DNA, 1540 bp, Arabidopsis thaliana
  misc_feature (1)..(1540): Ceres Seq. ID no. 13602619
  misc_feature: MA Experiment ID: 108434 Result: Down-regulated in Transcription
  misc_feature: MA Experiment 108434 PARAMETER Experiment Name: At_Root_Tips_cDNA_P Parameter: Tissue Value: Root Tips
  misc_feature: MA Experiment ID: 108435 Result: Down-regulated in Transcription
  misc_feature: MA Experiment 108435 PARAMETER Experiment Name: At_stm_Mutants_cDNA_P Parameter: Plant Line Value: wt Landsburg vs stm
  misc_feature: MA Experiment 108435 PARAMETER Experiment Name: At_stm_Mutants_cDNA_P Parameter: Tissue Value: Shoot Apical Meristem Region
  misc_feature: MA Experiment ID: 108489 Result: Up-regulated in Transcription
  misc_feature: MA Experiment ID: 108572 Result: Up-regulated in Transcription
  misc_feature: MA Experiment 108572 PARAMETER Experiment Name: At_Drought_cDNA_P Parameter: Timepoint (hr) Value: 1
  misc_feature: MA Experiment 108572 PARAMETER Experiment Name: At_Drought_cDNA_P Parameter: Tissue Value: Aerial
  misc_feature: MA Experiment 108572 PARAMETER Experiment Name: At_Drought_cDNA_P Parameter: Treatment Value: Drought vs. No Drought
  misc_feature: MA Experiment ID: 108573 Result: Up-regulated in Transcription
  misc_feature: MA Experiment 108573 PARAMETER Experiment Name: At_Drought_cDNA_P Parameter: Timepoint (hr) Value: 6
  misc_feature: MA Experiment 108573 PARAMETER Experiment Name: At_Drought_cDNA_P Parameter: Tissue Value: Aerial
  misc_feature: MA Experiment 108573 PARAMETER Experiment Name: At_Drought_cDNA_P Parameter: Treatment Value: Drought vs. No Drought
  misc_feature: MA Experiment ID: 108574 Result: Up-regulated in Transcription
  misc_feature: MA Experiment 108574 PARAMETER Experiment Name: At_Wounding__cDNA_P Parameter: Timepoint (hr) Value: 1
  misc_feature: MA Experiment 108574 PARAMETER Experiment Name: At_Wounding__cDNA_P Parameter: Tissue Value: Aerial
  misc_feature: MA Experiment 108574 PARAMETER Experiment Name: At_Wounding__cDNA_P Parameter: Treatment Value: Wounding vs. No Wounding
  misc_feature: MA Experiment ID: 108577 Result: Up-regulated in Transcription
  misc_feature: MA Experiment 108577 PARAMETER Experiment Name: At_42deg_Heat_cDNA_P Parameter: Temperature (deg C) Value: 42 vs. 22
  misc_feature: MA Experiment 108577 PARAMETER Experiment Name: At_42deg_Heat_cDNA_P Parameter: Timepoint (hr) Value: 6
  misc_feature: MA Experiment 108577 PARAMETER Experiment Name: At_42deg_Heat_cDNA_P Parameter: Tissue Value: Aerial
  misc_feature: MA Experiment ID: 108585 Result: Up-regulated in Transcription
  misc_feature: MA Experiment 108585 PARAMETER Experiment Name: At_5mM_NaNP_cDNA_P Parameter: Timepoint (hr) Value: 6
  misc_feature: MA Experiment 108585 PARAMETER Experiment Name: At_5mM_NaNP_cDNA_P Parameter: Tissue Value: Aerial
  misc_feature: MA Experiment 108585 PARAMETER Experiment Name: At_5mM_NaNP_cDNA_P Parameter: Treatment Value: null
  misc_feature: MA Experiment ID: 20000093 Result: Up-regulated in Transcription
  misc_feature: MA Experiment 20000093 PARAMETER Experiment Name: At_42deg_Heat_cDNA_P Parameter: Temperature (deg C) Value: 42 vs. 22
  misc_feature: MA Experiment 20000093 PARAMETER Experiment Name: At_42deg_Heat_cDNA_P Parameter: Timepoint (hr) Value: 0.5
  misc_feature: MA Experiment 20000093 PARAMETER Experiment Name: At_42deg_Heat_cDNA_P Parameter: Tissue Value: Aerial
  misc_feature: MA Experiment ID: 20000111 Result: Up-regulated in Transcription
  misc_feature: MA Experiment 20000111 PARAMETER Experiment Name: At_42deg_Heat_cDNA_P Parameter: Temperature (deg C) Value: 42 vs. 22
  misc_feature: MA Experiment 20000111 PARAMETER Experiment Name: At_42deg_Heat_cDNA_P Parameter: Timepoint (hr) Value: 6
  misc_feature: MA Experiment 20000111 PARAMETER Experiment Name: At_42deg_Heat_cDNA_P Parameter: Tissue Value: Aerial
  misc_feature: MA Experiment ID: 20000112 Result: Up-regulated in Transcription
  misc_feature: MA Experiment 20000112 PARAMETER Experiment Name: At_42deg_Heat_cDNA_P Parameter: Temperature (deg C) Value: 42 vs. 22
  misc_feature: MA Experiment 20000112 PARAMETER Experiment Name: At_42deg_Heat_cDNA_P Parameter: Timepoint (hr) Value: 2
  misc_feature: MA Experiment 20000112 PARAMETER Experiment Name: At_42deg_Heat_cDNA_P Parameter: Tissue Value: Aerial
  misc_feature: MA Experiment ID: 20000144 Result: Up-regulated in Transcription
  misc_feature: MA Experiment 20000144 PARAMETER Experiment Name: At_42deg_Heat_cDNA_P Parameter: Temperature (deg C) Value: 42 vs. 22
  misc_feature: MA Experiment 20000144 PARAMETER Experiment Name: At_42deg_Heat_cDNA_P Parameter: Timepoint (hr) Value: 1
  misc_feature: MA Experiment 20000144 PARAMETER Experiment Name: At_42deg_Heat_cDNA_P Parameter: Tissue Value: Aerial
  misc_feature: MA Experiment ID: 20000171 Result: Up-regulated in Transcription
  misc_feature: MA Experiment 20000171 PARAMETER Experiment Name: At_42deg_Heat_P Parameter: Age (day) Value: 14
  misc_feature: MA Experiment 20000171 PARAMETER Experiment Name: At_42deg_Heat_P Parameter: Organism Value: A. thaliana
  misc_feature: MA Experiment 20000171 PARAMETER Experiment Name: At_42deg_Heat_P Parameter: Plant Line Value: WS
  misc_feature: MA Experiment 20000171 PARAMETER Experiment Name: At_42deg_Heat_P Parameter: Temperature (deg C) Value: 42 vs. 22
  misc_feature: MA Experiment 20000171 PARAMETER Experiment Name: At_42deg_Heat_P Parameter: Timepoint (hr) Value: 1
  misc_feature: MA Experiment 20000171 PARAMETER Experiment Name: At_42deg_Heat_P Parameter: Tissue Value: Aerial
  misc_feature: MA Experiment ID: 20000173 Result: Up-regulated in Transcription
  misc_feature: MA Experiment 20000173 PARAMETER Experiment Name: At_42deg_Heat_P Parameter: Age (day) Value: 14
  misc_feature: MA Experiment 20000173 PARAMETER Experiment Name: At_42deg_Heat_P Parameter: Organism Value: A. thaliana
  misc_feature: MA Experiment 20000173 PARAMETER Experiment Name: At_42deg_Heat_P Parameter: Plant Line Value: WS
  misc_feature: MA Experiment 20000173 PARAMETER Experiment Name: At_42deg_Heat_P Parameter: Temperature (deg C) Value: 42 vs. 22
  misc_feature: MA Experiment 20000173 PARAMETER Experiment Name: At_42deg_Heat_P Parameter: Timepoint (hr) Value: 6
  misc_feature: MA Experiment 20000173 PARAMETER Experiment Name: At_42deg_Heat_P Parameter: Tissue Value: Aerial
  misc_feature: MA Experiment ID: 20000184 Result: Down-regulated in Transcription
  misc_feature: MA Experiment 20000184 PARAMETER Experiment Name: At_Shoots__P Parameter: Age (day) Value: 7
  misc_feature: MA Experiment 20000184 PARAMETER Experiment Name: At_Shoots__P Parameter: Tissue Value: Shoots vs. Whole Plant
  misc_feature: MA Experiment ID: 20000185 Result: Down-regulated in Transcription
  misc_feature: MA Experiment 20000185 PARAMETER Experiment Name: At_Roots__P Parameter: Age (day) Value: 7 vs. 21
  misc_feature: MA Experiment 20000185 PARAMETER Experiment Name: At_Roots__P Parameter: Organism Value: A. thaliana
  misc_feature: MA Experiment 20000185 PARAMETER Experiment Name: At_Roots__P Parameter: Tissue Value: Roots vs. Whole Plant
  misc_feature: MA Experiment ID: 20000224 Result: Up-regulated in Transcription
  misc_feature: MA Experiment ID: 20000227 Result: Down-regulated in Transcription
  misc_feature: MA Experiment 20000227 PARAMETER Experiment Name: At_Root-Tips-vs-Tops_P Parameter: Tissue Value: Root Tips vs. Root Tops
  misc_feature: MA Experiment ID: 20000234 Result: Down-regulated in Transcription
  misc_feature: MA Experiment 20000234 PARAMETER Experiment Name: At_Siliques_P Parameter: Age (day) Value: 21
  misc_feature: MA Experiment 20000234 PARAMETER Experiment Name: At_Siliques_P Parameter: Organism Value: A. thaliana
  misc_feature: MA Experiment 20000234 PARAMETER Experiment Name: At_Siliques_P Parameter: Plant Line Value: WS
  misc_feature: MA Experiment 20000234 PARAMETER Experiment Name: At_Siliques_P Parameter: Tissue Value: Less Than 5mm Siliques vs. Whole Plant
  misc_feature: MA Experiment ID: 20000264 Result: Down-regulated in Transcription
  misc_feature: MA Experiment 20000264 PARAMETER Experiment Name: At_Open_Flower_P Parameter: Age (day) Value: 21
  misc_feature: MA Experiment 20000264 PARAMETER Experiment Name: At_Open_Flower_P Parameter: Plant Line Value: WS
  misc_feature: MA Experiment 20000264 PARAMETER Experiment Name: At_Open_Flower_P Parameter: Tissue Value: Open Flower vs. Whole Plant
  misc_feature: MA Experiment ID: 20000286 Result: Down-regulated in Transcription
  misc_feature: MA Experiment 20000286 PARAMETER Experiment Name: At_Open_Flower_P Parameter: Age (day) Value: 21
  misc_feature: MA Experiment 20000286 PARAMETER Experiment Name: At_Open_Flower_P Parameter: Plant Line Value: WS
  misc_feature: MA Experiment 20000286 PARAMETER Experiment Name: At_Open_Flower_P Parameter: Tissue Value: Half Open vs. Whole Plant
  misc_feature: MA Experiment ID: 20000439 Result: Down-regulated in Transcription
  misc_feature: MA Experiment 20000439 PARAMETER Experiment Name: At_Roots__P Parameter: Age (day) Value: 14 vs. 21
  misc_feature: MA Experiment 20000439 PARAMETER Experiment Name: At_Roots__P Parameter: Organism Value: A. thaliana
  misc_feature: MA Experiment 20000439 PARAMETER Experiment Name: At_Roots__P Parameter: Tissue Value: Roots vs. Whole Plant
  misc_feature: MA Experiment ID: 20000527 Result: Up-regulated in Transcription
  misc_feature: MA Experiment 20000527 PARAMETER Experiment Name: At_10percent_PEG_P Parameter: Age (day) Value: 20
  misc_feature: MA Experiment 20000527 PARAMETER Experiment Name: At_10percent_PEG_P Parameter: Organism Value: A. thaliana
  misc_feature: MA Experiment 20000527 PARAMETER Experiment Name: At_10percent_PEG_P Parameter: Plant Line Value: WS
  misc_feature: MA Experiment 20000527 PARAMETER Experiment Name: At_10percent_PEG_P Parameter: Timepoint (day) Value: 20
  misc_feature: MA Experiment 20000527 PARAMETER Experiment Name: At_10percent_PEG_P Parameter: Tissue Value: Whole Plant
  misc_feature: MA Experiment 20000527 PARAMETER Experiment Name: At_10percent_PEG_P Parameter: Treatment Value: 10percent PEG vs. No Treatment
  misc_feature: MA Experiment ID: 20000709 Result: Up-regulated in Transcription
  misc_feature: MA Experiment 20000709 PARAMETER Experiment Name: At_15mM_NH4NO3_L-to-H_P Parameter: Age (hr) Value: 14
  misc_feature: MA Experiment 20000709 PARAMETER Experiment Name: At_15mM_NH4NO3_L-to-H_P Parameter: Organism Value: A. thaliana
  misc_feature: MA Experiment 20000709 PARAMETER Experiment Name: At_15mM_NH4NO3_L-to-H_P Parameter: Plant Line Value: WS
  misc_feature: MA Experiment 20000709 PARAMETER Experiment Name: At_15mM_NH4NO3_L-to-H_P Parameter: Timepoint (hr) Value: 4
  misc_feature: MA Experiment 20000709 PARAMETER Experiment Name: At_15mM_NH4NO3_L-to-H_P Parameter: Tissue Value: Aerial
  misc_feature: MA Experiment 20000709 PARAMETER Experiment Name: At_15mM_NH4NO3_L-to-H_P Parameter: Treatment Value: 15mM NH4NO3 vs. 30mM Mannitol
  misc_feature: MA Experiment ID: 20001458 Result: Up-regulated in Transcription
  misc_feature: MA Experiment 20001458 PARAMETER Experiment Name: At_50mM_NH4NO3_L-to-H_P Parameter: Age (day) Value: Undefined
  misc_feature: MA Experiment 20001458 PARAMETER Experiment Name: At_50mM_NH4NO3_L-to-H_P Parameter: Organism Value: Undefined
  misc_feature: MA Experiment 20001458 PARAMETER Experiment Name: At_50mM_NH4NO3_L-to-H_P Parameter: Plant Line Value: Undefined
  misc_feature: MA Experiment 20001458 PARAMETER Experiment Name: At_50mM_NH4NO3_L-to-H_P Parameter: Timepoint (hr) Value: 2
  misc_feature: MA Experiment 20001458 PARAMETER Experiment Name: At_50mM_NH4NO3_L-to-H_P Parameter: Tissue Value: Siliques
  misc_feature: MA Experiment 20001458 PARAMETER Experiment Name: At_50mM_NH4NO3_L-to-H_P Parameter: Treatment Value: 50mM NH4NO3 vs. 100mM Manitol
  misc_feature: MA Experiment ID: 20001459 Result: Up-regulated in Transcription
  misc_feature: MA Experiment 20001459 PARAMETER Experiment Name: At_50mM_NH4NO3_L-to-H_P Parameter: Age (day) Value: Undefined
  misc_feature: MA Experiment 20001459 PARAMETER Experiment Name: At_50mM_NH4NO3_L-to-H_P Parameter: Organism Value: Undefined
  misc_feature: MA Experiment 20001459 PARAMETER Experiment Name: At_50mM_NH4NO3_L-to-H_P Parameter: Plant Line Value: Undefined
  misc_feature: MA Experiment 20001459 PARAMETER Experiment Name: At_50mM_NH4NO3_L-to-H_P Parameter: Timepoint (hr) Value: 4
  misc_feature: MA Experiment 20001459 PARAMETER Experiment Name: At_50mM_NH4NO3_L-to-H_P Parameter: Tissue Value: Siliques
  misc_feature: MA Experiment 20001459 PARAMETER Experiment Name: At_50mM_NH4NO3_L-to-H_P Parameter: Treatment Value: 50mM NH4NO3 vs. 100mM Manitol
atcctctgcaaagttatggctttgcttgagagtataatattagggctaatcacaggatggttagcttttgttattgggttggttattggatgggcatggaaaccaagatgggtttcttcttctaataatcgacaagtcaaattacaatgttctgctccaagatcttttgatttgtctttaccatcttcttctcctagttctgttgttacttctcctttgaagggttttggatcagctccttgcttaaaggctcttgtttgtgatacatggactatggctttaagacaacagagacaaacagtttctcctgattcttcttcttcttcatatgattcttctgaacaacatttggatttggtttcaagagtgaagaaaacaaaggagagattgcctaatactgtaacagagttagatttgagacatcttgtgcaattggttgagaggaaagatggtggtcaagcttggattcagatgatggatcgttttactcctggtatgagataccaagcttggttgagagaacctaagaatggtcctactgagtatagaagtagaactgtgtttgaagatgcaactcctgtgatgttaagagactttttctgggatgatgagtttagaccaacttgggatacaatgctttctaattccactactgttgaagagtgtcccagtactggaaccatgattgttagatggatacgcaagttcccgttcttctgcagtgatagagagtatgtaatcggtcgcaggatatggaattgtggaaactcttattactgtgttacaaagggagtatcggttccttctataccgcctaacaacaaacaaaaacgcgtggatttgttctactcaagctggtgcattcgaccagtggaatcaagaagagacgatggggtaacaagtgcctgcgaagtacttctattccaccacgaagacatgggaatacctagagaaatcgcaaagcttggagtgaaacgaggaatgtggggagcagtgaagaagatggaacccggtttacgtgcttaccaaacgcatagactctcagatggaggaaccaagctttctcggtctgctttcatggctcaaatcaacaccaagatcacacaagaccatctcatctccctcagcaacggtgcatcgcctgtcactgaaactcccgttacattaaaccaaggaaaccgagctgcgaatctgaagaaactgttgattatcggtggagctgttgcggttgtctgcagtttaagcggaggtgcttttgttcctcctgcgtttcttttaggttttgggaaaaggtttgttaatggtggaagaaaacgtcagctcgaaggaacaacaagaagtgagagtcagactacttcttcatagaatcttgagaccaagaatatagatcaacatataaatttagattcgttttaagtagattaagaataatccattccaaaattagtttatagaattggaataagctgtatgattattaatctttatacaaaggaaggaacattttttttacaagtaatgaataaaatctctttatcat

SEQ ID NO: 99295 - protein, 454 aa, Arabidopsis thaliana
  peptide (1)..(454): Ceres Seq. ID no. 13602620
  misc_feature (182)..(261): Pfam Name: START domain Pfam Description: START domain
  misc_feature (6)..(454): Homolog of NCBI NO: 18423599 NR Description: membrane related protein-like [Arabidopsis
  misc_feature (6)..(454): Homolog of NCBI NO: 21593272 NR Description: membrane related protein-like [Arabidopsis
  misc_feature (95)..(454): Homolog of NCBI NO: 10178166 NR Description: membrane related protein-like [Arabidopsis
  misc_feature (6)..(78): Homolog of NCBI NO: 10178166 NR Description: membrane related protein-like [Arabidopsis
  misc_feature (21)..(438): Homolog of NCBI NO: 18033654 NR Description: putative nodule membrane protein [Medicago sativa]
  misc_feature (126)..(438): Homolog of NCBI NO: 22135902 NR Description: membrane related protein CP5, putative thaliana] >gi|23197608|gb|AAN15331.1| membrane related protein
  misc_feature (20)..(63): Homolog of NCBI NO: 22135902 NR Description: membrane related protein CP5, putative thaliana] >gi|23197608|gb|AAN15331.1| membrane related protein
  misc_feature (126)..(438): Homolog of NCBI NO: 15217736 NR Description: membrane related protein CP5 -related
  misc_feature (20)..(63): Homolog of NCBI NO: 15217736 NR Description: membrane related protein CP5 -related
  misc_feature (138)..(438): Homolog of NCBI NO: 38344869 NR Description: OSJNBa0020P07.12 [Oryza sativa (japonica
ILCKVMALLESIILGLITGWLAFVIGLVIGWAWKPRWVSSSNNRQVKLQCSAPRSFDLSLPSSSPSSVVTSPLKGFGSAPCLKALVCDTWTMALRQQRQTVSPDSSSSSYDSSEQHLDLVSRVKKTKERLPNTVTELDLRHLVQLVERKDGGQAWIQMMDRFTPGMRYQAWLREPKNGPTEYRSRTVFEDATPVMLRDFFWDDEFRPTWDTMLSNSTTVEECPSTGTMIVRWIRKFPFFCSDREYVIGRRIWNCGNSYYCVTKGVSVPSIPPNNKQKRVDLFYSSWCIRPVESRRDDGVTSACEVLLFHHEDMGIPREIAKLGVKRGMWGAVKKMEPGLRAYQTHRLSDGGTKLSRSAFMAQINTKITQDHLISLSNGASPVTETPVTLNQGNRAANLKKLLIIGGAVAVVCSLSGGAFVPPAFLLGFGKRFVNGGRKRQLEGTTRSESQTTSS

SEQ ID NO: 99296 - protein, 449 aa, Arabidopsis thaliana
  peptide (1)..(449): Ceres Seq. ID no. 13602621
  misc_feature (177)..(256): Pfam Name: START domain Pfam Description: START domain
  misc_feature (1)..(449): Homolog of NCBI NO: 18423599 NR Description: membrane related protein-like [Arabidopsis
  misc_feature (1)..(449): Homolog of NCBI NO: 21593272 NR Description: membrane related protein-like [Arabidopsis
  misc_feature (90)..(449): Homolog of NCBI NO: 10178166 NR Description: membrane related protein-like [Arabidopsis
  misc_feature (1)..(73): Homolog of NCBI NO: 10178166 NR Description: membrane related protein-like [Arabidopsis
  misc_feature (16)..(433): Homolog of NCBI NO: 18033654 NR Description: putative nodule membrane protein [Medicago sativa]
  misc_feature (121)..(433): Homolog of NCBI NO: 22135902 NR Description: membrane related protein CP5, putative thaliana] >gi|23197608|gb|AAN15331.1| membrane related protein
  misc_feature (15)..(58): Homolog of NCBI NO: 22135902 NR Description: membrane related protein CP5, putative thaliana] >gi|23197608|gb|AAN15331.1| membrane related protein
  misc_feature (121)..(433): Homolog of NCBI NO: 15217736 NR Description: membrane related protein CP5 -related
  misc_feature (15)..(58): Homolog of NCBI NO: 15217736 NR Description: membrane related protein CP5 -related
  misc_feature (133)..(433): Homolog of NCBI NO: 38344869 NR Description: OSJNBa0020P07.12 [Oryza sativa (japonica
MALLESIILGLITGWLAFVIGLVIGWAWKPRWVSSSNNRQVKLQCSAPRSFDLSLPSSSPSSVVTSPLKGFGSAPCLKALVCDTWTMALRQQRQTVSPDSSSSSYDSSEQHLDLVSRVKKTKERLPNTVTELDLRHLVQLVERKDGGQAWIQMMDRFTPGMRYQAWLREPKNGPTEYRSRTVFEDATPVMLRDFFWDDEFRPTWDTMLSNSTTVEECPSTGTMIVRWIRKFPFFCSDREYVIGRRIWNCGNSYYCVTKGVSVPSIPPNNKQKRVDLFYSSWCIRPVESRRDDGVTSACEVLLFHHEDMGIPREIAKLGVKRGMWGAVKKMEPGLRAYQTHRLSDGGTKLSRSAFMAQINTKITQDHLISLSNGASPVTETPVTLNQGNRAANLKKLLIIGGAVAVVCSLSGGAFVPPAFLLGFGKRFVNGGRKRQLEGTTRSESQTTSS

SEQ ID NO: 99297 - protein, 363 aa, Arabidopsis thaliana
  peptide (1)..(363): Ceres Seq. ID no. 13602622
  misc_feature (91)..(170): Pfam Name: START domain Pfam Description: START domain
  misc_feature (1)..(363): Homolog of NCBI NO: 18423599 NR Description: membrane related protein-like [Arabidopsis
  misc_feature (1)..(363): Homolog of NCBI NO: 21593272 NR Description: membrane related protein-like [Arabidopsis
  misc_feature (4)..(363): Homolog of NCBI NO: 10178166 NR Description: membrane related protein-like [Arabidopsis
  misc_feature (1)..(347): Homolog of NCBI NO: 18033654 NR Description: putative nodule membrane protein [Medicago sativa]
  misc_feature (35)..(347): Homolog of NCBI NO: 22135902 NR Description: membrane related protein CP5, putative thaliana] >gi|23197608|gb|AAN15331.1| membrane related protein
  misc_feature (35)..(347): Homolog of NCBI NO: 15217736 NR Description: membrane related protein CP5 -related
  misc_feature (47)..(347): Homolog of NCBI NO: 38344869 NR Description: OSJNBa0020P07.12 [Oryza sativa (japonica
  misc_feature (35)..(347): Homolog of NCBI NO: 4741929 NR Description: membrane related protein CP5 [Arabidopsis
  misc_feature (1)..(340): Homolog of NCBI NO: 18414239 NR Description: expressed protein [Arabidopsis thaliana] AT4g14500/dl3290w [Arabidopsis thaliana]
  misc_feature (9)..(340): Homolog of NCBI NO: 18403635 NR Description: expressed protein [Arabidopsis thaliana]
MALRQQRQTVSPDSSSSSYDSSEQHLDLVSRVKKTKERLPNTVTELDLRHLVQLVERKDGGQAWIQMMDRFTPGMRYQAWLREPKNGPTEYRSRTVFEDATPVMLRDFFWDDEFRPTWDTMLSNSTTVEECPSTGTMIVRWIRKFPFFCSDREYVIGRRIWNCGNSYYCVTKGVSVPSIPPNNKQKRVDLFYSSWCIRPVESRRDDGVTSACEVLLFHHEDMGIPREIAKLGVKRGMWGAVKKMEPGLRAYQTHRLSDGGTKLSRSAFMAQINTKITQDHLISLSNGASPVTETPVTLNQGNRAANLKKLLIIGGAVAVVCSLSGGAFVPPAFLLGFGKRFVNGGRKRQLEGTTRSESQTTSS

SEQ ID NO: 99298 - DNA, 1793 bp, Arabidopsis thaliana
  misc_feature (1)..(1793): Ceres Seq. ID no. 13602630
  misc_feature: MA Experiment ID: 108488 Result: Down-regulated in Transcription
  misc_feature: MA Experiment ID: 108573 Result: Up-regulated in Transcription
  misc_feature: MA Experiment 108573 PARAMETER Experiment Name: At_Drought_cDNA_P Parameter: Timepoint (hr) Value: 6
  misc_feature: MA Experiment 108573 PARAMETER Experiment Name: At_Drought_cDNA_P Parameter: Tissue Value: Aerial
  misc_feature: MA Experiment 108573 PARAMETER Experiment Name: At_Drought_cDNA_P Parameter: Treatment Value: Drought vs. No Drought
  misc_feature: MA Experiment ID: 108576 Result: Down-regulated in Transcription
  misc_feature: MA Experiment 108576 PARAMETER Experiment Name: At_42deg_Heat_cDNA_P Parameter: Temperature (deg C) Value: 42 vs. 22
  misc_feature: MA Experiment 108576 PARAMETER Experiment Name: At_42deg_Heat_cDNA_P Parameter: Timepoint (hr) Value: 1
  misc_feature: MA Experiment 108576 PARAMETER Experiment Name: At_42deg_Heat_cDNA_P Parameter: Tissue Value: Aerial
  misc_feature: MA Experiment ID: 108595 Result: Down-regulated in Transcription
  misc_feature: MA Experiment 108595 PARAMETER Experiment Name: At_Ler-pi_Ovule_cDNA_P Parameter: Plant Line Value: null
  misc_feature: MA Experiment ID: 20000224 Result: Up-regulated in Transcription
aaaaggatttttaattttcggagaggaagaagaagagagagatattgaagagcgctgaaggcggaaaagactattttgacctcgtcgtctccgtagatcatttttcttcagctcttcttcttcctctttctccgattctccttcttttgattttatctatccgccatgaacgagaaagccaacgtctctaaggagcttaatgcccgccatagaaagattcttgaagggcttcttaaacatccagagaacagagaatgtgctgactgcaaaacaaaaggtccaagatgggctagtgttaatttaggtatctttatctgcatgcaatgttctgggattcacaggagtctcggggtacacatatcgaaggttcgatctgccactctggacacatggctccccgagcaggttgcatttatacagtcaatgggaaatgataaagcaaatagttactgggaagcagagctacccccaaactatgatagagttggaattgagaattttatacgtgcaaagtatgaagagaagagatgggtttctagaggggaaaaggctagatcacctcctagagtcgagcaggaacggcggaaatctgtggagagaagtgggccgggatatgagcatggacatagtagtagtcctgtaaatttgtttgaggagaggaaaactattccagcatctagaacaagaaataatgttgctgcaacgagaataaatcttcccgtgcctccccaaggacccagtcaggttataaagccacagcagaaaatggagtctgcagctactccagtagagagggagaaacaagcagtaaatgttgcaccagcatcagatcctccaaaggtggattttgctactgatctgtttaacatgctatcaatggatgattcgactacaaatacctcagaggcaactcctggcgatactcctgccgatgataactcatgggctggctttcagtctgctggaagtggtcaaacggcagagaaaattgtcacagccaagcctgctgagagcagttctcctccagcttcatcttctgactttgaggatttgtttaaggacacacctaatttaacaactcaacaagcaccaaaagatgtgaaaggcgatatcatgagcctgtttgagaagacgaatatagtatcgccttttgccatgcatcagcaacaggttgctatgctcgctcagcagcaagccctttacatggctgcagcgaaagctgctggaggcactccaaacggcgtgaatcaacaagctattgctaatgctcttaacgtagcttctgcaaattggtcaaaccccggcggctaccagatccccggaatgactaaccccgtaggtggtcaagctgatctccagaaacttatgcaaaacatgaatatgaacgcaaacatgaacacgagacccgcacaaccgcaagagaacactctacaatacccatcatccagtttctacacaatgggtcaagctaatcaagtgaacggtatgaccccaaactcaaccggtaaacctcagtcatcatccgcaacccaaccaacaagcaccacaccatcttcacaatcaggcaaagactttgatttctcttccttgatggatggaatgttcacaaaacattgatcaagagagagagactttttctgaatttgcctttacatctttgttctaaatttgaagaaccaaaagaatatatatacaatcatctctggacagtttttctctgttaaacatatattttcttttctttggaactgtgttgtagccgagctttgatttatgattttactcgattgtcg

SEQ ID NO: 99299 - protein, 483 aa, Arabidopsis thaliana; identical to SEQ ID NO: 38636
  peptide (1)..(483): Ceres Seq. ID no. 13602631
  misc_feature (16)..(130): Pfam Name: Putative GTPase activating protein for Arf Pfam Description: Putative GTPase activating protein for Arf
  misc_feature (1)..(483): Homolog of NCBI NO: 18423615 NR Description: ARF GAP-like zinc finger-containing protein [Arabidopsis thaliana] >gi|9759504|dbj|BAB10754.1| protein [Arabidopsis thaliana] >gi|20466500|gb|AAM20567.1|
  misc_feature (1)..(483): Homolog of NCBI NO: 21618169 NR Description: ARF GAP-like zinc finger-containing protein ZIGA3
  misc_feature (7)..(483): Homolog of NCBI NO: 10441352 NR Description: ARF GAP-like zinc finger-containing protein ZIGA3
  misc_feature (1)..(482): Homolog of NCBI NO: 34898734 NR Description: contains ESTs
  misc_feature (1)..(213): Homolog of NCBI NO: 9294154 NR Description: emb|CAB07858.1~gene_id:MKP6.22~similar to unknown
  misc_feature (1)..(117): Homolog of NCBI NO: 15229090 NR Description: ARF GTPase-activating domain-containing protein
  misc_feature (8)..(307): Homolog of NCBI NO: 20152063 NR Description: RE02759p [Drosophila melanogaster]
  misc_feature (8)..(307): Homolog of NCBI NO: 24651922 NR Description: CG8243-PA [Drosophila melanogaster]
  misc_feature (8)..(428): Homolog of NCBI NO: 28077013 NR Description: stromal membrane-associated protein [Mus musculus]
  misc_feature (8)..(239): Homolog of NCBI NO: 10435055 NR Description: unnamed protein product [Homo sapiens]

SEQ ID NO: 99300 - protein, 432 aa, Arabidopsis thaliana; identical to SEQ ID NO: 38637
  peptide (1)..(432): Ceres Seq. ID no. 13602632
  misc_feature (1)..(79): Pfam Name: Putative GTPase activating protein for Arf Pfam Description: Putative GTPase activating protein for Arf
  misc_feature (1)..(432): Homolog of NCBI NO: 18423615 NR Description: ARF GAP-like zinc finger-containing protein [Arabidopsis thaliana] >gi|9759504|dbj|BAB10754.1| protein [Arabidopsis thaliana] >gi|20466500|gb|AAM20567.1|
  misc_feature (1)..(432): Homolog of NCBI NO: 21618169 NR Description: ARF GAP-like zinc finger-containing protein ZIGA3
  misc_feature (1)..(432): Homolog of NCBI NO: 10441352 NR Description: ARF GAP-like zinc finger-containing protein ZIGA3
  misc_feature (1)..(431): Homolog of NCBI NO: 34898734 NR Description: contains ESTs
  misc_feature (1)..(162): Homolog of NCBI NO: 9294154 NR Description: emb|CAB07858.1~gene_id:MKP6.22~similar to unknown
  misc_feature (1)..(66): Homolog of NCBI NO: 15229090 NR Description: ARF GTPase-activating domain-containing protein
  misc_feature (1)..(256): Homolog of NCBI NO: 20152063 NR Description: RE02759p [Drosophila melanogaster]
  misc_feature (1)..(256): Homolog of NCBI NO: 24651922 NR Description: CG8243-PA [Drosophila melanogaster]
  misc_feature (1)..(377): Homolog of NCBI NO: 28077013 NR Description: stromal membrane-associated protein [Mus musculus]
  misc_feature (1)..(188): Homolog of NCBI NO: 10435055 NR Description: unnamed protein product [Homo sapiens]

SEQ ID NO: 99301 - protein, 397 aa, Arabidopsis thaliana; identical to SEQ ID NO: 38638
  peptide (1)..(397): Ceres Seq. ID no. 13602633
  misc_feature (1)..(397): Homolog of NCBI NO: 18423615 NR Description: ARF GAP-like zinc finger-containing protein [Arabidopsis thaliana] >gi|9759504|dbj|BAB10754.1| protein [Arabidopsis thaliana] >gi|20466500|gb|AAM20567.1|
  misc_feature (1)..(397): Homolog of NCBI NO: 21618169 NR Description: ARF GAP-like zinc finger-containing protein ZIGA3
  misc_feature (1)..(397): Homolog of NCBI NO: 10441352 NR Description: ARF GAP-like zinc finger-containing protein ZIGA3
  misc_feature (1)..(396): Homolog of NCBI NO: 34898734 NR Description: contains ESTs
  misc_feature (1)..(127): Homolog of NCBI NO: 9294154 NR Description: emb|CAB07858.1~gene_id:MKP6.22~similar to unknown
  misc_feature (1)..(31): Homolog of NCBI NO: 15229090 NR Description: ARF GTPase-activating domain-containing protein
  misc_feature (1)..(221): Homolog of NCBI NO: 20152063 NR Description: RE02759p [Drosophila melanogaster]
  misc_feature (1)..(221): Homolog of NCBI NO: 24651922 NR Description: CG8243-PA [Drosophila melanogaster]
  misc_feature (1)..(342): Homolog of NCBI NO: 28077013 NR Description: stromal membrane-associated protein [Mus musculus]
  misc_feature (1)..(153): Homolog of NCBI NO: 10435055 NR Description: unnamed protein product [Homo sapiens]

SEQ ID NO: 99302 - DNA, 1250 bp, Arabidopsis thaliana
  misc_feature (1)..(1250): Ceres Seq. ID no. 13602634
  misc_feature: MA Experiment ID: 108434 Result: Up-regulated in Transcription
  misc_feature: MA Experiment 108434 PARAMETER Experiment Name: At_Root_Tips_cDNA_P Parameter: Tissue Value: Root Tips
  misc_feature: MA Experiment ID: 108461 Result: Up-regulated in Transcription
  misc_feature: MA Experiment 108461 PARAMETER Experiment Name: At_Germinating_Seeds_cDNA_P Parameter: Age (day) Value: 1 vs. 0
  misc_feature: MA Experiment 108461 PARAMETER Experiment Name: At_Germinating_Seeds_cDNA_P Parameter: Tissue Value: Germinating Seeds
  misc_feature: MA Experiment ID: 108462 Result: Up-regulated in Transcription
  misc_feature: MA Experiment 108462 PARAMETER Experiment Name: At_Germinating_Seeds_cDNA_P Parameter: Age (day) Value: 2 vs. 0
  misc_feature: MA Experiment 108462 PARAMETER Experiment Name: At_Germinating_Seeds_cDNA_P Parameter: Tissue Value: Germinating Seeds
  misc_feature: MA Experiment ID: 108594 Result: Down-regulated in Transcription
  misc_feature: MA Experiment 108594 PARAMETER Experiment Name: At_Ler-rhl_Root_cDNA_P Parameter: Plant Line Value: null
  misc_feature: MA Experiment ID: 20000180 Result: Up-regulated in Transcription
  misc_feature: MA Experiment 20000180 PARAMETER Experiment Name: At_Germinating_Seeds_P Parameter: Age (hr) Value: 24 vs. 0
  misc_feature: MA Experiment 20000180 PARAMETER Experiment Name: At_Germinating_Seeds_P Parameter: Tissue Value: Germinating Seeds
  misc_feature: MA Experiment ID: 20000185 Result: Up-regulated in Transcription
  misc_feature: MA Experiment 20000185 PARAMETER Experiment Name: At_Roots__P Parameter: Age (day) Value: 7 vs. 21
  misc_feature: MA Experiment 20000185 PARAMETER Experiment Name: At_Roots__P Parameter: Organism Value: A. thaliana
  misc_feature: MA Experiment 20000185 PARAMETER Experiment Name: At_Roots__P Parameter: Tissue Value: Roots vs. Whole Plant
  misc_feature: MA Experiment ID: 20000227 Result: Up-regulated in Transcription
  misc_feature: MA Experiment 20000227 PARAMETER Experiment Name: At_Root-Tips-vs-Tops_P Parameter: Tissue Value: Root Tips vs. Root Tops
  misc_feature: MA Experiment ID: 20000439 Result: Up-regulated in Transcription
  misc_feature: MA Experiment 20000439 PARAMETER Experiment Name: At_Roots__P Parameter: Age (day) Value: 14 vs. 21
  misc_feature: MA Experiment 20000439 PARAMETER Experiment Name: At_Roots__P Parameter: Organism Value: A. thaliana
  misc_feature: MA Experiment 20000439 PARAMETER Experiment Name: At_Roots__P Parameter: Tissue Value: Roots vs. Whole Plant
  misc_feature: MA Experiment ID: 20000451 Result: Down-regulated in Transcription
  misc_feature: MA Experiment 20000451 PARAMETER Experiment Name: At_CS6879_Shoots-Roots_P Parameter: Age (day) Value: 14
  misc_feature: MA Experiment 20000451 PARAMETER Experiment Name: At_CS6879_Shoots-Roots_P Parameter: Organism Value: A. thaliana
  misc_feature: MA Experiment 20000451 PARAMETER Experiment Name: At_CS6879_Shoots-Roots_P Parameter: Plant Line Value: CS6879 vs. WS
  misc_feature: MA Experiment 20000451 PARAMETER Experiment Name: At_CS6879_Shoots-Roots_P Parameter: Tissue Value: Roots
  misc_feature: MA Experiment ID: 20000527 Result: Down-regulated in Transcription
  misc_feature: MA Experiment 20000527 PARAMETER Experiment Name: At_10percent_PEG_P Parameter: Age (day) Value: 20
  misc_feature: MA Experiment 20000527 PARAMETER Experiment Name: At_10percent_PEG_P Parameter: Organism Value: A. thaliana
  misc_feature: MA Experiment 20000527 PARAMETER Experiment Name: At_10percent_PEG_P Parameter: Plant Line Value: WS
  misc_feature: MA Experiment 20000527 PARAMETER Experiment Name: At_10percent_PEG_P Parameter: Timepoint (day) Value: 20
  misc_feature: MA Experiment 20000527 PARAMETER Experiment Name: At_10percent_PEG_P Parameter: Tissue Value: Whole Plant
  misc_feature: MA Experiment 20000527 PARAMETER Experiment Name: At_10percent_PEG_P Parameter: Treatment Value: 10percent PEG vs. No Treatment
aaaacaaaccaactttccttctctaatcaaaacaagaaagacacaaagatggagatctcaaaaacccttttgctagtgatttctctggtggctgcaacttgtttcttgcaagccaaggcagctggagtttattgtagtaacccttacactcgatgttaccgcaagtacattaggtgtccagaggaatgtccaagcaaaaccgctatgaactccaagaacaaagtgtgctacgccgattgcgatagacccacttgcaaatcccaatgccgcatgaggaaaccaaactgcaacagacctggatcagcttgttatgacccgaggttcattggaggagacggcattgtgttctacttccatggaaagagcaatgaagagtttagcctcgtctctgactctgaccttcagatcaatggtaggttcattggtcacagacccgctggtcgtgccagagacttcacatggatccaagctctaggattccttttcaactccaacaaattctccctcgaagccgcgaaaaccgcctcatgggacaacgaaatcgaccatctcaaattcagttacgatggccaagatttatctgttccagaagaaactctctccacctggtactcaccaaacaaggacatcaagatcgagagagtgagtatgagaaacagcgtgatcgtgacaatcaaagacaaagccgagatcatgatcaatgtggttccagtgacaaaagaagacgacagaatccatagctacaaagtaccatcagatgattgttttgcacatcttgaggttcaattcagattctttaacctttcacctaaggttgatggaatcttgggacgaacctacaggcccgatttccaaaatccggctaagcctggagtcgcaatgccagttgttggtggtgaagacagcttcaagacttcttctctactctccaatgactgtaaaacttgcattttctctgagtcacaagcagagattgattctgttaagtcagagattgaatatgcaactttggattgtacccgtggagcgtcttctggttacggtatcgtgtgcaggaagtaaaaaaagaatcatataaacttggcttaaaagaagaataatgccagagagctttagcttctactggagattttccaaagtataatataagtgaaggaataatatgtaaacttgcaatgtatttgtattgtatcatccaccatgtattctaatttgtattaacctaatcattgttattgatatataatacc

SEQ ID NO: 99303 - protein, 353 aa, Arabidopsis thaliana
  peptide (1)..(353): Ceres Seq. ID no. 13602635
  misc_feature (17)..(353): Homolog of NCBI NO: 15239629 NR Description: root cap protein 2-related protein [Arabidopsis
  misc_feature (17)..(353): Homolog of NCBI NO: 15234120 NR Description: expressed protein [Arabidopsis thaliana]
  misc_feature (25)..(353): Homolog of NCBI NO: 15221921 NR Description: late embryogenesis protein -related [Arabidopsis
  misc_feature (52)..(318): Homolog of NCBI NO: 15239359 NR Description: late embryonic abundant protein - like thaliana] >gi|9757754|dbj|BAB08235.1| contains similarity to root
  misc_feature (52)..(327): Homolog of NCBI NO: 15239360 NR Description: late embryonic abundant protein - like thaliana] >gi|9757755|dbj|BAB08236.1| contains similarity to root protein~gene_id:MUF9.16 [Arabidopsis thaliana]
  misc_feature (52)..(327): Homolog of NCBI NO: 15809990 NR Description: AT5g60530/muf9_180 [Arabidopsis thaliana]
  misc_feature (17)..(353): Homolog of NCBI NO: 7484468 NR Description: late embryonic abundant protein EMB7 - white >gi|1350543|gb|AAB01570.1| late embryogenesis abundant protein
  misc_feature (38)..(353): Homolog of NCBI NO: 11994465 NR Description: contains similarity to late embryogenesis
  misc_feature (38)..(353): Homolog of NCBI NO: 30685319 NR Description: late embryogenesis abundant protein -related
  misc_feature (49)..(353): Homolog of NCBI NO: 4514637 NR Description: root cap protein 2 [Zea mays]
KTNQLSFSNQNKKDTKMEISKTLLLVISLVAATCFLQAKAAGVYCSNPYTRCYRKYIRCPEECPSKTAMNSKNKVCYADCDRPTCKSQCRMRKPNCNRPGSACYDPRFIGGDGIVFYFHGKSNEEFSLVSDSDLQINGRFIGHRPAGRARDFTWIQALGFLFNSNKFSLEAAKTASWDNEIDHLKFSYDGQDLSVPEETLSTWYSPNKDIKIERVSMRNSVIVTIKDKAEIMINVVPVTKEDDRIHSYKVPSDDCFAHLEVQFRFFNLSPKVDGILGRTYRPDFQNPAKPGVAMPVVGGEDSFKTSSLLSNDCKTCIFSESQAEIDSVKSEIEYATLDCTRGASSGYGIVCRK

SEQ ID NO: 99304 - protein, 337 aa, Arabidopsis thaliana
  peptide (1)..(337): Ceres Seq. ID no. 13602636
  misc_feature (1)..(337): Homolog of NCBI NO: 15239629 NR Description: root cap protein 2-related protein [Arabidopsis
  misc_feature (1)..(337): Homolog of NCBI NO: 15234120 NR Description: expressed protein [Arabidopsis thaliana]
  misc_feature (9)..(337): Homolog of NCBI NO: 15221921 NR Description: late embryogenesis protein -related [Arabidopsis
  misc_feature (36)..(302): Homolog of NCBI NO: 15239359 NR Description: late embryonic abundant protein - like thaliana] >gi|9757754|dbj|BAB08235.1| contains similarity to root
  misc_feature (36)..(311): Homolog of NCBI NO: 15239360 NR Description: late embryonic abundant protein - like thaliana] >gi|9757755|dbj|BAB08236.1| contains similarity to root protein~gene_id:MUF9.16 [Arabidopsis thaliana]
  misc_feature (36)..(311): Homolog of NCBI NO: 15809990 NR Description: AT5g60530/muf9_180 [Arabidopsis thaliana]
  misc_feature (1)..(337): Homolog of NCBI NO: 7484468 NR Description: late embryonic abundant protein EMB7 - white >gi|1350543|gb|AAB01570.1| late embryogenesis abundant protein
  misc_feature (22)..(337): Homolog of NCBI NO: 11994465 NR Description: contains similarity to late embryogenesis
  misc_feature (22)..(337): Homolog of NCBI NO: 30685319 NR Description: late embryogenesis abundant protein -related
  misc_feature (33)..(337): Homolog of NCBI NO: 4514637 NR Description: root cap protein 2 [Zea mays]
MEISKTLLLVISLVAATCFLQAKAAGVYCSNPYTRCYRKYIRCPEECPSKTAMNSKNKVCYADCDRPTCKSQCRMRKPNCNRPGSACYDPRFIGGDGIVFYFHGKSNEEFSLVSDSDLQINGRFIGHRPAGRARDFTWIQALGFLFNSNKFSLEAAKTASWDNEIDHLKFSYDGQDLSVPEETLSTWYSPNKDIKIERVSMRNSVIVTIKDKAEIMINVVPVTKEDDRIHSYKVPSDDCFAHLEVQFRFFNLSPKVDGILGRTYRPDFQNPAKPGVAMPVVGGEDSFKTSSLLSNDCKTCIFSESQAEIDSVKSEIEYATLDCTRGASSGYGIVCRK

SEQ ID NO: 99305 - protein, 285 aa, Arabidopsis thaliana
  peptide (1)..(285): Ceres Seq. ID no. 13602637
  misc_feature (1)..(285): Homolog of NCBI NO: 15239629 NR Description: root cap protein 2-related protein [Arabidopsis
  misc_feature (1)..(285): Homolog of NCBI NO: 15234120 NR Description: expressed protein [Arabidopsis thaliana]
  misc_feature (1)..(285): Homolog of NCBI NO: 15221921 NR Description: late embryogenesis protein -related [Arabidopsis
  misc_feature (1)..(250): Homolog of NCBI NO: 15239359 NR Description: late embryonic abundant protein - like thaliana] >gi|9757754|dbj|BAB08235.1| contains similarity to root
  misc_feature (1)..(259): Homolog of NCBI NO: 15239360 NR Description: late embryonic abundant protein - like thaliana] >gi|9757755|dbj|BAB08236.1| contains similarity to root protein~gene_id:MUF9.16 [Arabidopsis thaliana]
  misc_feature (1)..(259): Homolog of NCBI NO: 15809990 NR Description: AT5g60530/muf9_180 [Arabidopsis thaliana]
  misc_feature (1)..(285): Homolog of NCBI NO: 7484468 NR Description: late embryonic abundant protein EMB7 - white >gi|1350543|gb|AAB01570.1| late embryogenesis abundant protein
  misc_feature (1)..(285): Homolog of NCBI NO: 11994465 NR Description: contains similarity to late embryogenesis
  misc_feature (1)..(285): Homolog of NCBI NO: 30685319 NR Description: late embryogenesis abundant protein -related
  misc_feature (1)..(285): Homolog of NCBI NO: 4514637 NR Description: root cap protein 2 [Zea mays]
MNSKNKVCYADCDRPTCKSQCRMRKPNCNRPGSACYDPRFIGGDGIVFYFHGKSNEEFSLVSDSDLQINGRFIGHRPAGRARDFTWIQALGFLFNSNKFSLEAAKTASWDNEIDHLKFSYDGQDLSVPEETLSTWYSPNKDIKIERVSMRNSVIVTIKDKAEIMINVVPVTKEDDRIHSYKVPSDDCFAHLEVQFRFFNLSPKVDGILGRTYRPDFQNPAKPGVAMPVVGGEDSFKTSSLLSNDCKTCIFSESQAEIDSVKSEIEYATLDCTRGASSGYGIVCRK

SEQ ID NO: 99306 - DNA, 1171 bp, Arabidopsis thaliana
  misc_feature (1)..(1171): Ceres Seq. ID no. 13602642
  misc_feature: MA Experiment ID: 108573 Result: Up-regulated in Transcription
  misc_feature: MA Experiment 108573 PARAMETER Experiment Name: At_Drought_cDNA_P Parameter: Timepoint (hr) Value: 6
  misc_feature: MA Experiment 108573 PARAMETER Experiment Name: At_Drought_cDNA_P Parameter: Tissue Value: Aerial
  misc_feature: MA Experiment 108573 PARAMETER Experiment Name: At_Drought_cDNA_P Parameter: Treatment Value: Drought vs. No Drought
  misc_feature: MA Experiment ID: 108594 Result: Down-regulated in Transcription
  misc_feature: MA Experiment 108594 PARAMETER Experiment Name: At_Ler-rhl_Root_cDNA_P Parameter: Plant Line Value: null
  misc_feature: MA Experiment ID: 108595 Result: Down-regulated in Transcription
  misc_feature: MA Experiment 108595 PARAMETER Experiment Name: At_Ler-pi_Ovule_cDNA_P Parameter: Plant Line Value: null
  misc_feature: MA Experiment ID: 20000224 Result: Down-regulated in Transcription
  misc_feature: MA Experiment ID: 20000234 Result: Down-regulated in Transcription
  misc_feature: MA Experiment 20000234 PARAMETER Experiment Name: At_Siliques_P Parameter: Age (day) Value: 21
  misc_feature: MA Experiment 20000234 PARAMETER Experiment Name: At_Siliques_P Parameter: Organism Value: A. thaliana
  misc_feature: MA Experiment 20000234 PARAMETER Experiment Name: At_Siliques_P Parameter: Plant Line Value: WS
  misc_feature: MA Experiment 20000234 PARAMETER Experiment Name: At_Siliques_P Parameter: Tissue Value: Less Than 5mm Siliques vs. Whole Plant
  misc_feature: MA Experiment ID: 20000235 Result: Down-regulated in Transcription
  misc_feature: MA Experiment 20000235 PARAMETER Experiment Name: At_Siliques_P Parameter: Age (day) Value: 21
  misc_feature: MA Experiment 20000235 PARAMETER Experiment Name: At_Siliques_P Parameter: Organism Value: A. thaliana
  misc_feature: MA Experiment 20000235 PARAMETER Experiment Name: At_Siliques_P Parameter: Plant Line Value: WS
  misc_feature: MA Experiment 20000235 PARAMETER Experiment Name: At_Siliques_P Parameter: Tissue Value: 5-10mm Siliques vs. Whole Plant
  misc_feature: MA Experiment ID: 20000495 Result: Down-regulated in Transcription
  misc_feature: MA Experiment 20000495 PARAMETER Experiment Name: At_Guard_Cells_P Parameter: Harvest Date Value: 8/2/2002
  misc_feature: MA Experiment 20000495 PARAMETER Experiment Name: At_Guard_Cells_P Parameter: Organism Value: A. thaliana
  misc_feature: MA Experiment 20000495 PARAMETER Experiment Name: At_Guard_Cells_P Parameter: Tissue Value: Guard Cells vs. Leaves
  misc_feature: MA Experiment ID: 20000496 Result: Down-regulated in Transcription
  misc_feature: MA Experiment 20000496 PARAMETER Experiment Name: At_Guard_Cells_P Parameter: Harvest Date Value: 7/19/2002
  misc_feature: MA Experiment 20000496 PARAMETER Experiment Name: At_Guard_Cells_P Parameter: Organism Value: Canola
  misc_feature: MA Experiment 20000496 PARAMETER Experiment Name: At_Guard_Cells_P Parameter: Tissue Value: Guard Cells vs. Leaves
  misc_feature: MA Experiment ID: 20001451 Result: Down-regulated in Transcription
  misc_feature: MA Experiment 20001451 PARAMETER Experiment Name: At_Far-red-induction_P Parameter: Age (day) Value: 7
  misc_feature: MA Experiment 20001451 PARAMETER Experiment Name: At_Far-red-induction_P Parameter: Light Value: Far-red vs. White
  misc_feature: MA Experiment 20001451 PARAMETER Experiment Name: At_Far-red-induction_P Parameter: Organism Value: A. thaliana
  misc_feature: MA Experiment 20001451 PARAMETER Experiment Name: At_Far-red-induction_P Parameter: Plant Line Value: Columbia
  misc_feature: MA Experiment 20001451 PARAMETER Experiment Name: At_Far-red-induction_P Parameter: Timepoint (hr) Value: 24
  misc_feature: MA Experiment 20001451 PARAMETER Experiment Name: At_Far-red-induction_P Parameter: Tissue Value: Whole Plant
atacatttctccaaaatctccgagttctacaattgtgtgatcaatcaatcttctccgatttcaagcttctcgatcaaaagaatcatcatgggaggaggaagagctatggcgacggcggcgaaggttgctggaatcggagttggtaaaggaggattcaagggatttggatttcctccggcgactgagcagtttcgtgttaaaaccgcggcggctgcggcgtcgtctaaaccggtttcggcttcgattacatcggcggttcatccttctgttgaagaagatgggatgattatgcagagaccggtttgggatgattgggaatttgctgaagaagaaccgattcctagggttgtttttagcaaacctcctagtcttgaagaagctaaagaagctactgaagatcttaaagaagcaattaatttggtgtatatgtcatctccaaagtcgtctgctgctatggaaggatcaaatgatggtggctctgtttccaaaatgctctctggttttcaatcttctgagaacagagctgttgaatcagctgttccacaagttgctcttcaagcatttgcttttctaagtgagaacactgctgcgcagactgttgttgcttccattgcgagtgacccaaaagtatgggatgctgttatggagaataaggatctcatgaaatttcttcagaccaacaaaaccgctgtttcctctcaagttgaatctgacaatgacgaccaatctgaacgttcgagcacgactgagtgtgaagtcgtggaaactaagccaatggaactcttagagattctgcaggacatgaagctaaaagctgttcggttgatggaaaatgtatcttcctactttggtgacttgtttgggttaggatcagttacagaagatggaaaagacaagaagcagacgttgttcaatgaccctcgttctctgtttggattagctgtggttgttatcttcatggtagttttaaaacgtgcttaagatctcttgttcctgaattcgccgatatagcggaaaaacaactacgtactctgtgttatcgtttaaactctgtttcattcctttgctttgttatcgtttaaactctgttttttgtttgattggaatgatttggaaccgtcattggatcttttcataatttataaataaaaagatcctttggatgttttat

SEQ ID NO: 99307 - protein, 326 aa, Arabidopsis thaliana; identical to SEQ ID NO: 21766
  peptide (1)..(326): Ceres Seq. ID no. 13602643
  misc_feature (30)..(326): Homolog of NCBI NO: 15239670 NR Description: expressed protein [Arabidopsis thaliana] gene_id:MRB17.4~pir||T05538~similar to unknown protein thaliana] >gi|16648816|gb|AAL25598.1| AT5g54540/MRB17_4

SEQ ID NO: 99308 - protein, 297 aa, Arabidopsis thaliana; identical to SEQ ID NO: 21767
  peptide (1)..(297): Ceres Seq. ID no. 13602644
  misc_feature (1)..(297): Homolog of NCBI NO: 15239670 NR Description: expressed protein [Arabidopsis thaliana] gene_id:MRB17.4~pir||T05538~similar to unknown protein thaliana] >gi|16648816|gb|AAL25598.1| AT5g54540/MRB17_4

SEQ ID NO: 99309 - protein, 291 aa, Arabidopsis thaliana; identical to SEQ ID NO: 21768
  peptide (1)..(291): Ceres Seq. ID no. 13602645
  misc_feature (1)..(291): Homolog of NCBI NO: 15239670 NR Description: expressed protein [Arabidopsis thaliana] gene_id:MRB17.4~pir||T05538~similar to unknown protein thaliana] >gi|16648816|gb|AAL25598.1| AT5g54540/MRB17_4

SEQ ID NO: 99310 - DNA, 811 bp, Arabidopsis thaliana
  misc_feature (1)..(811): Ceres Seq. ID no. 13602646
  misc_feature: MA Experiment ID: 108434 Result: Up-regulated in Transcription
  misc_feature: MA Experiment 108434 PARAMETER Experiment Name: At_Root_Tips_cDNA_P Parameter: Tissue Value: Root Tips
  misc_feature: MA Experiment ID: 108461 Result: Down-regulated in Transcription
  misc_feature: MA Experiment 108461 PARAMETER Experiment Name: At_Germinating_Seeds_cDNA_P Parameter: Age (day) Value: 1 vs. 0
  misc_feature: MA Experiment 108461 PARAMETER Experiment Name: At_Germinating_Seeds_cDNA_P Parameter: Tissue Value: Germinating Seeds
  misc_feature: MA Experiment ID: 108462 Result: Down-regulated in Transcription
  misc_feature: MA Experiment 108462 PARAMETER Experiment Name: At_Germinating_Seeds_cDNA_P Parameter: Age (day) Value: 2 vs. 0
  misc_feature: MA Experiment 108462 PARAMETER Experiment Name: At_Germinating_Seeds_cDNA_P Parameter: Tissue Value: Germinating Seeds
  misc_feature: MA Experiment ID: 108463 Result: Down-regulated in Transcription
  misc_feature: MA Experiment 108463 PARAMETER Experiment Name: At_Germinating_Seeds_cDNA_P Parameter: Age (day) Value: 3 vs. 0
  misc_feature: MA Experiment 108463 PARAMETER Experiment Name: At_Germinating_Seeds_cDNA_P Parameter: Tissue Value: Germinating Seeds
  misc_feature: MA Experiment ID: 108464 Result: Down-regulated in Transcription
  misc_feature: MA Experiment 108464 PARAMETER Experiment Name: At_Germinating_Seeds_cDNA_P Parameter: Age (day) Value: 4 vs. 0
  misc_feature: MA Experiment 108464 PARAMETER Experiment Name: At_Germinating_Seeds_cDNA_P Parameter: Tissue Value: Germinating Seeds
  misc_feature: MA Experiment ID: 108577 Result: Up-regulated in Transcription
  misc_feature: MA Experiment 108577 PARAMETER Experiment Name: At_42deg_Heat_cDNA_P Parameter: Temperature (deg C) Value: 42 vs. 22
  misc_feature: MA Experiment 108577 PARAMETER Experiment Name: At_42deg_Heat_cDNA_P Parameter: Timepoint (hr) Value: 6
  misc_feature: MA Experiment 108577 PARAMETER Experiment Name: At_42deg_Heat_cDNA_P Parameter: Tissue Value: Aerial
  misc_feature: MA Experiment ID: 20000111 Result: Up-regulated in Transcription
  misc_feature: MA Experiment 20000111 PARAMETER Experiment Name: At_42deg_Heat_cDNA_P Parameter: Temperature (deg C) Value: 42 vs. 22
  misc_feature: MA Experiment 20000111 PARAMETER Experiment Name: At_42deg_Heat_cDNA_P Parameter: Timepoint (hr) Value: 6
  misc_feature: MA Experiment 20000111 PARAMETER Experiment Name: At_42deg_Heat_cDNA_P Parameter: Tissue Value: Aerial
  misc_feature: MA Experiment ID: 20000113 Result: Up-regulated in Transcription
  misc_feature: MA Experiment 20000113 PARAMETER Experiment Name: At_42deg_Heat_cDNA_P Parameter: Temperature (deg C) Value: 42 vs. 22
  misc_feature: MA Experiment 20000113 PARAMETER Experiment Name: At_42deg_Heat_cDNA_P Parameter: Timepoint (hr) Value: 8
  misc_feature: MA Experiment 20000113 PARAMETER Experiment Name: At_42deg_Heat_cDNA_P Parameter: Tissue Value: Aerial
caatcgattttgtttgttctctgcttttttggtttagggttttagcttttcaaagttaaaacctttttttcccgaagaagaatcaatacgactcaaatcaatcaattgaatctatggcgatggctatgagacttccagcgatatctagagctgtgacggaagtagcttcagctccggttggtttgagacgactgttctgttcaaatgcttcaaggttctcttttttgtctccacaagctgaatcccaaacaccggctcgtcctcaggctgaacctagcaccaatctcttcgtctccgggcttagtaagcgcaccacttctgaaggactaaggactgcttttgctcagtttggagaagttgctgatgctaaggttgtcacagacagagtatcaggatattccaaagggtttggatttgttagatatgccactttagaagattctgccaaaggcatagctggaatggacgggaagtttcttgacggttgggtcatattcgcagagtatgcaagaccgagagagcaatcacagtcatatcaacctcagaacaacatgtctcgtcctccatactatggtaaccgctagagaaacagttttcttcggttcttatgaatcttttatattcatatttatgcttcattctatcctcttctatgatcgaactgtgttgtgcttcgtctcgtgttattacctttagaagattaaaaacttcaaattatattttgaaggaataatcagaaactgtcatttacaaaaccaaagtattaagtgtaatagttttttaagaggaagaggattttgcttacatggtt

SEQ ID NO: 99311 - protein, 156 aa, Arabidopsis thaliana; identical to SEQ ID NO: 29421
  peptide (1)..(156): Ceres Seq. ID no. 13602647
  misc_feature (58)..(129): Pfam Name: RNA recognition motif. (a.k.a. RRM, RBD, or RNP domain) Pfam Description: RNA recognition motif. (a.k.a. RRM, RBD, or RNP
  misc_feature (1)..(156): Homolog of NCBI NO: 15239676 NR Description: RNA recognition motif (RRM)-containing protein
  misc_feature (18)..(150): Homolog of NCBI NO: 38636774 NR Description: putative RNA recognition motif (RRM)-containing
  misc_feature (18)..(148): Homolog of NCBI NO: 34898598 NR Description: P0534A03.25 [Oryza sativa (japonica
  misc_feature (25)..(144): Homolog of NCBI NO: 15224298 NR Description: RNA-binding protein, putative [Arabidopsis
  misc_feature (1)..(70): Homolog of NCBI NO: 15226161 NR Description: DEAD box RNA helicase, putative [Arabidopsis
  misc_feature (36)..(150): Homolog of NCBI NO: 15219486 NR Description: RNA recognition motif (RRM)-containing protein
  misc_feature (34)..(135): Homolog of NCBI NO: 34906972 NR Description: putative glycine-rich RNA-binding protein 2
  misc_feature (55)..(136): Homolog of NCBI NO: 15239958 NR Description: RNA-binding protein, putative [Arabidopsis
  misc_feature (56)..(156): Homolog of NCBI NO: 21388662 NR Description: glycine-rich RNA-binding protein [Physcomitrella
  misc_feature (55)..(120): Homolog of NCBI NO: 19881711 NR Description: Putative RNA-binding protein [Oryza sativa]

SEQ ID NO: 99312 - protein, 154 aa, Arabidopsis thaliana; identical to SEQ ID NO: 29422
  peptide (1)..(154): Ceres Seq. ID no. 13602648
  misc_feature (56)..(127): Pfam Name: RNA recognition motif. (a.k.a. RRM, RBD, or RNP domain) Pfam Description: RNA recognition motif. (a.k.a. RRM, RBD, or RNP
  misc_feature (1)..(154): Homolog of NCBI NO: 15239676 NR Description: RNA recognition motif (RRM)-containing protein
  misc_feature (16)..(148): Homolog of NCBI NO: 38636774 NR Description: putative RNA recognition motif (RRM)-containing
  misc_feature (16)..(146): Homolog of NCBI NO: 34898598 NR Description: P0534A03.25 [Oryza sativa (japonica
  misc_feature (23)..(142): Homolog of NCBI NO: 15224298 NR Description: RNA-binding protein, putative [Arabidopsis
  misc_feature (1)..(68): Homolog of NCBI NO: 15226161 NR Description: DEAD box RNA helicase, putative [Arabidopsis
  misc_feature (34)..(148): Homolog of NCBI NO: 15219486 NR Description: RNA recognition motif (RRM)-containing protein
  misc_feature (32)..(133): Homolog of NCBI NO: 34906972 NR Description: putative glycine-rich RNA-binding protein 2
  misc_feature (53)..(134): Homolog of NCBI NO: 15239958 NR Description: RNA-binding protein, putative [Arabidopsis
  misc_feature (54)..(154): Homolog of NCBI NO: 21388662 NR Description: glycine-rich RNA-binding protein [Physcomitrella
  misc_feature (53)..(118): Homolog of NCBI NO: 19881711 NR Description: Putative RNA-binding protein [Oryza sativa]

SEQ ID NO: 99313 - protein, 152 aa, Arabidopsis thaliana; identical to SEQ ID NO: 29423
  peptide (1)..(152): Ceres Seq. ID no. 13602649
  misc_feature (54)..(125): Pfam Name: RNA recognition motif. (a.k.a. RRM, RBD, or RNP domain) Pfam Description: RNA recognition motif. (a.k.a. RRM, RBD, or RNP
  misc_feature (1)..(152): Homolog of NCBI NO: 15239676 NR Description: RNA recognition motif (RRM)-containing protein
  misc_feature (14)..(146): Homolog of NCBI NO: 38636774 NR Description: putative RNA recognition motif (RRM)-containing
  misc_feature (14)..(144): Homolog of NCBI NO: 34898598 NR Description: P0534A03.25 [Oryza sativa (japonica
  misc_feature (21)..(140): Homolog of NCBI NO: 15224298 NR Description: RNA-binding protein, putative [Arabidopsis
  misc_feature (1)..(66): Homolog of NCBI NO: 15226161 NR Description: DEAD box RNA helicase, putative [Arabidopsis
  misc_feature (32)..(146): Homolog of NCBI NO: 15219486 NR Description: RNA recognition motif (RRM)-containing protein
  misc_feature (30)..(131): Homolog of NCBI NO: 34906972 NR Description: putative glycine-rich RNA-binding protein 2
  misc_feature (51)..(132): Homolog of NCBI NO: 15239958 NR Description: RNA-binding protein, putative [Arabidopsis
  misc_feature (52)..(152): Homolog of NCBI NO: 21388662 NR Description: glycine-rich RNA-binding protein [Physcomitrella
  misc_feature (51)..(116): Homolog of NCBI NO: 19881711 NR Description: Putative RNA-binding protein [Oryza sativa]

SEQ ID NO: 99314 - DNA, 766 bp, Arabidopsis thaliana
  misc_feature (1)..(766): Ceres Seq. ID no. 13602650
  misc_feature: MA Experiment ID: 108435 Result: Down-regulated in Transcription
  misc_feature: MA Experiment 108435 PARAMETER Experiment Name: At_stm_Mutants_cDNA_P Parameter: Plant Line Value: wt Landsburg vs stm
  misc_feature: MA Experiment 108435 PARAMETER Experiment Name: At_stm_Mutants_cDNA_P Parameter: Tissue Value: Shoot Apical Meristem Region
  misc_feature: MA Experiment ID: 108488 Result: Up-regulated in Transcription
  misc_feature: MA Experiment ID: 108595 Result: Down-regulated in Transcription
  misc_feature: MA Experiment 108595 PARAMETER Experiment Name: At_Ler-pi_Ovule_cDNA_P Parameter: Plant Line Value: null
  misc_feature: MA Experiment ID: 20000070 Result: Down-regulated in Transcription
  misc_feature: MA Experiment 20000070 PARAMETER Experiment Name: At_100uM_ABA_Mutants_cDNA_P Parameter: Plant Line Value: CS24
  misc_feature: MA Experiment 20000070 PARAMETER Experiment Name: At_100uM_ABA_Mutants_cDNA_P Parameter: Timepoint (hr) Value: 6
  misc_feature: MA Experiment 20000070 PARAMETER Experiment Name: At_100uM_ABA_Mutants_cDNA_P Parameter: Tissue Value: Aerial
  misc_feature: MA Experiment 20000070 PARAMETER Experiment Name: At_100uM_ABA_Mutants_cDNA_P Parameter: Treatment Value: 100uM ABA vs. No Treatment
  misc_feature: MA Experiment ID: 20000180 Result: Up-regulated in Transcription
  misc_feature: MA Experiment 20000180 PARAMETER Experiment Name: At_Germinating_Seeds_P Parameter: Age (hr) Value: 24 vs. 0
  misc_feature: MA Experiment 20000180 PARAMETER Experiment Name: At_Germinating_Seeds_P Parameter: Tissue Value: Germinating Seeds
  misc_feature: MA Experiment ID: 20000185 Result: Down-regulated in Transcription
  misc_feature: MA Experiment 20000185 PARAMETER Experiment Name: At_Roots__P Parameter: Age (day) Value: 7 vs. 21
  misc_feature: MA Experiment 20000185 PARAMETER Experiment Name: At_Roots__P Parameter: Organism Value: A. thaliana
  misc_feature: MA Experiment 20000185 PARAMETER Experiment Name: At_Roots__P Parameter: Tissue Value: Roots vs. Whole Plant
  misc_feature: MA Experiment ID: 20000224 Result: Up-regulated in Transcription
  misc_feature: MA Experiment ID: 20000439 Result: Down-regulated in Transcription
  misc_feature: MA Experiment 20000439 PARAMETER Experiment Name: At_Roots__P Parameter: Age (day) Value: 14 vs. 21
  misc_feature: MA Experiment 20000439 PARAMETER Experiment Name: At_Roots__P Parameter: Organism Value: A. thaliana
  misc_feature: MA Experiment 20000439 PARAMETER Experiment Name: At_Roots__P Parameter: Tissue Value: Roots vs. Whole Plant
  misc_feature: MA Experiment ID: 20001450 Result: Down-regulated in Transcription
  misc_feature: MA Experiment 20001450 PARAMETER Experiment Name: At_Far-red-induction_P Parameter: Age (day) Value: 7
  misc_feature: MA Experiment 20001450 PARAMETER Experiment Name: At_Far-red-induction_P Parameter: Light Value: Far-red vs. White
  misc_feature: MA Experiment 20001450 PARAMETER Experiment Name: At_Far-red-induction_P Parameter: Organism Value: A. thaliana
  misc_feature: MA Experiment 20001450 PARAMETER Experiment Name: At_Far-red-induction_P Parameter: Plant Line Value: Columbia
  misc_feature: MA Experiment 20001450 PARAMETER Experiment Name: At_Far-red-induction_P Parameter: Timepoint (hr) Value: 8
  misc_feature: MA Experiment 20001450 PARAMETER Experiment Name: At_Far-red-induction_P Parameter: Tissue Value: Whole Plant
atcgtcatctgtggaacggataggacgaaggaaaaagaagaagagtgaaagttgcagagcgagaaaaaatggcaaccatgtctgctcttcagagctcttttacttctctttctctatctcccagctcttccttcctcggccagcgtttaatttccccgatttccctctccgtcacttctccggtcaagcccgctgagaacccatgtcttgttcttgcaaagctcaagcgttgggaacgaaaagaatgcaaaccaaacagtcttccgattctccacaaaatgcatgtcaagtttggagatacagtcaaagtaatatctggacgcgacaagggtaaaatcggagaggttactaagattttcactcacaacagtaccattgtgatcaaagatgtgaacctcaaaacaaaacacatgaagagccgagaagagggagagcctggtcaaattgtcaagatagaagcacctatccacagctcaaatgtgatgttgtattcaaaagaaaaagacgtagtaagccgggtgggtcacaaggtacttgaagatggacagaaggtaagatatctgatcaaaacaggggaactcatcgacaccattgagaagtggaagctacttaaggaggctaaggataaggaaaccacccaagttgcagttacctccgcatcttagcgtctcatttctttcttcttcagtgcacttttgatataatagacctatgcattggatggatgtattgaatcccttttaaggtaaattataatatttctgct

SEQ ID NO: 99315 - protein, 198 aa, Arabidopsis thaliana; identical to SEQ ID NO: 20975
  peptide (1)..(198): Ceres Seq. ID no. 13602651
  misc_feature (73)..(106): Pfam Name: KOW motif Pfam Description: KOW motif
  misc_feature (1)..(198): Homolog of NCBI NO: 30696483 NR Description: 50S ribosomal protein L24, chloroplast precursor [Arabidopsis thaliana] >gi|27735245|sp|P92959|RK24_ARATH 50S protein L24, chloroplast precursor >gi|9758952|dbj|BAB09339.1|
  misc_feature (1)..(198): Homolog of NCBI NO: 1694974 NR Description: plastid ribosomal protein [Arabidopsis thaliana]
  misc_feature (4)..(195): Homolog of NCBI NO: 132819 NR Description: 50S RIBOSOMAL PROTEIN L24, CHLOROPLAST PRECURSOR
  misc_feature (4)..(198): Homolog of NCBI NO: 400989 NR Description: 50S RIBOSOMAL PROTEIN L24, CHLOROPLAST PRECURSOR
  misc_feature (1)..(196): Homolog of NCBI NO: 132821 NR Description: 50S RIBOSOMAL PROTEIN L24, CHLOROPLAST PRECURSOR
  misc_feature (1)..(103): Homolog of NCBI NO: 30696487 NR Description: 50S ribosomal protein L24, chloroplast precursor
  misc_feature (89)..(198): Homolog of NCBI NO: 30696487 NR Description: 50S ribosomal protein L24, chloroplast precursor
  misc_feature (61)..(173): Homolog of NCBI NO: 22297636 NR Description: 50S ribosomal protein L24 [Thermosynechococcus BP- 1] >gi|22293813|dbj|BAC07645.1| 50S ribosomal protein L24
  misc_feature (66)..(173): Homolog of NCBI NO: 23042779 NR Description: hypothetical protein [Trichodesmium erythraeum
  misc_feature (61)..(173): Homolog of NCBI NO: 16329930 NR Description: 50S ribosomal protein L24 [Synechocystis sp. PCC

SEQ ID NO: 99316 - protein, 195 aa, Arabidopsis thaliana; identical to SEQ ID NO: 20976
  peptide (1)..(195): Ceres Seq. ID no. 13602652
  misc_feature (70)..(103): Pfam Name: KOW motif Pfam Description: KOW motif
  misc_feature (1)..(195): Homolog of NCBI NO: 30696483 NR Description: 50S ribosomal protein L24, chloroplast precursor [Arabidopsis thaliana] >gi|27735245|sp|P92959|RK24_ARATH 50S protein L24, chloroplast precursor >gi|9758952|dbj|BAB09339.1|
  misc_feature (1)..(195): Homolog of NCBI NO: 1694974 NR Description: plastid ribosomal protein [Arabidopsis thaliana]
  misc_feature (1)..(192): Homolog of NCBI NO: 132819 NR Description: 50S RIBOSOMAL PROTEIN L24, CHLOROPLAST PRECURSOR
  misc_feature (1)..(195): Homolog of NCBI NO: 400989 NR Description: 50S RIBOSOMAL PROTEIN L24, CHLOROPLAST PRECURSOR
  misc_feature (1)..(193): Homolog of NCBI NO: 132821 NR Description: 50S RIBOSOMAL PROTEIN L24, CHLOROPLAST PRECURSOR
  misc_feature (1)..(100): Homolog of NCBI NO: 30696487 NR Description: 50S ribosomal protein L24, chloroplast precursor
  misc_feature (86)..(195): Homolog of NCBI NO: 30696487 NR Description: 50S ribosomal protein L24, chloroplast precursor
  misc_feature (58)..(170): Homolog of NCBI NO: 22297636 NR Description: 50S ribosomal protein L24 [Thermosynechococcus BP- 1] >gi|22293813|dbj|BAC07645.1| 50S ribosomal protein L24
  misc_feature (63)..(170): Homolog of NCBI NO: 23042779 NR Description: hypothetical protein [Trichodesmium erythraeum
  misc_feature (58)..(170): Homolog of NCBI NO: 16329930 NR Description: 50S ribosomal protein L24 [Synechocystis sp. PCC

SEQ ID NO: 99317 - protein, 128 aa, Arabidopsis thaliana; identical to SEQ ID NO: 20977
  peptide (1)..(128): Ceres Seq. ID no. 13602653
  misc_feature (3)..(36): Pfam Name: KOW motif Pfam Description: KOW motif
  misc_feature (1)..(128): Homolog of NCBI NO: 30696483 NR Description: 50S ribosomal protein L24, chloroplast precursor [Arabidopsis thaliana] >gi|27735245|sp|P92959|RK24_ARATH 50S protein L24, chloroplast precursor >gi|9758952|dbj|BAB09339.1|
  misc_feature (1)..(128): Homolog of NCBI NO: 1694974 NR Description: plastid ribosomal protein [Arabidopsis thaliana]
  misc_feature (1)..(125): Homolog of NCBI NO: 132819 NR Description: 50S RIBOSOMAL PROTEIN L24, CHLOROPLAST PRECURSOR
  misc_feature (1)..(128): Homolog of NCBI NO: 400989 NR Description: 50S RIBOSOMAL PROTEIN L24, CHLOROPLAST PRECURSOR
  misc_feature (1)..(126): Homolog of NCBI NO: 132821 NR Description: 50S RIBOSOMAL PROTEIN L24, CHLOROPLAST PRECURSOR
  misc_feature (1)..(33): Homolog of NCBI NO: 30696487 NR Description: 50S ribosomal protein L24, chloroplast precursor
  misc_feature (19)..(128): Homolog of NCBI NO: 30696487 NR Description: 50S ribosomal protein L24, chloroplast precursor
  misc_feature (1)..(103): Homolog of NCBI NO: 22297636 NR Description: 50S ribosomal protein L24 [Thermosynechococcus BP- 1] >gi|22293813|dbj|BAC07645.1| 50S ribosomal protein L24
  misc_feature (1)..(103): Homolog of NCBI NO: 23042779 NR Description: hypothetical protein [Trichodesmium erythraeum
  misc_feature (1)..(103): Homolog of NCBI NO: 16329930 NR Description: 50S ribosomal protein L24 [Synechocystis sp. PCC

SEQ ID NO: 99318 - DNA, 790 bp, Arabidopsis thaliana
  misc_feature (1)..(790): Ceres Seq. ID no. 13602654
  misc_feature: MA Experiment ID: 108434 Result: Down-regulated in Transcription
  misc_feature: MA Experiment 108434 PARAMETER Experiment Name: At_Root_Tips_cDNA_P Parameter: Tissue Value: Root Tips
  misc_feature: MA Experiment ID: 108462 Result: Up-regulated in Transcription
  misc_feature: MA Experiment 108462 PARAMETER Experiment Name: At_Germinating_Seeds_cDNA_P Parameter: Age (day) Value: 2 vs. 0
  misc_feature: MA Experiment 108462 PARAMETER Experiment Name: At_Germinating_Seeds_cDNA_P Parameter: Tissue Value: Germinating Seeds
  misc_feature: MA Experiment ID: 108463 Result: Up-regulated in Transcription
  misc_feature: MA Experiment 108463 PARAMETER Experiment Name: At_Germinating_Seeds_cDNA_P Parameter: Age (day) Value: 3 vs. 0
  misc_feature: MA Experiment 108463 PARAMETER Experiment Name: At_Germinating_Seeds_cDNA_P Parameter: Tissue Value: Germinating Seeds
  misc_feature: MA Experiment ID: 108605 Result: Down-regulated in Transcription
  misc_feature: MA Experiment 108605 PARAMETER Experiment Name: At_100uM_ABA_cDNA_P Parameter: Timepoint (hr) Value: 6
  misc_feature: MA Experiment 108605 PARAMETER Experiment Name: At_100uM_ABA_cDNA_P Parameter: Tissue Value: Aerial
  misc_feature: MA Experiment 108605 PARAMETER Experiment Name: At_100uM_ABA_cDNA_P Parameter: Treatment Value: 100uM ABA vs. No Treatment
  misc_feature: MA Experiment ID: 20000180 Result: Up-regulated in Transcription
  misc_feature: MA Experiment 20000180 PARAMETER Experiment Name: At_Germinating_Seeds_P Parameter: Age (hr) Value: 24 vs. 0
  misc_feature: MA Experiment 20000180 PARAMETER Experiment Name: At_Germinating_Seeds_P Parameter: Tissue Value: Germinating Seeds
  misc_feature: MA Experiment ID: 20000227 Result: Down-regulated in Transcription
  misc_feature: MA Experiment 20000227 PARAMETER Experiment Name: At_Root-Tips-vs-Tops_P Parameter: Tissue Value: Root Tips vs. Root Tops
  misc_feature: MA Experiment ID: 20000794 Result: Up-regulated in Transcription
  misc_feature: MA Experiment 20000794 PARAMETER Experiment Name: At_Petals_P Parameter: Age (day) Value: 23-25 days
  misc_feature: MA Experiment 20000794 PARAMETER Experiment Name: At_Petals_P Parameter: Plant Line Value: WS
  misc_feature: MA Experiment 20000794 PARAMETER Experiment Name: At_Petals_P Parameter: Tissue Value: Petals vs. Whole plant
  misc_feature: MA Experiment ID: 20001247 Result: Down-regulated in Transcription
  misc_feature: MA Experiment 20001247 PARAMETER Experiment Name: At_Far-red-induction_P Parameter: Age (day) Value: 7
  misc_feature: MA Experiment 20001247 PARAMETER Experiment Name: At_Far-red-induction_P Parameter: Light Value: Far-red vs. White
  misc_feature: MA Experiment 20001247 PARAMETER Experiment Name: At_Far-red-induction_P Parameter: Organism Value: A. thaliana
  misc_feature: MA Experiment 20001247 PARAMETER Experiment Name: At_Far-red-induction_P Parameter: Plant Line Value: Columbia
  misc_feature: MA Experiment 20001247 PARAMETER Experiment Name: At_Far-red-induction_P Parameter: Timepoint (hr) Value: 1
  misc_feature: MA Experiment 20001247 PARAMETER Experiment Name: At_Far-red-induction_P Parameter: Tissue Value: Whole Plant
  misc_feature: MA Experiment ID: 20001459 Result: Up-regulated in Transcription
  misc_feature: MA Experiment 20001459 PARAMETER Experiment Name: At_50mM_NH4NO3_L-to-H_P Parameter: Age (day) Value: Undefined
  misc_feature: MA Experiment 20001459 PARAMETER Experiment Name: At_50mM_NH4NO3_L-to-H_P Parameter: Organism Value: Undefined
  misc_feature: MA Experiment 20001459 PARAMETER Experiment Name: At_50mM_NH4NO3_L-to-H_P Parameter: Plant Line Value: Undefined
  misc_feature: MA Experiment 20001459 PARAMETER Experiment Name: At_50mM_NH4NO3_L-to-H_P Parameter: Timepoint (hr) Value: 4
  misc_feature: MA Experiment 20001459 PARAMETER Experiment Name: At_50mM_NH4NO3_L-to-H_P Parameter: Tissue Value: Siliques
  misc_feature: MA Experiment 20001459 PARAMETER Experiment Name: At_50mM_NH4NO3_L-to-H_P Parameter: Treatment Value: 50mM NH4NO3 vs. 100mM Manitol
  misc_feature: MA Experiment ID: 20001911 Result: Up-regulated in Transcription
  misc_feature: MA Experiment 20001911 PARAMETER Experiment Name: At_Drought_Reproduction_P Parameter: Age (day) Value: 40
  misc_feature: MA Experiment 20001911 PARAMETER Experiment Name: At_Drought_Reproduction_P Parameter: Organism Value: A. thaliana
  misc_feature: MA Experiment 20001911 PARAMETER Experiment Name: At_Drought_Reproduction_P Parameter: Plant Line Value: WS
  misc_feature: MA Experiment 20001911 PARAMETER Experiment Name: At_Drought_Reproduction_P Parameter: Timepoint (day) Value: 10
  misc_feature: MA Experiment 20001911 PARAMETER Experiment Name: At_Drought_Reproduction_P Parameter: Tissue Value: Flowers
  misc_feature: MA Experiment 20001911 PARAMETER Experiment Name: At_Drought_Reproduction_P Parameter: Treatment Value: Drought vs. No Drought
acacaatcaaccactttccttttttcattcgtctcaatttctctcatgacgagtagtagtggaagcctcaaactagagatccacactgatgacaagacgccgggaaagtggagcgtaccgctcggcgatgatgttttccgaaggttcttgagcgggggaggaggctcggagaaggctgtgttcggtgaggggtctctttttagcccgtttttgttcgggaagtactttgatccgtcagacgcctttccgttgtgggaatttgaagctgaggttttgctggcgagccttaggagcttaggacagtgtagagtcgattggtctcagacggatcaagcttatgtccttaaatccgatatccccgtggtggggaaaaataacgtgcaggtgtacgtggacattaacggaagagtgatggagattagtggccaatggaacagcaacaagaaagcggcgaccaacagtgactggagaagcggccggtggtgggaacatggctatgtccgccgtctcgagcttcctagcgatgccgacgccaaatactctgaagctttcctctctaacaacgacgattactctttcttagagatccgaatccctaagataaattctaagaacaagttttaatctgatcatgtcgccttgacgagttttaactttagattcttttcgtaattttgttttctttagttaactattattatagatatgaaattctgtggtagagacacaatggatgaatgatatgttatatatacatactataaaatatatcaaatataacatatcgatt

SEQ ID NO: 99319 - protein, 207 aa, Arabidopsis thaliana
  peptide (1)..(207): Ceres Seq. ID no. 13602655
  misc_feature (16)..(207): Homolog of NCBI NO: 18423654 NR Description: expressed protein [Arabidopsis thaliana]
  misc_feature (59)..(200): Homolog of NCBI NO: 16930753 NR Description: small heat shock protein [Retama raetam]
  misc_feature (61)..(204): Homolog of NCBI NO: 7441323 NR Description: heat shock protein 18p - common tobacco
  misc_feature (59)..(204): Homolog of NCBI NO: 15220832 NR Description: 17.6 kDa heat shock protein (AA 1-156) thaliana] >gi|21264442|sp|P13853|HS12_ARATH 17.6 kDa class I heat
  misc_feature (61)..(204): Homolog of NCBI NO: 71495 NR Description: heat shock protein (clone DChsp17.7) - carrot
  misc_feature (65)..(204): Homolog of NCBI NO: 11276924 NR Description: heat-shock protein, low molecular weight
  misc_feature (59)..(204): Homolog of NCBI NO: 18073561 NR Description: 20.5 kDa heat-shock protein [Helianthus annuus]
  misc_feature (62)..(201): Homolog of NCBI NO: 4185754 NR Description: cytosolic I small heat shock protein HSP17.2IB
  misc_feature (61)..(204): Homolog of NCBI NO: 123548 NR Description: 17.8 KD CLASS I HEAT SHOCK PROTEIN (CLONE
  misc_feature (65)..(200): Homolog of NCBI NO: 462322 NR Description: 18.3 KD CLASS I HEAT SHOCK PROTEIN (HSP 18.3)
TQSTTFLFSFVSISLMTSSSGSLKLEIHTDDKTPGKWSVPLGDDVFRRFLSGGGGSEKAVFGEGSLFSPFLFGKYFDPSDAFPLWEFEAEVLLASLRSLGQCRVDWSQTDQAYVLKSDIPVVGKNNVQVYVDINGRVMEISGQWNSNKKAATNSDWRSGRWWEHGYVRRLELPSDADAKYSEAFLSNNDDYSFLEIRIPKINSKNKF

SEQ ID NO: 99320 - protein, 192 aa, Arabidopsis thaliana
  peptide (1)..(192): Ceres Seq. ID no. 13602656
  misc_feature (1)..(192): Homolog of NCBI NO: 18423654 NR Description: expressed protein [Arabidopsis thaliana]
  misc_feature (44)..(185): Homolog of NCBI NO: 16930753 NR Description: small heat shock protein [Retama raetam]
  misc_feature (46)..(189): Homolog of NCBI NO: 7441323 NR Description: heat shock protein 18p - common tobacco
  misc_feature (44)..(189): Homolog of NCBI NO: 15220832 NR Description: 17.6 kDa heat shock protein (AA 1-156) thaliana] >gi|21264442|sp|P13853|HS12_ARATH 17.6 kDa class I heat
  misc_feature (46)..(189): Homolog of NCBI NO: 71495 NR Description: heat shock protein (clone DChsp17.7) - carrot
  misc_feature (50)..(189): Homolog of NCBI NO: 11276924 NR Description: heat-shock protein, low molecular weight
  misc_feature (44)..(189): Homolog of NCBI NO: 18073561 NR Description: 20.5 kDa heat-shock protein [Helianthus annuus]
  misc_feature (47)..(186): Homolog of NCBI NO: 4185754 NR Description: cytosolic I small heat shock protein HSP17.2IB
  misc_feature (46)..(189): Homolog of NCBI NO: 123548 NR Description: 17.8 KD CLASS I HEAT SHOCK PROTEIN (CLONE
  misc_feature (50)..(185): Homolog of NCBI NO: 462322 NR Description: 18.3 KD CLASS I HEAT SHOCK PROTEIN (HSP 18.3)
MTSSSGSLKLEIHTDDKTPGKWSVPLGDDVFRRFLSGGGGSEKAVFGEGSLFSPFLFGKYFDPSDAFPLWEFEAEVLLASLRSLGQCRVDWSQTDQAYVLKSDIPVVGKNNVQVYVDINGRVMEISGQWNSNKKAATNSDWRSGRWWEHGYVRRLELPSDADAKYSEAFLSNNDDYSFLEIRIPKINSKNKF

SEQ ID NO: 99321 - DNA, 1401 bp, Arabidopsis thaliana
  misc_feature (1)..(1401): Ceres Seq. ID no. 13602669
  misc_feature: MA Experiment ID: 108434 Result: Up-regulated in Transcription
  misc_feature: MA Experiment 108434 PARAMETER Experiment Name: At_Root_Tips_cDNA_P Parameter: Tissue Value: Root Tips
  misc_feature: MA Experiment ID: 108461 Result: Down-regulated in Transcription
  misc_feature: MA Experiment 108461 PARAMETER Experiment Name: At_Germinating_Seeds_cDNA_P Parameter: Age (day) Value: 1 vs. 0
  misc_feature: MA Experiment 108461 PARAMETER Experiment Name: At_Germinating_Seeds_cDNA_P Parameter: Tissue Value: Germinating Seeds
  misc_feature: MA Experiment ID: 108462 Result: Down-regulated in Transcription
  misc_feature: MA Experiment 108462 PARAMETER Experiment Name: At_Germinating_Seeds_cDNA_P Parameter: Age (day) Value: 2 vs. 0
  misc_feature: MA Experiment 108462 PARAMETER Experiment Name: At_Germinating_Seeds_cDNA_P Parameter: Tissue Value: Germinating Seeds
  misc_feature: MA Experiment ID: 108463 Result: Down-regulated in Transcription
  misc_feature: MA Experiment 108463 PARAMETER Experiment Name: At_Germinating_Seeds_cDNA_P Parameter: Age (day) Value: 3 vs. 0
  misc_feature: MA Experiment 108463 PARAMETER Experiment Name: At_Germinating_Seeds_cDNA_P Parameter: Tissue Value: Germinating Seeds
  misc_feature: MA Experiment ID: 108464 Result: Down-regulated in Transcription
  misc_feature: MA Experiment 108464 PARAMETER Experiment Name: At_Germinating_Seeds_cDNA_P Parameter: Age (day) Value: 4 vs. 0
  misc_feature: MA Experiment 108464 PARAMETER Experiment Name: At_Germinating_Seeds_cDNA_P Parameter: Tissue Value: Germinating Seeds
  misc_feature: MA Experiment ID: 108595 Result: Down-regulated in Transcription
  misc_feature: MA Experiment 108595 PARAMETER Experiment Name: At_Ler-pi_Ovule_cDNA_P Parameter: Plant Line Value: null
  misc_feature: MA Experiment ID: 20001451 Result: Down-regulated in Transcription
  misc_feature: MA Experiment 20001451 PARAMETER Experiment Name: At_Far-red-induction_P Parameter: Age (day) Value: 7
  misc_feature: MA Experiment 20001451 PARAMETER Experiment Name: At_Far-red-induction_P Parameter: Light Value: Far-red vs. White
  misc_feature: MA Experiment 20001451 PARAMETER Experiment Name: At_Far-red-induction_P Parameter: Organism Value: A. thaliana
  misc_feature: MA Experiment 20001451 PARAMETER Experiment Name: At_Far-red-induction_P Parameter: Plant Line Value: Columbia
  misc_feature: MA Experiment 20001451 PARAMETER Experiment Name: At_Far-red-induction_P Parameter: Timepoint (hr) Value: 24
  misc_feature: MA Experiment 20001451 PARAMETER Experiment Name: At_Far-red-induction_P Parameter: Tissue Value: Whole Plant
  misc_feature: MA Experiment ID: 20001558 Result: Up-regulated in Transcription
  misc_feature: MA Experiment 20001558 PARAMETER Experiment Name: At_Drought_Soil_Dry_P Parameter: Age (day) Value: 27
  misc_feature: MA Experiment 20001558 PARAMETER Experiment Name: At_Drought_Soil_Dry_P Parameter: Organism Value: A. thaliana
  misc_feature: MA Experiment 20001558 PARAMETER Experiment Name: At_Drought_Soil_Dry_P Parameter: Plant Line Value: WS
  misc_feature: MA Experiment 20001558 PARAMETER Experiment Name: At_Drought_Soil_Dry_P Parameter: Post Timepoint (hr) Value: 6
  misc_feature: MA Experiment 20001558 PARAMETER Experiment Name: At_Drought_Soil_Dry_P Parameter: Post-Treatment Value: Re-Water vs. No Drought
  misc_feature: MA Experiment 20001558 PARAMETER Experiment Name: At_Drought_Soil_Dry_P Parameter: Timepoint (day) Value: 13
  misc_feature: MA Experiment 20001558 PARAMETER Experiment Name: At_Drought_Soil_Dry_P Parameter: Treatment Value: Drought vs. No Drought
aaagtttaggttttggtttttttgtccgtcgtagtgatgcagcaaccaccgtcaaacgccgccggagctggacagataccatcaggacaacagcatttgtggatgatgatgcaacagcagcagcagcagcagcagatgcagttgtctgcggcgccactaggtcaacatcagtacggtattggatctcagaatccaggatccgctagcgatgttaagtcgttgtggatcggagacttgcagcaatggatggacgagaactacatcatgagcgtctttgctcagtctggcgaggctacatcagctaaagtcattcgtaataagctgacgggacaatctgaaggttatggattcattgagttcgtcagccactctgtagcagagcgggttttgcagacttacaatggtgctcccatgccgagcactgaacagacgtttaggctcaactgggctcaggctggggctggagagaaacgattccagactgaagggcctgaccataccattttcgtaggtgacttggcacctgaggtgactgactatatgctctcggacacattcaagaatgtgtatgggtctgtcaaaggggctaaagttgtgcttgacaggaccactggaaggtccaaggggtatgggtttgttaggtttgcggatgaaaatgagcagatgcgtgccatgactgaaatgaatggtcaatactgctcgacaaggcctatgcgtattggtccggctgccaataagaatgctcttccgatgcaaccagctatgtatcaaaacactcaaggagcaaatgctggagataatgatcctaataacacaacaatttttgttggaggtctggatgctaatgttacagacgatgaattaaagtcaatttttggtcaatttggtgaacttcttcatgtgaaaatacctccaggaaaacgttgtggattcgttcaatatgccaacaaggcgtctgcagagcatgcactttcggtgctgaatggaacacaattaggtggacaaagcatccgtctttcgtggggacgtagtccaaacaagcagtctgatcaagcgcaatggaacggtggtggatactatggataccctccacagccacagggcggctatggttatgcagctcaaccaccaactcaagaccctaatgcgtactatggtggttacactggctatggcaactatcagcagcaacgtcagtgaaacatcaacatcagctatttctaccaatgtcttggaacaaaagatgagcgattgtgtcttattaggacttctagattaaaagtgctctctttttgtttgagttttattttgcaaatgagtcgatcttgaatttgctatgaacaaagtgtttactgaatgttgaaactttattctgttgttttttaaaataaatatttatcc

SEQ ID NO: 99322 - protein, 387 aa, Arabidopsis thaliana; identical to SEQ ID NO: 39504
  peptide (1)..(387): Ceres Seq. ID no. 13602670
  misc_feature (156)..(228): Pfam Name: RNA recognition motif. (a.k.a. RRM, RBD, or RNP domain) Pfam Description: RNA recognition motif. (a.k.a. RRM, RBD, or RNP
  misc_feature (1)..(387): Homolog of NCBI NO: 9758270 NR Description: contains similarity to polyadenylate-binding
  misc_feature (1)..(387): Homolog of NCBI NO: 18423684 NR Description: RNA binding protein 45 (RBP45), putative thaliana] >gi|11762114|gb|AAG40335.1|AF324983_1 AT5g54900
  misc_feature (4)..(387): Homolog of NCBI NO: 7485342 NR Description: hypothetical protein F10M23.340 - Arabidopsis >gi|4455223|emb|CAB36546.1| putative DNA binding protein thaliana] >gi|7269553|emb|CAB79555.1| putative DNA binding
  misc_feature (4)..(384): Homolog of NCBI NO: 18416906 NR Description: RNA binding protein 45 (RBP45), putative thaliana] >gi|13878153|gb|AAK44154.1|AF370339_1 putative DNA protein [Arabidopsis thaliana] >gi|15450814|gb|AAK96678.1|
  misc_feature (15)..(387): Homolog of NCBI NO: 9663767 NR Description: RNA Binding Protein 45 [Nicotiana plumbaginifolia]
  misc_feature (54)..(384): Homolog of NCBI NO: 34896988 NR Description: putative RNA binding protein [Oryza sativa]
  misc_feature (1)..(387): Homolog of NCBI NO: 15221071 NR Description: RNA binding protein 45 (RBP45), putative
  misc_feature (1)..(387): Homolog of NCBI NO: 21592583 NR Description: putative DNA binding protein [Arabidopsis
  misc_feature (12)..(384): Homolog of NCBI NO: 40253807 NR Description: putative RNA Binding Protein 45 [Oryza sativa
  misc_feature (2)..(387): Homolog of NCBI NO: 34395214 NR Description: putative RNA Binding Protein [Oryza sativa

SEQ ID NO: 99323 - protein, 365 aa, Arabidopsis thaliana; identical to SEQ ID NO: 39505
  peptide (1)..(365): Ceres Seq. ID no. 13602671
  misc_feature (134)..(206): Pfam Name: RNA recognition motif. (a.k.a. RRM, RBD, or RNP domain) Pfam Description: RNA recognition motif. (a.k.a. RRM, RBD, or RNP
  misc_feature (1)..(365): Homolog of NCBI NO: 9758270 NR Description: contains similarity to polyadenylate-binding
  misc_feature (1)..(365): Homolog of NCBI NO: 18423684 NR Description: RNA binding protein 45 (RBP45), putative thaliana] >gi|11762114|gb|AAG40335.1|AF324983_1 AT5g54900
  misc_feature (1)..(365): Homolog of NCBI NO: 7485342 NR Description: hypothetical protein F10M23.340 - Arabidopsis >gi|4455223|emb|CAB36546.1| putative DNA binding protein thaliana] >gi|7269553|emb|CAB79555.1| putative DNA binding
  misc_feature (1)..(362): Homolog of NCBI NO: 18416906 NR Description: RNA binding protein 45 (RBP45), putative thaliana] >gi|13878153|gb|AAK44154.1|AF370339_1 putative DNA protein [Arabidopsis thaliana] >gi|15450814|gb|AAK96678.1|
  misc_feature (1)..(365): Homolog of NCBI NO: 9663767 NR Description: RNA Binding Protein 45 [Nicotiana plumbaginifolia]
  misc_feature (32)..(362): Homolog of NCBI NO: 34896988 NR Description: putative RNA binding protein [Oryza sativa]
  misc_feature (1)..(365): Homolog of NCBI NO: 15221071 NR Description: RNA binding protein 45 (RBP45), putative
  misc_feature (1)..(365): Homolog of NCBI NO: 21592583 NR Description: putative DNA binding protein [Arabidopsis
  misc_feature (1)..(362): Homolog of NCBI NO: 40253807 NR Description: putative RNA Binding Protein 45 [Oryza sativa
  misc_feature (1)..(365): Homolog of NCBI NO: 34395214 NR Description: putative RNA Binding Protein [Oryza sativa

SEQ ID NO: 99324 - protein, 364 aa, Arabidopsis thaliana; identical to SEQ ID NO: 39506
  peptide (1)..(364): Ceres Seq. ID no. 13602672
  misc_feature (133)..(205): Pfam Name: RNA recognition motif. (a.k.a. RRM, RBD, or RNP domain) Pfam Description: RNA recognition motif. (a.k.a. RRM, RBD, or RNP
  misc_feature (1)..(364): Homolog of NCBI NO: 9758270 NR Description: contains similarity to polyadenylate-binding
  misc_feature (1)..(364): Homolog of NCBI NO: 18423684 NR Description: RNA binding protein 45 (RBP45), putative thaliana] >gi|11762114|gb|AAG40335.1|AF324983_1 AT5g54900
  misc_feature (1)..(364): Homolog of NCBI NO: 7485342 NR Description: hypothetical protein F10M23.340 - Arabidopsis >gi|4455223|emb|CAB36546.1| putative DNA binding protein thaliana] >gi|7269553|emb|CAB79555.1| putative DNA binding
  misc_feature (1)..(361): Homolog of NCBI NO: 18416906 NR Description: RNA binding protein 45 (RBP45), putative thaliana] >gi|13878153|gb|AAK44154.1|AF370339_1 putative DNA protein [Arabidopsis thaliana] >gi|15450814|gb|AAK96678.1|
  misc_feature (1)..(364): Homolog of NCBI NO: 9663767 NR Description: RNA Binding Protein 45 [Nicotiana plumbaginifolia]
  misc_feature (31)..(361): Homolog of NCBI NO: 34896988 NR Description: putative RNA binding protein [Oryza sativa]
  misc_feature (1)..(364): Homolog of NCBI NO: 15221071 NR Description: RNA binding protein 45 (RBP45), putative
  misc_feature (1)..(364): Homolog of NCBI NO: 21592583 NR Description: putative DNA binding protein [Arabidopsis
  misc_feature (1)..(361): Homolog of NCBI NO: 40253807 NR Description: putative RNA Binding Protein 45 [Oryza sativa
  misc_feature (1)..(364): Homolog of NCBI NO: 34395214 NR Description: putative RNA Binding Protein [Oryza sativa

SEQ ID NO: 99325 - DNA, 1372 bp, Arabidopsis thaliana
  misc_feature (1)..(1372): Ceres Seq. ID no. 13602673
  misc_feature: MA Experiment ID: 108462 Result: Up-regulated in Transcription
  misc_feature: MA Experiment 108462 PARAMETER Experiment Name: At_Germinating_Seeds_cDNA_P Parameter: Age (day) Value: 2 vs. 0
  misc_feature: MA Experiment 108462 PARAMETER Experiment Name: At_Germinating_Seeds_cDNA_P Parameter: Tissue Value: Germinating Seeds
  misc_feature: MA Experiment ID: 108464 Result: Up-regulated in Transcription
  misc_feature: MA Experiment 108464 PARAMETER Experiment Name: At_Germinating_Seeds_cDNA_P Parameter: Age (day) Value: 4 vs. 0
  misc_feature: MA Experiment 108464 PARAMETER Experiment Name: At_Germinating_Seeds_cDNA_P Parameter: Tissue Value: Germinating Seeds
  misc_feature: MA Experiment ID: 20000265 Result: Up-regulated in Transcription
  misc_feature: MA Experiment 20000265 PARAMETER Experiment Name: At_Open_Flower_P Parameter: Age (day) Value: 21
  misc_feature: MA Experiment 20000265 PARAMETER Experiment Name: At_Open_Flower_P Parameter: Plant Line Value: WS
  misc_feature: MA Experiment 20000265 PARAMETER Experiment Name: At_Open_Flower_P Parameter: Tissue Value: Closed Flower vs. Whole Plant
aggaatcacagtgatgatcaagagtttatctctggcttctgctcgcatcttcttctctagaacctctccatcttttcttattcccttctcaaagctctctgtatctcatcgtcggaaattctcagtaatggccagtggaagcgacgagttcgtgaaaggaaatgtttatccaaatggcgttgctctcattactcttgatcgacctaaagctctcaacgccatgaatctagaaatggatttgaagtacaaaagcttgcttgatgaatgggaatatgatcctggagtcaaatgtgttgtcgtcgaaggaagcacatctcgggccttttgtgcaggaatggatattaaaggagttgttgcagagatcctaatggacaaaaatacgtctcttgtgcaaaaggtatttacagctgagtatagcctgatatgcaagattgctggatacagaaaaccatatatctctttaatggatggcataacaatgggatttggtcttggtctttctggacatggacgctaccgagtgataacagagaggacggtcctcgcaatgccagaaaatggaatcggcttgtttccagatgttggattttcatatattgcagctcatagccctggcgaaggatctgttggtgcttacctaggtatgactgggagaaggatttccacaccttcagatgcactgtttgtgggtcttgggacacattatgtaccatctggaaagctaggttcactcagagaagccattttgtcagctgacctttccaaggatccccaacaacacatccaagcaactttatcaaattacagcagtgatcctgaaactgagtcccacctccaaatgcttttgcctcagatagaatcagcttttagtgtaagtaagtctgttaaggaaacaatagaagagctgaaaaagttccagcagagcagtgaggcttcagttgcagaatgggctaatgaagcagtccaaggcattgaaaaaggggcacctttttctctttacctaacacacaagtacttctccaaagttgcttgtgccaagggtaaaaccaacaacgccatggcaacacttaacggtgtgatgataactgagtaccgcattgctctaagatctgcattgcgcagtgatttcactgaaggtgttagagcagtcttgactgacaaggaccagaatccgaaatggaaaccagcgagcttagacgaagtagatgaaaccgaagtggacgcgctctttatgccattaagtcctgaatttgaagagctaaacgtatgaaccaaacaacagagatattgcttagatcatgaattggtgattattgtgttgcagcttttgaacatatcccatatatttatcaaattttcaagtcgtagattg

SEQ ID NO: 99326 - protein, 422 aa, Arabidopsis thaliana
  peptide (1)..(422): Ceres Seq. ID no. 13602674
  misc_feature (61)..(237): Pfam Name: Enoyl-CoA hydratase/isomerase family Pfam Description: Enoyl-CoA hydratase/isomerase family
  misc_feature (5)..(422): Homolog of NCBI NO: 11994698 NR Description: 3-hydroxyisobutyryl-coenzyme A hydrolase-like
  misc_feature (43)..(422): Homolog of NCBI NO: 15230101 NR Description: 3-hydroxyisobutyryl-coenzyme A hydrolase
  misc_feature (45)..(422): Homolog of NCBI NO: 15235689 NR Description: 3-hydroxyisobutyryl-coenzyme A hydrolase
  misc_feature (63)..(337): Homolog of NCBI NO: 23013936 NR Description: hypothetical protein [Magnetospirillum
  misc_feature (315)..(416): Homolog of NCBI NO: 23013936 NR Description: hypothetical protein [Magnetospirillum
  misc_feature (63)..(272): Homolog of NCBI NO: 23016278 NR Description: hypothetical protein [Magnetospirillum
  misc_feature (352)..(396): Homolog of NCBI NO: 23016278 NR Description: hypothetical protein [Magnetospirillum
  misc_feature (43)..(410): Homolog of NCBI NO: 15239206 NR Description: 3-hydroxyisobutyryl-coenzyme A hydrolase hydrolase) (CHY1) [Arabidopsis thaliana]
  misc_feature (58)..(269): Homolog of NCBI NO: 15224539 NR Description: 3-hydroxyisobutyryl-coenzyme A hydrolase
  misc_feature (296)..(420): Homolog of NCBI NO: 15224539 NR Description: 3-hydroxyisobutyryl-coenzyme A hydrolase
GITVMIKSLSLASARIFFSRTSPSFLIPFSKLSVSHRRKFSVMASGSDEFVKGNVYPNGVALITLDRPKALNAMNLEMDLKYKSLLDEWEYDPGVKCVVVEGSTSRAFCAGMDIKGVVAEILMDKNTSLVQKVFTAEYSLICKIAGYRKPYISLMDGITMGFGLGLSGHGRYRVITERTVLAMPENGIGLFPDVGFSYIAAHSPGEGSVGAYLGMTGRRISTPSDALFVGLGTHYVPSGKLGSLREAILSADLSKDPQQHIQATLSNYSSDPETESHLQMLLPQIESAFSVSKSVKETIEELKKFQQSSEASVAEWANEAVQGIEKGAPFSLYLTHKYFSKVACAKGKTNNAMATLNGVMITEYRIALRSALRSDFTEGVRAVLTDKDQNPKWKPASLDEVDETEVDALFMPLSPEFEELNV

SEQ ID NO: 99327 - protein, 418 aa, Arabidopsis thaliana [sequence omitted]

SEQ ID NO: 99328 - protein, 380 aa, Arabidopsis thaliana
  peptide (1)..(380): Ceres Seq. ID no. 13602676
  misc_feature (19)..(195): Pfam Name: Enoyl-CoA hydratase/isomerase family Pfam Description: Enoyl-CoA hydratase/isomerase family
  misc_feature (1)..(380): Homolog of NCBI NO: 11994698 NR Description: 3-hydroxyisobutyryl-coenzyme A hydrolase-like
  misc_feature (1)..(380): Homolog of NCBI NO: 15230101 NR Description: 3-hydroxyisobutyryl-coenzyme A hydrolase
  misc_feature (3)..(380): Homolog of NCBI NO: 15235689 NR Description: 3-hydroxyisobutyryl-coenzyme A hydrolase
  misc_feature (21)..(295): Homolog of NCBI NO: 23013936 NR Description: hypothetical protein [Magnetospirillum
  misc_feature (273)..(374): Homolog of NCBI NO: 23013936 NR Description: hypothetical protein [Magnetospirillum
  misc_feature (21)..(230): Homolog of NCBI NO: 23016278 NR Description: hypothetical protein [Magnetospirillum
  misc_feature (310)..(354): Homolog of NCBI NO: 23016278 NR Description: hypothetical protein [Magnetospirillum
  misc_feature (1)..(368): Homolog of NCBI NO: 15239206 NR Description: 3-hydroxyisobutyryl-coenzyme A hydrolase hydrolase) (CHY1) [Arabidopsis thaliana]
  misc_feature (16)..(227): Homolog of NCBI NO: 15224539 NR Description: 3-hydroxyisobutyryl-coenzyme A hydrolase
  misc_feature (254)..(378): Homolog of NCBI NO: 15224539 NR Description: 3-hydroxyisobutyryl-coenzyme A hydrolase
MASGSDEFVKGNVYPNGVALITLDRPKALNAMNLEMDLKYKSLLDEWEYDPGVKCVVVEGSTSRAFCAGMDIKGVVAEILMDKNTSLVQKVFTAEYSLICKIAGYRKPYISLMDGITMGFGLGLSGHGRYRVITERTVLAMPENGIGLFPDVGFSYIAAHSPGEGSVGAYLGMTGRRISTPSDALFVGLGTHYVPSGKLGSLREAILSADLSKDPQQHIQATLSNYSSDPETESHLQMLLPQIESAFSVSKSVKETIEELKKFQQSSEASVAEWANEAVQGIEKGAPFSLYLTHKYFSKVACAKGKTNNAMATLNGVMITEYRIALRSALRSDFTEGVRAVLTDKDQNPKWKPASLDEVDETEVDALFMPLSPEFEELNV

SEQ ID NO: 99329 - DNA, 1073 bp, Arabidopsis thaliana
  misc_feature (1)..(1073): Ceres Seq. ID no. 13602677
  misc_feature: MA Experiment ID: 20000173 Result: Down-regulated in Transcription
  misc_feature: MA Experiment 20000173 PARAMETER Experiment Name: At_42deg_Heat_P Parameter: Age (day) Value: 14
  misc_feature: MA Experiment 20000173 PARAMETER Experiment Name: At_42deg_Heat_P Parameter: Organism Value: A. thaliana
  misc_feature: MA Experiment 20000173 PARAMETER Experiment Name: At_42deg_Heat_P Parameter: Plant Line Value: WS
  misc_feature: MA Experiment 20000173 PARAMETER Experiment Name: At_42deg_Heat_P Parameter: Temperature (deg C) Value: 42 vs. 22
  misc_feature: MA Experiment 20000173 PARAMETER Experiment Name: At_42deg_Heat_P Parameter: Timepoint (hr) Value: 6
  misc_feature: MA Experiment 20000173 PARAMETER Experiment Name: At_42deg_Heat_P Parameter: Tissue Value: Aerial
  misc_feature: MA Experiment ID: 20000182 Result: Up-regulated in Transcription
  misc_feature: MA Experiment 20000182 PARAMETER Experiment Name: At_2mM_SA_P Parameter: Age (day) Value: 14
  misc_feature: MA Experiment 20000182 PARAMETER Experiment Name: At_2mM_SA_P Parameter: Organism Value: A. thaliana
  misc_feature: MA Experiment 20000182 PARAMETER Experiment Name: At_2mM_SA_P Parameter: Plant Line Value: WS
  misc_feature: MA Experiment 20000182 PARAMETER Experiment Name: At_2mM_SA_P Parameter: Timepoint (hr) Value: 6
  misc_feature: MA Experiment 20000182 PARAMETER Experiment Name: At_2mM_SA_P Parameter: Tissue Value: Aerial
  misc_feature: MA Experiment 20000182 PARAMETER Experiment Name: At_2mM_SA_P Parameter: Treatment Value: 2mM SA vs. No Treatment
  misc_feature: MA Experiment ID: 20000184 Result: Down-regulated in Transcription
  misc_feature: MA Experiment 20000184 PARAMETER Experiment Name: At_Shoots__P Parameter: Age (day) Value: 7
  misc_feature: MA Experiment 20000184 PARAMETER Experiment Name: At_Shoots__P Parameter: Tissue Value: Shoots vs. Whole Plant
  misc_feature: MA Experiment ID: 20000185 Result: Down-regulated in Transcription
  misc_feature: MA Experiment 20000185 PARAMETER Experiment Name: At_Roots__P Parameter: Age (day) Value: 7 vs. 21
  misc_feature: MA Experiment 20000185 PARAMETER Experiment Name: At_Roots__P Parameter: Organism Value: A. thaliana
  misc_feature: MA Experiment 20000185 PARAMETER Experiment Name: At_Roots__P Parameter: Tissue Value: Roots vs. Whole Plant
  misc_feature: MA Experiment ID: 20000234 Result: Down-regulated in Transcription
  misc_feature: MA Experiment 20000234 PARAMETER Experiment Name: At_Siliques_P Parameter: Age (day) Value: 21
  misc_feature: MA Experiment 20000234 PARAMETER Experiment Name: At_Siliques_P Parameter: Organism Value: A. thaliana
  misc_feature: MA Experiment 20000234 PARAMETER Experiment Name: At_Siliques_P Parameter: Plant Line Value: WS
  misc_feature: MA Experiment 20000234 PARAMETER Experiment Name: At_Siliques_P Parameter: Tissue Value: Less Than 5mm Siliques vs. Whole Plant
  misc_feature: MA Experiment ID: 20000235 Result: Down-regulated in Transcription
  misc_feature: MA Experiment 20000235 PARAMETER Experiment Name: At_Siliques_P Parameter: Age (day) Value: 21
  misc_feature: MA Experiment 20000235 PARAMETER Experiment Name: At_Siliques_P Parameter: Organism Value: A. thaliana
  misc_feature: MA Experiment 20000235 PARAMETER Experiment Name: At_Siliques_P Parameter: Plant Line Value: WS
  misc_feature: MA Experiment 20000235 PARAMETER Experiment Name: At_Siliques_P Parameter: Tissue Value: 5-10mm Siliques vs. Whole Plant
  misc_feature: MA Experiment ID: 20000264 Result: Down-regulated in Transcription
  misc_feature: MA Experiment 20000264 PARAMETER Experiment Name: At_Open_Flower_P Parameter: Age (day) Value: 21
  misc_feature: MA Experiment 20000264 PARAMETER Experiment Name: At_Open_Flower_P Parameter: Plant Line Value: WS
  misc_feature: MA Experiment 20000264 PARAMETER Experiment Name: At_Open_Flower_P Parameter: Tissue Value: Open Flower vs. Whole Plant
  misc_feature: MA Experiment ID: 20000265 Result: Down-regulated in Transcription
  misc_feature: MA Experiment 20000265 PARAMETER Experiment Name: At_Open_Flower_P Parameter: Age (day) Value: 21
  misc_feature: MA Experiment 20000265 PARAMETER Experiment Name: At_Open_Flower_P Parameter: Plant Line Value: WS
  misc_feature: MA Experiment 20000265 PARAMETER Experiment Name: At_Open_Flower_P Parameter: Tissue Value: Closed Flower vs. Whole Plant
  misc_feature: MA Experiment ID: 20000267 Result: Up-regulated in Transcription
  misc_feature: MA Experiment 20000267 PARAMETER Experiment Name: At_Drought_P Parameter: Age (day) Value: 7
  misc_feature: MA Experiment 20000267 PARAMETER Experiment Name: At_Drought_P Parameter: Organism Value: A. thaliana
  misc_feature: MA Experiment 20000267 PARAMETER Experiment Name: At_Drought_P Parameter: Plant Line Value: WS
  misc_feature: MA Experiment 20000267 PARAMETER Experiment Name: At_Drought_P Parameter: Timepoint (hr) Value: 6
  misc_feature: MA Experiment 20000267 PARAMETER Experiment Name: At_Drought_P Parameter: Tissue Value: Whole Plant
  misc_feature: MA Experiment 20000267 PARAMETER Experiment Name: At_Drought_P Parameter: Treatment Value: Drought vs. No Drought
  misc_feature: MA Experiment ID: 20000286 Result: Down-regulated in Transcription
  misc_feature: MA Experiment 20000286 PARAMETER Experiment Name: At_Open_Flower_P Parameter: Age (day) Value: 21
  misc_feature: MA Experiment 20000286 PARAMETER Experiment Name: At_Open_Flower_P Parameter: Plant Line Value: WS
  misc_feature: MA Experiment 20000286 PARAMETER Experiment Name: At_Open_Flower_P Parameter: Tissue Value: Half Open vs. Whole Plant
  misc_feature: MA Experiment ID: 20000288 Result: Up-regulated in Transcription
  misc_feature: MA Experiment 20000288 PARAMETER Experiment Name: At_Drought_P Parameter: Age (day) Value: 7
  misc_feature: MA Experiment 20000288 PARAMETER Experiment Name: At_Drought_P Parameter: Organism Value: A. thaliana
  misc_feature: MA Experiment 20000288 PARAMETER Experiment Name: At_Drought_P Parameter: Plant Line Value: WS
  misc_feature: MA Experiment 20000288 PARAMETER Experiment Name: At_Drought_P Parameter: Timepoint (hr) Value: 1
  misc_feature: MA Experiment 20000288 PARAMETER Experiment Name: At_Drought_P Parameter: Tissue Value: Whole Plant
  misc_feature: MA Experiment 20000288 PARAMETER Experiment Name: At_Drought_P Parameter: Treatment Value: Drought vs. No Drought
  misc_feature: MA Experiment ID: 20000436 Result: Up-regulated in Transcription
  misc_feature: MA Experiment 20000436 PARAMETER Experiment Name: At_Drought_P Parameter: Age (day) Value: 7
  misc_feature: MA Experiment 20000436 PARAMETER Experiment Name: At_Drought_P Parameter: Organism Value: A. thaliana
  misc_feature: MA Experiment 20000436 PARAMETER Experiment Name: At_Drought_P Parameter: Plant Line Value: WS
  misc_feature: MA Experiment 20000436 PARAMETER Experiment Name: At_Drought_P Parameter: Timepoint (hr) Value: 12
  misc_feature: MA Experiment 20000436 PARAMETER Experiment Name: At_Drought_P Parameter: Tissue Value: Whole Plant
  misc_feature: MA Experiment 20000436 PARAMETER Experiment Name: At_Drought_P Parameter: Treatment Value: Drought vs. No Drought
  misc_feature: MA Experiment ID: 20000437 Result: Up-regulated in Transcription
  misc_feature: MA Experiment 20000437 PARAMETER Experiment Name: At_Drought_P Parameter: Age (day) Value: 8
  misc_feature: MA Experiment 20000437 PARAMETER Experiment Name: At_Drought_P Parameter: Organism Value: A. thaliana
  misc_feature: MA Experiment 20000437 PARAMETER Experiment Name: At_Drought_P Parameter: Plant Line Value: WS
  misc_feature: MA Experiment 20000437 PARAMETER Experiment Name: At_Drought_P Parameter: Timepoint (hr) Value: 24
  misc_feature: MA Experiment 20000437 PARAMETER Experiment Name: At_Drought_P Parameter: Tissue Value: Whole Plant
  misc_feature: MA Experiment 20000437 PARAMETER Experiment Name: At_Drought_P Parameter: Treatment Value: Drought vs. No Drought
  misc_feature: MA Experiment ID: 20000438 Result: Down-regulated in Transcription
  misc_feature: MA Experiment 20000438 PARAMETER Experiment Name: At_Shoots__P Parameter: Age (day) Value: 14
  misc_feature: MA Experiment 20000438 PARAMETER Experiment Name: At_Shoots__P Parameter: Tissue Value: Shoots vs. Whole Plant
  misc_feature: MA Experiment ID: 20000439 Result: Down-regulated in Transcription
  misc_feature: MA Experiment 20000439 PARAMETER Experiment Name: At_Roots__P Parameter: Age (day) Value: 14 vs. 21
  misc_feature: MA Experiment 20000439 PARAMETER Experiment Name: At_Roots__P Parameter: Organism Value: A. thaliana
  misc_feature: MA Experiment 20000439 PARAMETER Experiment Name: At_Roots__P Parameter: Tissue Value: Roots vs. Whole Plant
  misc_feature: MA Experiment ID: 20000441 Result: Down-regulated in Transcription
  misc_feature: MA Experiment 20000441 PARAMETER Experiment Name: At_1uM_BR-BRZ__P Parameter: Tissue Value: Shoot Apices
  misc_feature: MA Experiment 20000441 PARAMETER Experiment Name: At_1uM_BR-BRZ__P Parameter: Treatment Value: 1uM BR vs. No Treatment
  misc_feature: MA Experiment ID: 20000443 Result: Down-regulated in Transcription
  misc_feature: MA Experiment 20000443 PARAMETER Experiment Name: At_1uM_BR-BRZ__P Parameter: Tissue Value: Shoot Apices
  misc_feature: MA Experiment 20000443 PARAMETER Experiment Name: At_1uM_BR-BRZ__P Parameter: Treatment Value: 1uM BRZ vs. No Treatment
  misc_feature: MA Experiment ID: 20000495 Result: Down-regulated in Transcription
  misc_feature: MA Experiment 20000495 PARAMETER Experiment Name: At_Guard_Cells_P Parameter: Harvest Date Value: 8/2/2002
  misc_feature: MA Experiment 20000495 PARAMETER Experiment Name: At_Guard_Cells_P Parameter: Organism Value: A. thaliana
  misc_feature: MA Experiment 20000495 PARAMETER Experiment Name: At_Guard_Cells_P Parameter: Tissue Value: Guard Cells vs. Leaves
  misc_feature: MA Experiment ID: 20000496 Result: Down-regulated in Transcription
  misc_feature: MA Experiment 20000496 PARAMETER Experiment Name: At_Guard_Cells_P Parameter: Harvest Date Value: 7/19/2002
  misc_feature: MA Experiment 20000496 PARAMETER Experiment Name: At_Guard_Cells_P Parameter: Organism Value: Canola
  misc_feature: MA Experiment 20000496 PARAMETER Experiment Name: At_Guard_Cells_P Parameter: Tissue Value: Guard Cells vs. Leaves
  misc_feature: MA Experiment ID: 20000527 Result: Down-regulated in Transcription
  misc_feature: MA Experiment 20000527 PARAMETER Experiment Name: At_10percent_PEG_P Parameter: Age (day) Value: 20
  misc_feature: MA Experiment 20000527 PARAMETER Experiment Name: At_10percent_PEG_P Parameter: Organism Value: A. thaliana
  misc_feature: MA Experiment 20000527 PARAMETER Experiment Name: At_10percent_PEG_P Parameter: Plant Line Value: WS
  misc_feature: MA Experiment 20000527 PARAMETER Experiment Name: At_10percent_PEG_P Parameter: Timepoint (day) Value: 20
  misc_feature: MA Experiment 20000527 PARAMETER Experiment Name: At_10percent_PEG_P Parameter: Tissue Value: Whole Plant
  misc_feature: MA Experiment 20000527 PARAMETER Experiment Name: At_10percent_PEG_P Parameter: Treatment Value: 10percent PEG vs. No Treatment
  misc_feature: MA Experiment ID: 20001248 Result: Up-regulated in Transcription
  misc_feature: MA Experiment 20001248 PARAMETER Experiment Name: At_Far-red-induction_P Parameter: Age (day) Value: 7
  misc_feature: MA Experiment 20001248 PARAMETER Experiment Name: At_Far-red-induction_P Parameter: Light Value: Far-red vs. White
  misc_feature: MA Experiment 20001248 PARAMETER Experiment Name: At_Far-red-induction_P Parameter: Organism Value: A. thaliana
  misc_feature: MA Experiment 20001248 PARAMETER Experiment Name: At_Far-red-induction_P Parameter: Plant Line Value: Columbia
  misc_feature: MA Experiment 20001248 PARAMETER Experiment Name: At_Far-red-induction_P Parameter: Timepoint (hr) Value: 4
  misc_feature: MA Experiment 20001248 PARAMETER Experiment Name: At_Far-red-induction_P Parameter: Tissue Value: Whole Plant
  misc_feature: MA Experiment ID: 20001450 Result: Up-regulated in Transcription
  misc_feature: MA Experiment 20001450 PARAMETER Experiment Name: At_Far-red-induction_P Parameter: Age (day) Value: 7
  misc_feature: MA Experiment 20001450 PARAMETER Experiment Name: At_Far-red-induction_P Parameter: Light Value: Far-red vs. White
  misc_feature: MA Experiment 20001450 PARAMETER Experiment Name: At_Far-red-induction_P Parameter: Organism Value: A. thaliana
  misc_feature: MA Experiment 20001450 PARAMETER Experiment Name: At_Far-red-induction_P Parameter: Plant Line Value: Columbia
  misc_feature: MA Experiment 20001450 PARAMETER Experiment Name: At_Far-red-induction_P Parameter: Timepoint (hr) Value: 8
  misc_feature: MA Experiment 20001450 PARAMETER Experiment Name: At_Far-red-induction_P Parameter: Tissue Value: Whole Plant
  misc_feature: MA Experiment ID: 20001451 Result: Up-regulated in Transcription
  misc_feature: MA Experiment 20001451 PARAMETER Experiment Name: At_Far-red-induction_P Parameter: Age (day) Value: 7
  misc_feature: MA Experiment 20001451 PARAMETER Experiment Name: At_Far-red-induction_P Parameter: Light Value: Far-red vs. White
  misc_feature: MA Experiment 20001451 PARAMETER Experiment Name: At_Far-red-induction_P Parameter: Organism Value: A. thaliana
  misc_feature: MA Experiment 20001451 PARAMETER Experiment Name: At_Far-red-induction_P Parameter: Plant Line Value: Columbia
  misc_feature: MA Experiment 20001451 PARAMETER Experiment Name: At_Far-red-induction_P Parameter: Timepoint (hr) Value: 24
  misc_feature: MA Experiment 20001451 PARAMETER Experiment Name: At_Far-red-induction_P Parameter: Tissue Value: Whole Plant
  misc_feature: MA Experiment ID: 20001555 Result: Down-regulated in Transcription
  misc_feature: MA Experiment 20001555 PARAMETER Experiment Name: At_Drought_Soil_Dry_P Parameter: Age (day) Value: 24
  misc_feature: MA Experiment 20001555 PARAMETER Experiment Name: At_Drought_Soil_Dry_P Parameter: Organism Value: A. thaliana
  misc_feature: MA Experiment 20001555 PARAMETER Experiment Name: At_Drought_Soil_Dry_P Parameter: Plant Line Value: WS
  misc_feature: MA Experiment 20001555 PARAMETER Experiment Name: At_Drought_Soil_Dry_P Parameter: Post Timepoint (hr) Value: None
  misc_feature: MA Experiment 20001555 PARAMETER Experiment Name: At_Drought_Soil_Dry_P Parameter: Post-Treatment Value: None
  misc_feature: MA Experiment 20001555 PARAMETER Experiment Name: At_Drought_Soil_Dry_P Parameter: Timepoint (day) Value: 10
  misc_feature: MA Experiment 20001555 PARAMETER Experiment Name: At_Drought_Soil_Dry_P Parameter: Treatment Value: Drought vs. No Drought
  misc_feature: MA Experiment ID: 20001556 Result: Down-regulated in Transcription
  misc_feature: MA Experiment 20001556 PARAMETER Experiment Name: At_Drought_Soil_Dry_P Parameter: Age (day) Value: 26
  misc_feature: MA Experiment 20001556 PARAMETER Experiment Name: At_Drought_Soil_Dry_P Parameter: Organism Value: A. thaliana
  misc_feature: MA Experiment 20001556 PARAMETER Experiment Name: At_Drought_Soil_Dry_P Parameter: Plant Line Value: WS
  misc_feature: MA Experiment 20001556 PARAMETER Experiment Name: At_Drought_Soil_Dry_P Parameter: Post Timepoint (hr) Value: None
  misc_feature: MA Experiment 20001556 PARAMETER Experiment Name: At_Drought_Soil_Dry_P Parameter: Post-Treatment Value: None
  misc_feature: MA Experiment 20001556 PARAMETER Experiment Name: At_Drought_Soil_Dry_P Parameter: Timepoint (day) Value: 12
  misc_feature: MA Experiment 20001556 PARAMETER Experiment Name: At_Drought_Soil_Dry_P Parameter: Treatment Value: Drought vs. No Drought
  misc_feature: MA Experiment ID: 20001559 Result: Down-regulated in Transcription
  misc_feature: MA Experiment 20001559 PARAMETER Experiment Name: At_Drought_Soil_Dry_P Parameter: Age (day) Value: 28
  misc_feature: MA Experiment 20001559 PARAMETER Experiment Name: At_Drought_Soil_Dry_P Parameter: Organism Value: A. thaliana
  misc_feature: MA Experiment 20001559 PARAMETER Experiment Name: At_Drought_Soil_Dry_P Parameter: Plant Line Value: WS
  misc_feature: MA Experiment 20001559 PARAMETER Experiment Name: At_Drought_Soil_Dry_P Parameter: Post Timepoint (hr) Value: 29
  misc_feature: MA Experiment 20001559 PARAMETER Experiment Name: At_Drought_Soil_Dry_P Parameter: Post-Treatment Value: Re-Water vs. No Drought
  misc_feature: MA Experiment 20001559 PARAMETER Experiment Name: At_Drought_Soil_Dry_P Parameter: Timepoint (day) Value: 14
  misc_feature: MA Experiment 20001559 PARAMETER Experiment Name: At_Drought_Soil_Dry_P Parameter: Treatment Value: Drought vs. No Drought
  misc_feature: MA Experiment ID: 20001560 Result: Down-regulated in Transcription
  misc_feature: MA Experiment 20001560 PARAMETER Experiment Name: At_Drought_Soil_Dry_P Parameter: Age (day) Value: 28
  misc_feature: MA Experiment 20001560 PARAMETER Experiment Name: At_Drought_Soil_Dry_P Parameter: Organism Value: A. thaliana
  misc_feature: MA Experiment 20001560 PARAMETER Experiment Name: At_Drought_Soil_Dry_P Parameter: Plant Line Value: WS
  misc_feature: MA Experiment 20001560 PARAMETER Experiment Name: At_Drought_Soil_Dry_P Parameter: Post Timepoint (hr) Value: None
  misc_feature: MA Experiment 20001560 PARAMETER Experiment Name: At_Drought_Soil_Dry_P Parameter: Post-Treatment Value: None
  misc_feature: MA Experiment 20001560 PARAMETER Experiment Name: At_Drought_Soil_Dry_P Parameter: Timepoint (day) Value: 14
  misc_feature: MA Experiment 20001560 PARAMETER Experiment Name: At_Drought_Soil_Dry_P Parameter: Treatment Value: Drought vs. No Drought
  misc_feature: MA Experiment ID: 20001905 Result: Down-regulated in Transcription
  misc_feature: MA Experiment 20001905 PARAMETER Experiment Name: At_Drought_Reproduction_P Parameter: Age (day) Value: 40
  misc_feature: MA Experiment 20001905 PARAMETER Experiment Name: At_Drought_Reproduction_P Parameter: Organism Value: A. thaliana
  misc_feature: MA Experiment 20001905 PARAMETER Experiment Name: At_Drought_Reproduction_P Parameter: Plant Line Value: WS
  misc_feature: MA Experiment 20001905 PARAMETER Experiment Name: At_Drought_Reproduction_P Parameter: Timepoint (day) Value: 10
  misc_feature: MA Experiment 20001905 PARAMETER Experiment Name: At_Drought_Reproduction_P Parameter: Tissue Value: Rosettes
  misc_feature: MA Experiment 20001905 PARAMETER Experiment Name: At_Drought_Reproduction_P Parameter: Treatment Value: Drought vs. No Drought
  misc_feature: MA Experiment ID: 20001906 Result: Down-regulated in Transcription
  misc_feature: MA Experiment 20001906 PARAMETER Experiment Name: At_Drought_Reproduction_P Parameter: Age (day) Value: 35
  misc_feature: MA Experiment 20001906 PARAMETER Experiment Name: At_Drought_Reproduction_P Parameter: Organism Value: A. thaliana
  misc_feature: MA Experiment 20001906 PARAMETER Experiment Name: At_Drought_Reproduction_P Parameter: Plant Line Value: WS
  misc_feature: MA Experiment 20001906 PARAMETER Experiment Name: At_Drought_Reproduction_P Parameter: Timepoint (day) Value: 5
  misc_feature: MA Experiment 20001906 PARAMETER Experiment Name: At_Drought_Reproduction_P Parameter: Tissue Value: Siliques
  misc_feature: MA Experiment 20001906 PARAMETER Experiment Name: At_Drought_Reproduction_P Parameter: Treatment Value: Drought vs. No Drought
  misc_feature: MA Experiment ID: 20001910 Result: Down-regulated in Transcription
  misc_feature: MA Experiment 20001910 PARAMETER Experiment Name: At_Drought_Reproduction_P Parameter: Age (day) Value: 37
  misc_feature: MA Experiment 20001910 PARAMETER Experiment Name: At_Drought_Reproduction_P Parameter: Organism Value: A. thaliana
  misc_feature: MA Experiment 20001910 PARAMETER Experiment Name: At_Drought_Reproduction_P Parameter: Plant Line Value: WS
  misc_feature: MA Experiment 20001910 PARAMETER Experiment Name: At_Drought_Reproduction_P Parameter: Timepoint (day) Value: 7
  misc_feature: MA Experiment 20001910 PARAMETER Experiment Name: At_Drought_Reproduction_P Parameter: Tissue Value: Flowers
  misc_feature: MA Experiment 20001910 PARAMETER Experiment Name: At_Drought_Reproduction_P Parameter: Treatment Value: Drought vs. No Drought
  misc_feature: MA Experiment ID: 20001911 Result: Down-regulated in Transcription
  misc_feature: MA Experiment 20001911 PARAMETER Experiment Name: At_Drought_Reproduction_P Parameter: Age (day) Value: 40
  misc_feature: MA Experiment 20001911 PARAMETER Experiment Name: At_Drought_Reproduction_P Parameter: Organism Value: A. thaliana
  misc_feature: MA Experiment 20001911 PARAMETER Experiment Name: At_Drought_Reproduction_P Parameter: Plant Line Value: WS
  misc_feature: MA Experiment 20001911 PARAMETER Experiment Name: At_Drought_Reproduction_P Parameter: Timepoint (day) Value: 10
  misc_feature: MA Experiment 20001911 PARAMETER Experiment Name: At_Drought_Reproduction_P Parameter: Tissue Value: Flowers
  misc_feature: MA Experiment 20001911 PARAMETER Experiment Name: At_Drought_Reproduction_P Parameter: Treatment Value: Drought vs. No Drought
ccatctaacaaaactcttgtacttaagcatggtggttaatcagaagatatccggccttgcatccgctatgaacgccaaaatcatcggttcaggagagagatcgatggtcttggcacacggtttcggaggcgaccagtcggtttgggataaaataataccggtcttgtcccaatccttcaaagttttggtctttgactggcttttctctggagccattaaagatcaaactctctatgacccttcaaagtataactccttagacgtcttctctgacgatctcattgctcttatggaggagttgaagtttggccctgtcgtgttcgtaggccattccatgtcgggggtgatcggttgtgctgcttctattaaaaggcccgacttgtttacaaatcttctccttattgctgcttctccaaggtatataaacagtgaggattacaaaggagggtttgagtcaaaagacattgacacgatcattaccagcattggctccaactacgaagcttgggcggttgatttctcctcattcgtggtcgactcgagagactctctctcggtccaaaggttcgagaagtcccttaagaagatgaagcccgagacagctcttgccttagctaagatagtgtttggtagcgacgagagagagattttgggacaagtgtcagtgccttgccatgtcatacaaccaggaaacgacgtcgtagtgcctgtctccgtcgcatacttcatgcaggagaagattaaggggaaatcgacagtggagatcatcgaggacgcgatcgggcattttccacagatgacatcacatttggagctgcttggcgtcatgaggcgcctccttgagttttaaggcttatataagagctttgcgtcgtttgatcgagtttcttcttgtctataatatcgtattactaatataacgaagtgggtctattagaatttttcatatatgtttgtgtaatgtgaatgtgttattatattcttagcacaatgattttcatttttagtgttttttttttaaacataggattgaaagtaatatgttataagtttctttatatcacactgtcaaa

SEQ ID NO: 99330 - protein, 282 aa, Arabidopsis thaliana
  peptide (1)..(282): Ceres Seq. ID no. 13602678
  misc_feature (59)..(278): Pfam Name: alpha/beta hydrolase fold Pfam Description: alpha/beta hydrolase fold
  misc_feature (10)..(282): Homolog of NCBI NO: 15230110 NR Description: hydrolase, alpha/beta fold family [Arabidopsis
  misc_feature (22)..(278): Homolog of NCBI NO: 15235567 NR Description: hydrolase, alpha/beta fold family [Arabidopsis
  misc_feature (23)..(280): Homolog of NCBI NO: 34912326 NR Description: P0451D05.26 [Oryza sativa (japonica
  misc_feature (19)..(280): Homolog of NCBI NO: 21593927 NR Description: unknown [Arabidopsis thaliana]
  misc_feature (140)..(281): Homolog of NCBI NO: 40736991 NR Description: putative hydrolases [Oryza sativa (japonica
  misc_feature (22)..(141): Homolog of NCBI NO: 40736991 NR Description: putative hydrolases [Oryza sativa (japonica
  misc_feature (19)..(280): Homolog of NCBI NO: 18396732 NR Description: esterase/lipase/thioesterase family [Arabidopsis >gi|6223644|gb|AAF05858.1|AC011698_9 unknown protein [Arabidopsis >gi|17381267|gb|AAL36052.1| AT3g03990/T11I18_10 [Arabidopsis
  misc_feature (20)..(268): Homolog of NCBI NO: 24216360 NR Description: Predicted hydrolases or acyltransferases, hydrolase superfamily [Leptospira interrogans serovar lai str. >gi|24197640|gb|AAN50859.1|AE011521_5 Predicted hydrolases or
  misc_feature (24)..(268): Homolog of NCBI NO: 22987307 NR Description: hypothetical protein [Burkholderia fungorum]
  misc_feature (24)..(268): Homolog of NCBI NO: 29827464 NR Description: putative hydrolase [Streptomyces avermitilis
HLTKLLYLSMVVNQKISGLASAMNAKIIGSGERSMVLAHGFGGDQSVWDKIIPVLSQSFKVLVFDWLFSGAIKDQTLYDPSKYNSLDVFSDDLIALMEELKFGPVVFVGHSMSGVIGCAASIKRPDLFTNLLLIAASPRYINSEDYKGGFESKDIDTIITSIGSNYEAWAVDFSSFVVDSRDSLSVQRFEKSLKKMKPETALALAKIVFGSDEREILGQVSVPCHVIQPGNDVVVPVSVAYFMQEKIKGKSTVEIIEDAIGHFPQMTSHLELLGVMRRLLEF

SEQ ID NO: 99331 - protein, 273 aa, Arabidopsis thaliana
  peptide (1)..(273): Ceres Seq. ID no. 13602679
  misc_feature (50)..(269): Pfam Name: alpha/beta hydrolase fold Pfam Description: alpha/beta hydrolase fold
  misc_feature (1)..(273): Homolog of NCBI NO: 15230110 NR Description: hydrolase, alpha/beta fold family [Arabidopsis
  misc_feature (13)..(269): Homolog of NCBI NO: 15235567 NR Description: hydrolase, alpha/beta fold family [Arabidopsis
  misc_feature (14)..(271): Homolog of NCBI NO: 34912326 NR Description: P0451D05.26 [Oryza sativa (japonica
  misc_feature (10)..(271): Homolog of NCBI NO: 21593927 NR Description: unknown [Arabidopsis thaliana]
  misc_feature (131)..(272): Homolog of NCBI NO: 40736991 NR Description: putative hydrolases [Oryza sativa (japonica
  misc_feature (13)..(132): Homolog of NCBI NO: 40736991 NR Description: putative hydrolases [Oryza sativa (japonica
  misc_feature (10)..(271): Homolog of NCBI NO: 18396732 NR Description: esterase/lipase/thioesterase family [Arabidopsis >gi|6223644|gb|AAF05858.1|AC011698_9 unknown protein [Arabidopsis >gi|17381267|gb|AAL36052.1| AT3g03990/T11I18_10 [Arabidopsis
  misc_feature (11)..(259): Homolog of NCBI NO: 24216360 NR Description: Predicted hydrolases or acyltransferases, hydrolase superfamily [Leptospira interrogans serovar lai str. >gi|24197640|gb|AAN50859.1|AE011521_5 Predicted hydrolases or
  misc_feature (15)..(259): Homolog of NCBI NO: 22987307 NR Description: hypothetical protein [Burkholderia fungorum]
  misc_feature (15)..(259): Homolog of NCBI NO: 29827464 NR Description: putative hydrolase [Streptomyces avermitilis
MVVNQKISGLASAMNAKIIGSGERSMVLAHGFGGDQSVWDKIIPVLSQSFKVLVFDWLFSGAIKDQTLYDPSKYNSLDVFSDDLIALMEELKFGPVVFVGHSMSGVIGCAASIKRPDLFTNLLLIAASPRYINSEDYKGGFESKDIDTIITSIGSNYEAWAVDFSSFVVDSRDSLSVQRFEKSLKKMKPETALALAKIVFGSDEREILGQVSVPCHVIQPGNDVVVPVSVAYFMQEKIKGKSTVEIIEDAIGHFPQMTSHLELLGVMRRLLEF

SEQ ID NO: 99332 - protein, 260 aa, Arabidopsis thaliana
  peptide (1)..(260): Ceres Seq. ID no. 13602680
  misc_feature (37)..(256): Pfam Name: alpha/beta hydrolase fold Pfam Description: alpha/beta hydrolase fold
  misc_feature (1)..(260): Homolog of NCBI NO: 15230110 NR Description: hydrolase, alpha/beta fold family [Arabidopsis
  misc_feature (1)..(256): Homolog of NCBI NO: 15235567 NR Description: hydrolase, alpha/beta fold family [Arabidopsis
  misc_feature (1)..(258): Homolog of NCBI NO: 34912326 NR Description: P0451D05.26 [Oryza sativa (japonica
  misc_feature (1)..(258): Homolog of NCBI NO: 21593927 NR Description: unknown [Arabidopsis thaliana]
  misc_feature (118)..(259): Homolog of NCBI NO: 40736991 NR Description: putative hydrolases [Oryza sativa (japonica
  misc_feature (1)..(119): Homolog of NCBI NO: 40736991 NR Description: putative hydrolases [Oryza sativa (japonica
  misc_feature (1)..(258): Homolog of NCBI NO: 18396732 NR Description: esterase/lipase/thioesterase family [Arabidopsis >gi|6223644|gb|AAF05858.1|AC011698_9 unknown protein [Arabidopsis >gi|17381267|gb|AAL36052.1| AT3g03990/T11I18_10 [Arabidopsis
  misc_feature (1)..(246): Homolog of NCBI NO: 24216360 NR Description: Predicted hydrolases or acyltransferases, hydrolase superfamily [Leptospira interrogans serovar lai str. >gi|24197640|gb|AAN50859.1|AE011521_5 Predicted hydrolases or
  misc_feature (2)..(246): Homolog of NCBI NO: 22987307 NR Description: hypothetical protein [Burkholderia fungorum]
  misc_feature (2)..(246): Homolog of NCBI NO: 29827464 NR Description: putative hydrolase [Streptomyces avermitilis
MNAKIIGSGERSMVLAHGFGGDQSVWDKIIPVLSQSFKVLVFDWLFSGAIKDQTLYDPSKYNSLDVFSDDLIALMEELKFGPVVFVGHSMSGVIGCAASIKRPDLFTNLLLIAASPRYINSEDYKGGFESKDIDTIITSIGSNYEAWAVDFSSFVVDSRDSLSVQRFEKSLKKMKPETALALAKIVFGSDEREILGQVSVPCHVIQPGNDVVVPVSVAYFMQEKIKGKSTVEIIEDAIGHFPQMTSHLELLGVMRRLLEF

SEQ ID NO: 99333 - DNA, 1760 bp, Arabidopsis thaliana
  misc_feature (1)..(1760): Ceres Seq. ID no. 13602681
  misc_feature: MA Experiment ID: 108488 Result: Up-regulated in Transcription
  misc_feature: MA Experiment ID: 108585 Result: Down-regulated in Transcription
  misc_feature: MA Experiment 108585 PARAMETER Experiment Name: At_5mM_NaNP_cDNA_P Parameter: Timepoint (hr) Value: 6
  misc_feature: MA Experiment 108585 PARAMETER Experiment Name: At_5mM_NaNP_cDNA_P Parameter: Tissue Value: Aerial
  misc_feature: MA Experiment 108585 PARAMETER Experiment Name: At_5mM_NaNP_cDNA_P Parameter: Treatment Value: null
  misc_feature: MA Experiment ID: 108595 Result: Down-regulated in Transcription
  misc_feature: MA Experiment 108595 PARAMETER Experiment Name: At_Ler-pi_Ovule_cDNA_P Parameter: Plant Line Value: null
  misc_feature: MA Experiment ID: 108668 Result: Down-regulated in Transcription
  misc_feature: MA Experiment 108668 PARAMETER Experiment Name: At_2mM_SA_cDNA_P Parameter: Plant Line Value: WS
  misc_feature: MA Experiment 108668 PARAMETER Experiment Name: At_2mM_SA_cDNA_P Parameter: Timepoint (hr) Value: 6
  misc_feature: MA Experiment 108668 PARAMETER Experiment Name: At_2mM_SA_cDNA_P Parameter: Treatment Value: 2mM SA vs. No Treatment
  misc_feature: MA Experiment ID: 20000069 Result: Down-regulated in Transcription
  misc_feature: MA Experiment 20000069 PARAMETER Experiment Name: At_100uM_ABA_Mutants_cDNA_P Parameter: Plant Line Value: CS23
  misc_feature: MA Experiment 20000069 PARAMETER Experiment Name: At_100uM_ABA_Mutants_cDNA_P Parameter: Timepoint (hr) Value: 6
  misc_feature: MA Experiment 20000069 PARAMETER Experiment Name: At_100uM_ABA_Mutants_cDNA_P Parameter: Tissue Value: Aerial
  misc_feature: MA Experiment 20000069 PARAMETER Experiment Name: At_100uM_ABA_Mutants_cDNA_P Parameter: Treatment Value: 100uM ABA vs. No Treatment
  misc_feature: MA Experiment ID: 20000070 Result: Down-regulated in Transcription
  misc_feature: MA Experiment 20000070 PARAMETER Experiment Name: At_100uM_ABA_Mutants_cDNA_P Parameter: Plant Line Value: CS24
  misc_feature: MA Experiment 20000070 PARAMETER Experiment Name: At_100uM_ABA_Mutants_cDNA_P Parameter: Timepoint (hr) Value: 6
  misc_feature: MA Experiment 20000070 PARAMETER Experiment Name: At_100uM_ABA_Mutants_cDNA_P Parameter: Tissue Value: Aerial
  misc_feature: MA Experiment 20000070 PARAMETER Experiment Name: At_100uM_ABA_Mutants_cDNA_P Parameter: Treatment Value: 100uM ABA vs. No Treatment
  misc_feature: MA Experiment ID: 20000071 Result: Down-regulated in Transcription
  misc_feature: MA Experiment 20000071 PARAMETER Experiment Name: At_100uM_ABA_Mutants_cDNA_P Parameter: Plant Line Value: CS8104
  misc_feature: MA Experiment 20000071 PARAMETER Experiment Name: At_100uM_ABA_Mutants_cDNA_P Parameter: Timepoint (hr) Value: 6
  misc_feature: MA Experiment 20000071 PARAMETER Experiment Name: At_100uM_ABA_Mutants_cDNA_P Parameter: Tissue Value: Aerial
  misc_feature: MA Experiment 20000071 PARAMETER Experiment Name: At_100uM_ABA_Mutants_cDNA_P Parameter: Treatment Value: 100uM ABA vs. No Treatment
  misc_feature: MA Experiment ID: 20000072 Result: Down-regulated in Transcription
  misc_feature: MA Experiment 20000072 PARAMETER Experiment Name: At_100uM_ABA_Mutants_cDNA_P Parameter: Plant Line Value: CS8105
  misc_feature: MA Experiment 20000072 PARAMETER Experiment Name: At_100uM_ABA_Mutants_cDNA_P Parameter: Timepoint (hr) Value: 6
  misc_feature: MA Experiment 20000072 PARAMETER Experiment Name: At_100uM_ABA_Mutants_cDNA_P Parameter: Tissue Value: Aerial
  misc_feature: MA Experiment 20000072 PARAMETER Experiment Name: At_100uM_ABA_Mutants_cDNA_P Parameter: Treatment Value: 100uM ABA vs. No Treatment
  misc_feature: MA Experiment ID: 20000086 Result: Down-regulated in Transcription
  misc_feature: MA Experiment 20000086 PARAMETER Experiment Name: At_100uM_ABA_Mutants_cDNA_P Parameter: Plant Line Value: CS22
  misc_feature: MA Experiment 20000086 PARAMETER Experiment Name: At_100uM_ABA_Mutants_cDNA_P Parameter: Timepoint (hr) Value: 6
  misc_feature: MA Experiment 20000086 PARAMETER Experiment Name: At_100uM_ABA_Mutants_cDNA_P Parameter: Tissue Value: Aerial
  misc_feature: MA Experiment 20000086 PARAMETER Experiment Name: At_100uM_ABA_Mutants_cDNA_P Parameter: Treatment Value: 100uM ABA vs. No Treatment
  misc_feature: MA Experiment ID: 20000087 Result: Down-regulated in Transcription
  misc_feature: MA Experiment 20000087 PARAMETER Experiment Name: At_100uM_ABA_Mutants_cDNA_P Parameter: Plant Line Value: WS
  misc_feature: MA Experiment 20000087 PARAMETER Experiment Name: At_100uM_ABA_Mutants_cDNA_P Parameter: Timepoint (hr) Value: 6
  misc_feature: MA Experiment 20000087 PARAMETER Experiment Name: At_100uM_ABA_Mutants_cDNA_P Parameter: Tissue Value: Aerial
  misc_feature: MA Experiment 20000087 PARAMETER Experiment Name: At_100uM_ABA_Mutants_cDNA_P Parameter: Treatment Value: 100uM ABA vs. No Treatment
  misc_feature: MA Experiment ID: 20000088 Result: Down-regulated in Transcription
  misc_feature: MA Experiment 20000088 PARAMETER Experiment Name: At_100uM_ABA_Mutants_cDNA_P Parameter: Plant Line Value: Landsberg
  misc_feature: MA Experiment 20000088 PARAMETER Experiment Name: At_100uM_ABA_Mutants_cDNA_P Parameter: Timepoint (hr) Value: 6
  misc_feature: MA Experiment 20000088 PARAMETER Experiment Name: At_100uM_ABA_Mutants_cDNA_P Parameter: Tissue Value: Aerial
  misc_feature: MA Experiment 20000088 PARAMETER Experiment Name: At_100uM_ABA_Mutants_cDNA_P Parameter: Treatment Value: 100uM ABA vs. No Treatment
  misc_feature: MA Experiment ID: 20000090 Result: Down-regulated in Transcription
  misc_feature: MA Experiment ID: 20000117 Result: Down-regulated in Transcription
  misc_feature: MA Experiment 20000117 PARAMETER Experiment Name: At_100uM_ABA_Mutants_cDNA_P Parameter: Plant Line Value: Columbia
  misc_feature: MA Experiment 20000117 PARAMETER Experiment Name: At_100uM_ABA_Mutants_cDNA_P Parameter: Timepoint (hr) Value: 6
  misc_feature: MA Experiment 20000117 PARAMETER Experiment Name: At_100uM_ABA_Mutants_cDNA_P Parameter: Tissue Value: Aerial
  misc_feature: MA Experiment 20000117 PARAMETER Experiment Name: At_100uM_ABA_Mutants_cDNA_P Parameter: Treatment Value: 100uM ABA vs. No Treatment
  misc_feature: MA Experiment ID: 20000185 Result: Down-regulated in Transcription
  misc_feature: MA Experiment 20000185 PARAMETER Experiment Name: At_Roots__P Parameter: Age (day) Value: 7 vs. 21
  misc_feature: MA Experiment 20000185 PARAMETER Experiment Name: At_Roots__P Parameter: Organism Value: A. thaliana
  misc_feature: MA Experiment 20000185 PARAMETER Experiment Name: At_Roots__P Parameter: Tissue Value: Roots vs. Whole Plant
  misc_feature: MA Experiment ID: 20000438 Result: Up-regulated in Transcription
  misc_feature: MA Experiment 20000438 PARAMETER Experiment Name: At_Shoots__P Parameter: Age (day) Value: 14
  misc_feature: MA Experiment 20000438 PARAMETER Experiment Name: At_Shoots__P Parameter: Tissue Value: Shoots vs. Whole Plant
  misc_feature: MA Experiment ID: 20000439 Result: Down-regulated in Transcription
  misc_feature: MA Experiment 20000439 PARAMETER Experiment Name: At_Roots__P Parameter: Age (day) Value: 14 vs. 21
  misc_feature: MA Experiment 20000439 PARAMETER Experiment Name: At_Roots__P Parameter: Organism Value: A. thaliana
  misc_feature: MA Experiment 20000439 PARAMETER Experiment Name: At_Roots__P Parameter: Tissue Value: Roots vs. Whole Plant
  misc_feature: MA Experiment ID: 20000794 Result: Down-regulated in Transcription
  misc_feature: MA Experiment 20000794 PARAMETER Experiment Name: At_Petals_P Parameter: Age (day) Value: 23-25 days
  misc_feature: MA Experiment 20000794 PARAMETER Experiment Name: At_Petals_P Parameter: Plant Line Value: WS
  misc_feature: MA Experiment 20000794 PARAMETER Experiment Name: At_Petals_P Parameter: Tissue Value: Petals vs. Whole plant
  misc_feature: MA Experiment ID: 20001450 Result: Down-regulated in Transcription
  misc_feature: MA Experiment 20001450 PARAMETER Experiment Name: At_Far-red-induction_P Parameter: Age (day) Value: 7
  misc_feature: MA Experiment 20001450 PARAMETER Experiment Name: At_Far-red-induction_P Parameter: Light Value: Far-red vs. White
  misc_feature: MA Experiment 20001450 PARAMETER Experiment Name: At_Far-red-induction_P Parameter: Organism Value: A. thaliana
  misc_feature: MA Experiment 20001450 PARAMETER Experiment Name: At_Far-red-induction_P Parameter: Plant Line Value: Columbia
  misc_feature: MA Experiment 20001450 PARAMETER Experiment Name: At_Far-red-induction_P Parameter: Timepoint (hr) Value: 8
  misc_feature: MA Experiment 20001450 PARAMETER Experiment Name: At_Far-red-induction_P Parameter: Tissue Value: Whole Plant
  misc_feature: MA Experiment ID: 20001906 Result: Down-regulated in Transcription
  misc_feature: MA Experiment 20001906 PARAMETER Experiment Name: At_Drought_Reproduction_P Parameter: Age (day) Value: 35
  misc_feature: MA Experiment 20001906 PARAMETER Experiment Name: At_Drought_Reproduction_P Parameter: Organism Value: A. thaliana
  misc_feature: MA Experiment 20001906 PARAMETER Experiment Name: At_Drought_Reproduction_P Parameter: Plant Line Value: WS
  misc_feature: MA Experiment 20001906 PARAMETER Experiment Name: At_Drought_Reproduction_P Parameter: Timepoint (day) Value: 5
  misc_feature: MA Experiment 20001906 PARAMETER Experiment Name: At_Drought_Reproduction_P Parameter: Tissue Value: Siliques
  misc_feature: MA Experiment 20001906 PARAMETER Experiment Name: At_Drought_Reproduction_P Parameter: Treatment Value: Drought vs. No Drought
  misc_feature: MA Experiment ID: 20001911 Result: Down-regulated in Transcription
  misc_feature: MA Experiment 20001911 PARAMETER Experiment Name: At_Drought_Reproduction_P Parameter: Age (day) Value: 40
  misc_feature: MA Experiment 20001911 PARAMETER Experiment Name: At_Drought_Reproduction_P Parameter: Organism Value: A. thaliana
  misc_feature: MA Experiment 20001911 PARAMETER Experiment Name: At_Drought_Reproduction_P Parameter: Plant Line Value: WS
  misc_feature: MA Experiment 20001911 PARAMETER Experiment Name: At_Drought_Reproduction_P Parameter: Timepoint (day) Value: 10
  misc_feature: MA Experiment 20001911 PARAMETER Experiment Name: At_Drought_Reproduction_P Parameter: Tissue Value: Flowers
  misc_feature: MA Experiment 20001911 PARAMETER Experiment Name: At_Drought_Reproduction_P Parameter: Treatment Value: Drought vs. No Drought
agaccgctagttttttttgccactctcttcgtctctctcttgtagcaatgccgcttcttcatccacagtcgttgcggcatccttctttcgagattcagacccaaagaagaagcaattccacaacaagattgcttctttctcacaagtttctccattctcaagcttccattatctcaatctccaggacaagaatcctcaaacgggtctctcagaatctctctgtagctaaagctgcttcagctcaagctagtagtagtgttggtgagagtgttgctcaaacatcagaaaaagatgtgttgaaggctctgtctcagattattgatcctgattttgggacagatattgtttcttgtggttttgtgaaagatttggggattaatgaagctttgggtgaggtttcgttccgtttggagctgacaacacccgcatgtccagtcaaagacatgtttgagaacaaggcaaatgaggtagttgcagcccttccatgggtgaagaaggtaaatgtgacaatgtcagcacaaccagccaagcccatttttgcagggcagcttccctttggattatcaagaatttcgaacatcatcgctgtttctagttgcaagggtggtgttgggaaatcaacagtagctgtaaatcttgcttatacattagctggtatgggtgctagagttggtatctttgatgctgatgtctatggtccaagtctaccaaccatggtcaatcctgagagccgtatattggaaatgaacccggagaagaagaccatcattccaacagaatacatgggcgtcaagctagtctcatttggatttgcaggacaagggcgtgccattatgagaggtcctatggtgtctggtgttataaaccaactccttacaacaactgaatggggagagctggactatcttgttatcgacatgcctcctggaactggtgatatacaactgaccttatgccaggttgcgccattgacagcagcggtaattgtcaccacccctcaaaagttggcgtttattgatgttgcaaaaggtgtaaggatgttctcaaaacttaaggtgccttgcgttgctgttgtggagaatatgtgccactttgacgctgatgggaaacgttattacccttttgggaaaggttcaggttctgaggtggtcaagcaattcggcatacctcacctctttgacctccccattagaccaacgttatctgcttcgggggatagcggaactcctgaagtagtgtcggatcctctaagtgacgttgccagaacgttccaggatcttggtgtatgtgtagtgcaacaatgcgccaagatacgccagcaagtatcaacggccgtgacatacgacaagtatctcaaggcaattagagtgaaggtaccaaactcagacgaagagttcttactgcaccctgcaaccgtcagaagaaatgatagatctgcacaaagtgtggatgaatggactggagagcaaaaagttctatatggcgatgtagcggaagatatcgaacctgaggacatacgaccaatgggaaactacgctgtctcgataacctggcccgacgggtttagccagattgctccatatgaccagttggaagaaattgaaaggctagtagatgttcctccattgtctccagtcgaagtctagttcttgaacaatatgttttcgctttacgatatctcttgaaaatgaaatttgtatattcatattaagagcattgttatgaatcttacaatgatgaaaagagggttactgtaagct

SEQ ID NO: 99334 - protein, 547 aa, Arabidopsis thaliana
  peptide (1)..(547): Ceres Seq. ID no. 13602682
  misc_feature (94)..(170): Pfam Name: Domain of unknown function DUF59 Pfam Description: Domain of unknown function DUF59
  misc_feature (16)..(547): Homolog of NCBI NO: 15230111 NR Description: mrp protein -related [Arabidopsis thaliana]
  misc_feature (16)..(547): Homolog of NCBI NO: 21592386 NR Description: mrp protein, putative [Arabidopsis thaliana]
  misc_feature (16)..(305): Homolog of NCBI NO: 11994706 NR Description: contains similarity to nucleotide-binding
  misc_feature (320)..(547): Homolog of NCBI NO: 11994706 NR Description: contains similarity to nucleotide-binding
  misc_feature (82)..(540): Homolog of NCBI NO: 34910672 NR Description: putative MRP protein (ATP/GTP-binding protein)
  misc_feature (91)..(426): Homolog of NCBI NO: 22970050 NR Description: hypothetical protein [Chloroflexus aurantiacus]
  misc_feature (187)..(415): Homolog of NCBI NO: 21674599 NR Description: ATP-binding protein, Mrp/Nbp35 family [Chlorobium
  misc_feature (90)..(173): Homolog of NCBI NO: 21674599 NR Description: ATP-binding protein, Mrp/Nbp35 family [Chlorobium
  misc_feature (96)..(430): Homolog of NCBI NO: 17228148 NR Description: mrp protein homolog [Nostoc sp. PCC 7120]
  misc_feature (94)..(446): Homolog of NCBI NO: 23136009 NR Description: hypothetical protein [Cytophaga hutchinsonii]
TASFFCHSLRLSLVAMPLLHPQSLRHPSFEIQTQRRSNSTTRLLLSHKFLHSQASIISISRTRILKRVSQNLSVAKAASAQASSSVGESVAQTSEKDVLKALSQIIDPDFGTDIVSCGFVKDLGINEALGEVSFRLELTTPACPVKDMFENKANEVVAALPWVKKVNVTMSAQPAKPIFAGQLPFGLSRISNIIAVSSCKGGVGKSTVAVNLAYTLAGMGARVGIFDADVYGPSLPTMVNPESRILEMNPEKKTIIPTEYMGVKLVSFGFAGQGRAIMRGPMVSGVINQLLTTTEWGELDYLVIDMPPGTGDIQLTLCQVAPLTAAVIVTTPQKLAFIDVAKGVRMFSKLKVPCVAVVENMCHFDADGKRYYPFGKGSGSEVVKQFGIPHLFDLPIRPTLSASGDSGTPEVVSDPLSDVARTFQDLGVCVVQQCAKIRQQVSTAVTYDKYLKAIRVKVPNSDEEFLLHPATVRRNDRSAQSVDEWTGEQKVLYGDVAEDIEPEDIRPMGNYAVSITWPDGFSQIAPYDQLEEIERLVDVPPLSPVEV

SEQ ID NO: 99335 - protein, 532 aa, Arabidopsis thaliana
  peptide (1)..(532): Ceres Seq. ID no. 13602683
  misc_feature (79)..(155): Pfam Name: Domain of unknown function DUF59 Pfam Description: Domain of unknown function DUF59
  misc_feature (1)..(532): Homolog of NCBI NO: 15230111 NR Description: mrp protein -related [Arabidopsis thaliana]
  misc_feature (1)..(532): Homolog of NCBI NO: 21592386 NR Description: mrp protein, putative [Arabidopsis thaliana]
  misc_feature (1)..(290): Homolog of NCBI NO: 11994706 NR Description: contains similarity to nucleotide-binding
  misc_feature (305)..(532): Homolog of NCBI NO: 11994706 NR Description: contains similarity to nucleotide-binding
  misc_feature (67)..(525): Homolog of NCBI NO: 34910672 NR Description: putative MRP protein (ATP/GTP-binding protein)
  misc_feature (76)..(411): Homolog of NCBI NO: 22970050 NR Description: hypothetical protein [Chloroflexus aurantiacus]
  misc_feature (172)..(400): Homolog of NCBI NO: 21674599 NR Description: ATP-binding protein, Mrp/Nbp35 family [Chlorobium
  misc_feature (75)..(158): Homolog of NCBI NO: 21674599 NR Description: ATP-binding protein, Mrp/Nbp35 family [Chlorobium
  misc_feature (81)..(415): Homolog of NCBI NO: 17228148 NR Description: mrp protein homolog [Nostoc sp. PCC 7120]
  misc_feature (79)..(431): Homolog of NCBI NO: 23136009 NR Description: hypothetical protein [Cytophaga hutchinsonii]
MPLLHPQSLRHPSFEIQTQRRSNSTTRLLLSHKFLHSQASIISISRTRILKRVSQNLSVAKAASAQASSSVGESVAQTSEKDVLKALSQIIDPDFGTDIVSCGFVKDLGINEALGEVSFRLELTTPACPVKDMFENKANEVVAALPWVKKVNVTMSAQPAKPIFAGQLPFGLSRISNIIAVSSCKGGVGKSTVAVNLAYTLAGMGARVGIFDADVYGPSLPTMVNPESRILEMNPEKKTIIPTEYMGVKLVSFGFAGQGRAIMRGPMVSGVINQLLTTTEWGELDYLVIDMPPGTGDIQLTLCQVAPLTAAVIVTTPQKLAFIDVAKGVRMFSKLKVPCVAVVENMCHFDADGKRYYPFGKGSGSEVVKQFGIPHLFDLPIRPTLSASGDSGTPEVVSDPLSDVARTFQDLGVCVVQQCAKIRQQVSTAVTYDKYLKAIRVKVPNSDEEFLLHPATVRRNDRSAQSVDEWTGEQKVLYGDVAEDIEPEDIRPMGNYAVSITWPDGFSQIAPYDQLEEIERLVDVPPLSPVEV

SEQ ID NO: 99336 - protein, 400 aa, Arabidopsis thaliana
  peptide (1)..(400): Ceres Seq. ID no. 13602684
  misc_feature (45)..(76): Pfam Name: 4Fe-4S iron sulfur cluster binding proteins, Pfam Description: 4Fe-4S iron sulfur cluster binding proteins,
  misc_feature (1)..(400): Homolog of NCBI NO: 15230111 NR Description: mrp protein -related [Arabidopsis thaliana]
  misc_feature (1)..(400): Homolog of NCBI NO: 21592386 NR Description: mrp protein, putative [Arabidopsis thaliana]
  misc_feature (1)..(158): Homolog of NCBI NO: 11994706 NR Description: contains similarity to nucleotide-binding
  misc_feature (173)..(400): Homolog of NCBI NO: 11994706 NR Description: contains similarity to nucleotide-binding
  misc_feature (1)..(393): Homolog of NCBI NO: 34910672 NR Description: putative MRP protein (ATP/GTP-binding protein)
  misc_feature (1)..(279): Homolog of NCBI NO: 22970050 NR Description: hypothetical protein [Chloroflexus aurantiacus]
  misc_feature (40)..(268): Homolog of NCBI NO: 21674599 NR Description: ATP-binding protein, Mrp/Nbp35 family [Chlorobium
  misc_feature (1)..(26): Homolog of NCBI NO: 21674599 NR Description: ATP-binding protein, Mrp/Nbp35 family [Chlorobium
  misc_feature (1)..(283): Homolog of NCBI NO: 17228148 NR Description: mrp protein homolog [Nostoc sp. PCC 7120]
  misc_feature (1)..(299): Homolog of NCBI NO: 23136009 NR Description: hypothetical protein [Cytophaga hutchinsonii]
MFENKANEVVAALPWVKKVNVTMSAQPAKPIFAGQLPFGLSRISNIIAVSSCKGGVGKSTVAVNLAYTLAGMGARVGIFDADVYGPSLPTMVNPESRILEMNPEKKTIIPTEYMGVKLVSFGFAGQGRAIMRGPMVSGVINQLLTTTEWGELDYLVIDMPPGTGDIQLTLCQVAPLTAAVIVTTPQKLAFIDVAKGVRMFSKLKVPCVAVVENMCHFDADGKRYYPFGKGSGSEVVKQFGIPHLFDLPIRPTLSASGDSGTPEVVSDPLSDVARTFQDLGVCVVQQCAKIRQQVSTAVTYDKYLKAIRVKVPNSDEEFLLHPATVRRNDRSAQSVDEWTGEQKVLYGDVAEDIEPEDIRPMGNYAVSITWPDGFSQIAPYDQLEEIERLVDVPPLSPVEV

SEQ ID NO: 99337 - DNA, 2154 bp, Arabidopsis thaliana
  misc_feature (1)..(2154): Ceres Seq. ID no. 13602685
  misc_feature: MA Experiment ID: 108462 Result: Down-regulated in Transcription
  misc_feature: MA Experiment 108462 PARAMETER Experiment Name: At_Germinating_Seeds_cDNA_P Parameter: Age (day) Value: 2 vs. 0
  misc_feature: MA Experiment 108462 PARAMETER Experiment Name: At_Germinating_Seeds_cDNA_P Parameter: Tissue Value: Germinating Seeds
  misc_feature: MA Experiment ID: 108463 Result: Down-regulated in Transcription
  misc_feature: MA Experiment 108463 PARAMETER Experiment Name: At_Germinating_Seeds_cDNA_P Parameter: Age (day) Value: 3 vs. 0
  misc_feature: MA Experiment 108463 PARAMETER Experiment Name: At_Germinating_Seeds_cDNA_P Parameter: Tissue Value: Germinating Seeds
  misc_feature: MA Experiment ID: 108464 Result: Down-regulated in Transcription
  misc_feature: MA Experiment 108464 PARAMETER Experiment Name: At_Germinating_Seeds_cDNA_P Parameter: Age (day) Value: 4 vs. 0
  misc_feature: MA Experiment 108464 PARAMETER Experiment Name: At_Germinating_Seeds_cDNA_P Parameter: Tissue Value: Germinating Seeds
  misc_feature: MA Experiment ID: 108576 Result: Down-regulated in Transcription
  misc_feature: MA Experiment 108576 PARAMETER Experiment Name: At_42deg_Heat_cDNA_P Parameter: Temperature (deg C) Value: 42 vs. 22
  misc_feature: MA Experiment 108576 PARAMETER Experiment Name: At_42deg_Heat_cDNA_P Parameter: Timepoint (hr) Value: 1
  misc_feature: MA Experiment 108576 PARAMETER Experiment Name: At_42deg_Heat_cDNA_P Parameter: Tissue Value: Aerial
  misc_feature: MA Experiment ID: 20000573 Result: Down-regulated in Transcription
  misc_feature: MA Experiment 20000573 PARAMETER Experiment Name: At_100uM_ABA_Mutants__P Parameter: Organism Value: A. thaliana
  misc_feature: MA Experiment 20000573 PARAMETER Experiment Name: At_100uM_ABA_Mutants__P Parameter: Plant Line Value: CS22 vs. Ler wt
  misc_feature: MA Experiment 20000573 PARAMETER Experiment Name: At_100uM_ABA_Mutants__P Parameter: Timepoint (hr) Value: N/A
  misc_feature: MA Experiment 20000573 PARAMETER Experiment Name: At_100uM_ABA_Mutants__P Parameter: Tissue Value: Whole Plant
  misc_feature: MA Experiment 20000573 PARAMETER Experiment Name: At_100uM_ABA_Mutants__P Parameter: Treatment Value: None
  misc_feature: MA Experiment ID: 20000574 Result: Down-regulated in Transcription
  misc_feature: MA Experiment 20000574 PARAMETER Experiment Name: At_100uM_ABA_Mutants__P Parameter: Organism Value: A. thaliana
  misc_feature: MA Experiment 20000574 PARAMETER Experiment Name: At_100uM_ABA_Mutants__P Parameter: Plant Line Value: CS23 vs. Ler wt
  misc_feature: MA Experiment 20000574 PARAMETER Experiment Name: At_100uM_ABA_Mutants__P Parameter: Timepoint (hr) Value: N/A
  misc_feature: MA Experiment 20000574 PARAMETER Experiment Name: At_100uM_ABA_Mutants__P Parameter: Tissue Value: Whole Plant
  misc_feature: MA Experiment 20000574 PARAMETER Experiment Name: At_100uM_ABA_Mutants__P Parameter: Treatment Value: None
  misc_feature: MA Experiment ID: 20001451 Result: Down-regulated in Transcription
  misc_feature: MA Experiment 20001451 PARAMETER Experiment Name: At_Far-red-induction_P Parameter: Age (day) Value: 7
  misc_feature: MA Experiment 20001451 PARAMETER Experiment Name: At_Far-red-induction_P Parameter: Light Value: Far-red vs. White
  misc_feature: MA Experiment 20001451 PARAMETER Experiment Name: At_Far-red-induction_P Parameter: Organism Value: A. thaliana
  misc_feature: MA Experiment 20001451 PARAMETER Experiment Name: At_Far-red-induction_P Parameter: Plant Line Value: Columbia
  misc_feature: MA Experiment 20001451 PARAMETER Experiment Name: At_Far-red-induction_P Parameter: Timepoint (hr) Value: 24
  misc_feature: MA Experiment 20001451 PARAMETER Experiment Name: At_Far-red-induction_P Parameter: Tissue Value: Whole Plant
  misc_feature: MA Experiment ID: 20001557 Result: Up-regulated in Transcription
  misc_feature: MA Experiment 20001557 PARAMETER Experiment Name: At_Drought_Soil_Dry_P Parameter: Age (day) Value: 27
  misc_feature: MA Experiment 20001557 PARAMETER Experiment Name: At_Drought_Soil_Dry_P Parameter: Organism Value: A. thaliana
  misc_feature: MA Experiment 20001557 PARAMETER Experiment Name: At_Drought_Soil_Dry_P Parameter: Plant Line Value: WS
  misc_feature: MA Experiment 20001557 PARAMETER Experiment Name: At_Drought_Soil_Dry_P Parameter: Post Timepoint (hr) Value: 3
  misc_feature: MA Experiment 20001557 PARAMETER Experiment Name: At_Drought_Soil_Dry_P Parameter: Post-Treatment Value: Re-Water vs. No Drought
  misc_feature: MA Experiment 20001557 PARAMETER Experiment Name: At_Drought_Soil_Dry_P Parameter: Timepoint (day) Value: 13
  misc_feature: MA Experiment 20001557 PARAMETER Experiment Name: At_Drought_Soil_Dry_P Parameter: Treatment Value: Drought vs. No Drought
  misc_feature: MA Experiment ID: 20001558 Result: Up-regulated in Transcription
  misc_feature: MA Experiment 20001558 PARAMETER Experiment Name: At_Drought_Soil_Dry_P Parameter: Age (day) Value: 27
  misc_feature: MA Experiment 20001558 PARAMETER Experiment Name: At_Drought_Soil_Dry_P Parameter: Organism Value: A. thaliana
  misc_feature: MA Experiment 20001558 PARAMETER Experiment Name: At_Drought_Soil_Dry_P Parameter: Plant Line Value: WS
  misc_feature: MA Experiment 20001558 PARAMETER Experiment Name: At_Drought_Soil_Dry_P Parameter: Post Timepoint (hr) Value: 6
  misc_feature: MA Experiment 20001558 PARAMETER Experiment Name: At_Drought_Soil_Dry_P Parameter: Post-Treatment Value: Re-Water vs. No Drought
  misc_feature: MA Experiment 20001558 PARAMETER Experiment Name: At_Drought_Soil_Dry_P Parameter: Timepoint (day) Value: 13
  misc_feature: MA Experiment 20001558 PARAMETER Experiment Name: At_Drought_Soil_Dry_P Parameter: Treatment Value: Drought vs. No Drought
atggattcatcatcgacgaaatcgaagatctcacattcacgcaagacgaacaaaaagtcaaacaagaagcacgaatcaaatgggaaacaacaacaacaacaagacgtcgatggtggtggtgggtgtttgagatcatcatggatctgcaagaatgcatcgtgtagagctaatgtgcctaaagaagattccttttgcaagagatgttcttgttgtgtttgtcataatttcgatgaaaacaaggatcctagtctttggttagtttgtgagcctgagaaatctgatgatgttgagttctgtggcttatcgtgtcacattgagtgtgcttttcgagaagtcaaagttggtgttattgctcttgggaatctgatgaagcttgatggttgtttttgttgctactcatgtggcaaagtttctcaaattcttggatgttggaaaaagcagcttgtggcagcaaaggaagcacgacgacgtgatggactgtgttatagaatagatttgggttatagactgttgaatgggactagtcggtttagtgaattgcatgagattgttagagctgctaagtctatgctggaggatgaagttggacctcttgatggacctactgctagaactgatagaggcattgttagtaggcttcctgttgcagctaatgtgcaagagctttgcacttctgcaattaaaaaggcaggggagttgtcagccaatgcagatttagttccagctgcgtgcaggtttcatttcgaagatattgcaccaaagcaagtgactcttcgtctgattgagctacctagtgctgtagaatatgatgttaagggttacaagttatggtatttcaagaaaggagagatgcctgaggatgatttatttgttgattgcagtagaactgagaggaggatggtgatatctgaccttgagccttgcacggagtacacattccgtgttgtctcttacacagaagctggtatatttggccattcgaacgctatgtgctttacgaagagcgttgagatattgaaaccagtggatggtaaggaaaagagaacaattgatttagtaggtaacgctcagccctcagatagagaggagaaaagtagcatttcctcaagatttcaaattgggcaacttgggaagtatgtgcagttggctgaagctcaggaggaaggcttgcttgaagcgttttacaatgtagatactgagaaaatttgtgagccgccagaggaagaattgccacctcgaaggccacatgggtttgatctaaatgtagtttcagtgccagacttgaatgaggagttcactccacctgattcttctggaggtgaagacaatggagtgccgctaaattcgcttgctgaggctgatggtggtgatcatgatgataactgtgatgatgctgtgtctaacggtagacggaagaacaacaacgactgcttggttatatcagatggaagtggtgatgataccggatttgatttcctcatgaccaggaagaggaaagcaatttcagacagtaatgactcagagaaccacgagtgtgacagttcgtcgattgatgacactcttgagaaatgtgtgaaggtgatcaggtggctggagcgtgaaggccacattaaaacaacattcagggtcaggttcttgacatggttcagcatgagctcaaccgctcaggagcaatctgttgtgagcacatttgtgcagactttagaggatgatccaggtagccttgctggccaacttgtcgacgcatttactgatgttgtctccaccaaaaggccaaacaatggagtaatgacctcacattgatcaagcttcccattgattcaaccacattctttcttagtatgaataatatgattagaactaaatagtccatgatttctctaacgtggattcggctatttatcatcaatttggaccacaggattgaccacattgcaaatctctttggattggggtttagatttaggatttgacataataatattttaaaaaatctccttagggagagtattttgcctctgttccttgtttctgttcatatctaaagaggtcctgcgaaccattcgctctgttgtgtactaactcgtgtaaagtgtcaatttcatcaacttctaaaacaatatcttggttatattgattgatcgtttcagattt

SEQ ID NO: 99338 - protein, 600 aa, Arabidopsis thaliana
  peptide (1)..(600): Ceres Seq. ID no. 13602686
  misc_feature (240)..(328): Pfam Name: Fibronectin type III domain Pfam Description: Fibronectin type III domain
  misc_feature (2)..(336): Homolog of NCBI NO: 38637254 NR Description: putative coiled-coil protein [Oryza sativa
  misc_feature (501)..(595): Homolog of NCBI NO: 38637254 NR Description: putative coiled-coil protein [Oryza sativa
  misc_feature (49)..(333): Homolog of NCBI NO: 15242117 NR Description: hypothetical protein [Arabidopsis thaliana] gene_id:MSF19.4~pir||T14080~strong similarity to unknown protein
  misc_feature (497)..(597): Homolog of NCBI NO: 15242117 NR Description: hypothetical protein [Arabidopsis thaliana] gene_id:MSF19.4~pir||T14080~strong similarity to unknown protein
  misc_feature (49)..(372): Homolog of NCBI NO: 30350861 NR Description: hypothetical protein At2g18880 [Arabidopsis
  misc_feature (501)..(595): Homolog of NCBI NO: 30350861 NR Description: hypothetical protein At2g18880 [Arabidopsis
  misc_feature (49)..(228): Homolog of NCBI NO: 30688585 NR Description: coiled-coil protein [Arabidopsis thaliana] putative protein [Arabidopsis thaliana]
  misc_feature (469)..(591): Homolog of NCBI NO: 30688585 NR Description: coiled-coil protein [Arabidopsis thaliana] putative protein [Arabidopsis thaliana]
  misc_feature (49)..(228): Homolog of NCBI NO: 15234667 NR Description: coiled-coil protein [Arabidopsis thaliana]
  misc_feature (469)..(591): Homolog of NCBI NO: 15234667 NR Description: coiled-coil protein [Arabidopsis thaliana]
MDSSSTKSKISHSRKTNKKSNKKHESNGKQQQQQDVDGGGGCLRSSWICKNASCRANVPKEDSFCKRCSCCVCHNFDENKDPSLWLVCEPEKSDDVEFCGLSCHIECAFREVKVGVIALGNLMKLDGCFCCYSCGKVSQILGCWKKQLVAAKEARRRDGLCYRIDLGYRLLNGTSRFSELHEIVRAAKSMLEDEVGPLDGPTARTDRGIVSRLPVAANVQELCTSAIKKAGELSANADLVPAACRFHFEDIAPKQVTLRLIELPSAVEYDVKGYKLWYFKKGEMPEDDLFVDCSRTERRMVISDLEPCTEYTFRVVSYTEAGIFGHSNAMCFTKSVEILKPVDGKEKRTIDLVGNAQPSDREEKSSISSRFQIGQLGKYVQLAEAQEEGLLEAFYNVDTEKICEPPEEELPPRRPHGFDLNVVSVPDLNEEFTPPDSSGGEDNGVPLNSLAEADGGDHDDNCDDAVSNGRRKNNNDCLVISDGSGDDTGFDFLMTRKRKAISDSNDSENHECDSSSIDDTLEKCVKVIRWLEREGHIKTTFRVRFLTWFSMSSTAQEQSVVSTFVQTLEDDPGSLAGQLVDAFTDVVSTKRPNNGVMTSH

SEQ ID NO: 99339 - protein, 478 aa, Arabidopsis thaliana
  peptide (1)..(478): Ceres Seq. ID no. 13602687
  misc_feature (118)..(206): Pfam Name: Fibronectin type III domain Pfam Description: Fibronectin type III domain
  misc_feature (1)..(214): Homolog of NCBI NO: 38637254 NR Description: putative coiled-coil protein [Oryza sativa
  misc_feature (379)..(473): Homolog of NCBI NO: 38637254 NR Description: putative coiled-coil protein [Oryza sativa
  misc_feature (1)..(211): Homolog of NCBI NO: 15242117 NR Description: hypothetical protein [Arabidopsis thaliana] gene_id:MSF19.4~pir||T14080~strong similarity to unknown protein
  misc_feature (375)..(475): Homolog of NCBI NO: 15242117 NR Description: hypothetical protein [Arabidopsis thaliana] gene_id:MSF19.4~pir||T14080~strong similarity to unknown protein
  misc_feature (1)..(250): Homolog of NCBI NO: 30350861 NR Description: hypothetical protein At2g18880 [Arabidopsis
  misc_feature (379)..(473): Homolog of NCBI NO: 30350861 NR Description: hypothetical protein At2g18880 [Arabidopsis
  misc_feature (1)..(106): Homolog of NCBI NO: 30688585 NR Description: coiled-coil protein [Arabidopsis thaliana] putative protein [Arabidopsis thaliana]
  misc_feature (347)..(469): Homolog of NCBI NO: 30688585 NR Description: coiled-coil protein [Arabidopsis thaliana] putative protein [Arabidopsis thaliana]
  misc_feature (1)..(106): Homolog of NCBI NO: 15234667 NR Description: coiled-coil protein [Arabidopsis thaliana]
  misc_feature (347)..(469): Homolog of NCBI NO: 15234667 NR Description: coiled-coil protein [Arabidopsis thaliana]
MKLDGCFCCYSCGKVSQILGCWKKQLVAAKEARRRDGLCYRIDLGYRLLNGTSRFSELHEIVRAAKSMLEDEVGPLDGPTARTDRGIVSRLPVAANVQELCTSAIKKAGELSANADLVPAACRFHFEDIAPKQVTLRLIELPSAVEYDVKGYKLWYFKKGEMPEDDLFVDCSRTERRMVISDLEPCTEYTFRVVSYTEAGIFGHSNAMCFTKSVEILKPVDGKEKRTIDLVGNAQPSDREEKSSISSRFQIGQLGKYVQLAEAQEEGLLEAFYNVDTEKICEPPEEELPPRRPHGFDLNVVSVPDLNEEFTPPDSSGGEDNGVPLNSLAEADGGDHDDNCDDAVSNGRRKNNNDCLVISDGSGDDTGFDFLMTRKRKAISDSNDSENHECDSSSIDDTLEKCVKVIRWLEREGHIKTTFRVRFLTWFSMSSTAQEQSVVSTFVQTLEDDPGSLAGQLVDAFTDVVSTKRPNNGVMTSH

SEQ ID NO: 99340 - protein, 411 aa, Arabidopsis thaliana
  peptide (1)..(411): Ceres Seq. ID no. 13602688
  misc_feature (51)..(139): Pfam Name: Fibronectin type III domain Pfam Description: Fibronectin type III domain
  misc_feature (1)..(147): Homolog of NCBI NO: 38637254 NR Description: putative coiled-coil protein [Oryza sativa
  misc_feature (312)..(406): Homolog of NCBI NO: 38637254 NR Description: putative coiled-coil protein [Oryza sativa
  misc_feature (1)..(144): Homolog of NCBI NO: 15242117 NR Description: hypothetical protein [Arabidopsis thaliana] gene_id:MSF19.4~pir||T14080~strong similarity to unknown protein
  misc_feature (308)..(408): Homolog of NCBI NO: 15242117 NR Description: hypothetical protein [Arabidopsis thaliana] gene_id:MSF19.4~pir||T14080~strong similarity to unknown protein
  misc_feature (1)..(183): Homolog of NCBI NO: 30350861 NR Description: hypothetical protein At2g18880 [Arabidopsis
  misc_feature (312)..(406): Homolog of NCBI NO: 30350861 NR Description: hypothetical protein At2g18880 [Arabidopsis
  misc_feature (1)..(39): Homolog of NCBI NO: 30688585 NR Description: coiled-coil protein [Arabidopsis thaliana] putative protein [Arabidopsis thaliana]
  misc_feature (280)..(402): Homolog of NCBI NO: 30688585 NR Description: coiled-coil protein [Arabidopsis thaliana] putative protein [Arabidopsis thaliana]
  misc_feature (1)..(39): Homolog of NCBI NO: 15234667 NR Description: coiled-coil protein [Arabidopsis thaliana]
  misc_feature (280)..(402): Homolog of NCBI NO: 15234667 NR Description: coiled-coil protein [Arabidopsis thaliana]
MLEDEVGPLDGPTARTDRGIVSRLPVAANVQELCTSAIKKAGELSANADLVPAACRFHFEDIAPKQVTLRLIELPSAVEYDVKGYKLWYFKKGEMPEDDLFVDCSRTERRMVISDLEPCTEYTFRVVSYTEAGIFGHSNAMCFTKSVEILKPVDGKEKRTIDLVGNAQPSDREEKSSISSRFQIGQLGKYVQLAEAQEEGLLEAFYNVDTEKICEPPEEELPPRRPHGFDLNVVSVPDLNEEFTPPDSSGGEDNGVPLNSLAEADGGDHDDNCDDAVSNGRRKNNNDCLVISDGSGDDTGFDFLMTRKRKAISDSNDSENHECDSSSIDDTLEKCVKVIRWLEREGHIKTTFRVRFLTWFSMSSTAQEQSVVSTFVQTLEDDPGSLAGQLVDAFTDVVSTKRPNNGVMTSH

SEQ ID NO: 99341 - DNA, 624 bp, Arabidopsis thaliana
  misc_feature (1)..(624): Ceres Seq. ID no. 13602689
  misc_feature: MA Experiment ID: 108462 Result: Up-regulated in Transcription
  misc_feature: MA Experiment 108462 PARAMETER Experiment Name: At_Germinating_Seeds_cDNA_P Parameter: Age (day) Value: 2 vs. 0
  misc_feature: MA Experiment 108462 PARAMETER Experiment Name: At_Germinating_Seeds_cDNA_P Parameter: Tissue Value: Germinating Seeds
  misc_feature: MA Experiment ID: 108463 Result: Up-regulated in Transcription
  misc_feature: MA Experiment 108463 PARAMETER Experiment Name: At_Germinating_Seeds_cDNA_P Parameter: Age (day) Value: 3 vs. 0
  misc_feature: MA Experiment 108463 PARAMETER Experiment Name: At_Germinating_Seeds_cDNA_P Parameter: Tissue Value: Germinating Seeds
  misc_feature: MA Experiment ID: 108473 Result: Up-regulated in Transcription
  misc_feature: MA Experiment 108473 PARAMETER Experiment Name: At_Drought_Flowers_cDNA_P Parameter: Timepoint (hr) Value: 7 d
  misc_feature: MA Experiment 108473 PARAMETER Experiment Name: At_Drought_Flowers_cDNA_P Parameter: Tissue Value: Flower
  misc_feature: MA Experiment 108473 PARAMETER Experiment Name: At_Drought_Flowers_cDNA_P Parameter: Treatment Value: Drought vs. No Drought
  misc_feature: MA Experiment ID: 108488 Result: Down-regulated in Transcription
  misc_feature: MA Experiment ID: 108561 Result: Up-regulated in Transcription
  misc_feature: MA Experiment 108561 PARAMETER Experiment Name: At_100uM_ABA_cDNA_P Parameter: Timepoint (hr) Value: 6
  misc_feature: MA Experiment 108561 PARAMETER Experiment Name: At_100uM_ABA_cDNA_P Parameter: Tissue Value: Aerial
  misc_feature: MA Experiment 108561 PARAMETER Experiment Name: At_100uM_ABA_cDNA_P Parameter: Treatment Value: 100uM ABA vs. No Treatment
  misc_feature: MA Experiment ID: 108572 Result: Up-regulated in Transcription
  misc_feature: MA Experiment 108572 PARAMETER Experiment Name: At_Drought_cDNA_P Parameter: Timepoint (hr) Value: 1
  misc_feature: MA Experiment 108572 PARAMETER Experiment Name: At_Drought_cDNA_P Parameter: Tissue Value: Aerial
  misc_feature: MA Experiment 108572 PARAMETER Experiment Name: At_Drought_cDNA_P Parameter: Treatment Value: Drought vs. No Drought
  misc_feature: MA Experiment ID: 108576 Result: Up-regulated in Transcription
  misc_feature: MA Experiment 108576 PARAMETER Experiment Name: At_42deg_Heat_cDNA_P Parameter: Temperature (deg C) Value: 42 vs. 22
  misc_feature: MA Experiment 108576 PARAMETER Experiment Name: At_42deg_Heat_cDNA_P Parameter: Timepoint (hr) Value: 1
  misc_feature: MA Experiment 108576 PARAMETER Experiment Name: At_42deg_Heat_cDNA_P Parameter: Tissue Value: Aerial
  misc_feature: MA Experiment ID: 108577 Result: Up-regulated in Transcription
  misc_feature: MA Experiment 108577 PARAMETER Experiment Name: At_42deg_Heat_cDNA_P Parameter: Temperature (deg C) Value: 42 vs. 22
  misc_feature: MA Experiment 108577 PARAMETER Experiment Name: At_42deg_Heat_cDNA_P Parameter: Timepoint (hr) Value: 6
  misc_feature: MA Experiment 108577 PARAMETER Experiment Name: At_42deg_Heat_cDNA_P Parameter: Tissue Value: Aerial
  misc_feature: MA Experiment ID: 108594 Result: Down-regulated in Transcription
  misc_feature: MA Experiment 108594 PARAMETER Experiment Name: At_Ler-rhl_Root_cDNA_P Parameter: Plant Line Value: null
  misc_feature: MA Experiment ID: 108595 Result: Up-regulated in Transcription
  misc_feature: MA Experiment 108595 PARAMETER Experiment Name: At_Ler-pi_Ovule_cDNA_P Parameter: Plant Line Value: null
  misc_feature: MA Experiment ID: 108607 Result: Up-regulated in Transcription
  misc_feature: MA Experiment 108607 PARAMETER Experiment Name: At_100uM_ABA_cDNA_P Parameter: Timepoint (hr) Value: 4
  misc_feature: MA Experiment 108607 PARAMETER Experiment Name: At_100uM_ABA_cDNA_P Parameter: Tissue Value: Aerial
  misc_feature: MA Experiment 108607 PARAMETER Experiment Name: At_100uM_ABA_cDNA_P Parameter: Treatment Value: 100uM ABA vs. No Treatment
  misc_feature: MA Experiment ID: 108608 Result: Up-regulated in Transcription
  misc_feature: MA Experiment 108608 PARAMETER Experiment Name: At_100uM_ABA_cDNA_P Parameter: Timepoint (hr) Value: 1
  misc_feature: MA Experiment 108608 PARAMETER Experiment Name: At_100uM_ABA_cDNA_P Parameter: Tissue Value: Aerial
  misc_feature: MA Experiment 108608 PARAMETER Experiment Name: At_100uM_ABA_cDNA_P Parameter: Treatment Value: 100uM ABA vs. No Treatment
  misc_feature: MA Experiment ID: 108609 Result: Up-regulated in Transcription
  misc_feature: MA Experiment 108609 PARAMETER Experiment Name: At_100uM_ABA_cDNA_P Parameter: Timepoint (hr) Value: 24
  misc_feature: MA Experiment 108609 PARAMETER Experiment Name: At_100uM_ABA_cDNA_P Parameter: Tissue Value: Aerial
  misc_feature: MA Experiment 108609 PARAMETER Experiment Name: At_100uM_ABA_cDNA_P Parameter: Treatment Value: 100uM ABA vs. No Treatment
  misc_feature: MA Experiment ID: 108668 Result: Up-regulated in Transcription
  misc_feature: MA Experiment 108668 PARAMETER Experiment Name: At_2mM_SA_cDNA_P Parameter: Plant Line Value: WS
  misc_feature: MA Experiment 108668 PARAMETER Experiment Name: At_2mM_SA_cDNA_P Parameter: Timepoint (hr) Value: 6
  misc_feature: MA Experiment 108668 PARAMETER Experiment Name: At_2mM_SA_cDNA_P Parameter: Treatment Value: 2mM SA vs. No Treatment
  misc_feature: MA Experiment ID: 20000070 Result: Up-regulated in Transcription
  misc_feature: MA Experiment 20000070 PARAMETER Experiment Name: At_100uM_ABA_Mutants_cDNA_P Parameter: Plant Line Value: CS24
  misc_feature: MA Experiment 20000070 PARAMETER Experiment Name: At_100uM_ABA_Mutants_cDNA_P Parameter: Timepoint (hr) Value: 6
  misc_feature: MA Experiment 20000070 PARAMETER Experiment Name: At_100uM_ABA_Mutants_cDNA_P Parameter: Tissue Value: Aerial
  misc_feature: MA Experiment 20000070 PARAMETER Experiment Name: At_100uM_ABA_Mutants_cDNA_P Parameter: Treatment Value: 100uM ABA vs. No Treatment
  misc_feature: MA Experiment ID: 20000087 Result: Up-regulated in Transcription
  misc_feature: MA Experiment 20000087 PARAMETER Experiment Name: At_100uM_ABA_Mutants_cDNA_P Parameter: Plant Line Value: WS
  misc_feature: MA Experiment 20000087 PARAMETER Experiment Name: At_100uM_ABA_Mutants_cDNA_P Parameter: Timepoint (hr) Value: 6
  misc_feature: MA Experiment 20000087 PARAMETER Experiment Name: At_100uM_ABA_Mutants_cDNA_P Parameter: Tissue Value: Aerial
  misc_feature: MA Experiment 20000087 PARAMETER Experiment Name: At_100uM_ABA_Mutants_cDNA_P Parameter: Treatment Value: 100uM ABA vs. No Treatment
  misc_feature: MA Experiment ID: 20000089 Result: Up-regulated in Transcription
  misc_feature: MA Experiment ID: 20000093 Result: Up-regulated in Transcription
  misc_feature: MA Experiment 20000093 PARAMETER Experiment Name: At_42deg_Heat_cDNA_P Parameter: Temperature (deg C) Value: 42 vs. 22
  misc_feature: MA Experiment 20000093 PARAMETER Experiment Name: At_42deg_Heat_cDNA_P Parameter: Timepoint (hr) Value: 0.5
  misc_feature: MA Experiment 20000093 PARAMETER Experiment Name: At_42deg_Heat_cDNA_P Parameter: Tissue Value: Aerial
  misc_feature: MA Experiment ID: 20000117 Result: Up-regulated in Transcription
  misc_feature: MA Experiment 20000117 PARAMETER Experiment Name: At_100uM_ABA_Mutants_cDNA_P Parameter: Plant Line Value: Columbia
  misc_feature: MA Experiment 20000117 PARAMETER Experiment Name: At_100uM_ABA_Mutants_cDNA_P Parameter: Timepoint (hr) Value: 6
  misc_feature: MA Experiment 20000117 PARAMETER Experiment Name: At_100uM_ABA_Mutants_cDNA_P Parameter: Tissue Value: Aerial
  misc_feature: MA Experiment 20000117 PARAMETER Experiment Name: At_100uM_ABA_Mutants_cDNA_P Parameter: Treatment Value: 100uM ABA vs. No Treatment
  misc_feature: MA Experiment ID: 20000166 Result: Up-regulated in Transcription
  misc_feature: MA Experiment 20000166 PARAMETER Experiment Name: At_100uM_ABA_P Parameter: Age (day) Value: 14
  misc_feature: MA Experiment 20000166 PARAMETER Experiment Name: At_100uM_ABA_P Parameter: Organism Value: A. thaliana
  misc_feature: MA Experiment 20000166 PARAMETER Experiment Name: At_100uM_ABA_P Parameter: Plant Line Value: WS
  misc_feature: MA Experiment 20000166 PARAMETER Experiment Name: At_100uM_ABA_P Parameter: Timepoint (hr) Value: 1
  misc_feature: MA Experiment 20000166 PARAMETER Experiment Name: At_100uM_ABA_P Parameter: Tissue Value: Aerial
  misc_feature: MA Experiment 20000166 PARAMETER Experiment Name: At_100uM_ABA_P Parameter: Treatment Value: 100uM ABA vs. No Treatment
  misc_feature: MA Experiment ID: 20000171 Result: Up-regulated in Transcription
  misc_feature: MA Experiment 20000171 PARAMETER Experiment Name: At_42deg_Heat_P Parameter: Age (day) Value: 14
  misc_feature: MA Experiment 20000171 PARAMETER Experiment Name: At_42deg_Heat_P Parameter: Organism Value: A. thaliana
  misc_feature: MA Experiment 20000171 PARAMETER Experiment Name: At_42deg_Heat_P Parameter: Plant Line Value: WS
  misc_feature: MA Experiment 20000171 PARAMETER Experiment Name: At_42deg_Heat_P Parameter: Temperature (deg C) Value: 42 vs. 22
  misc_feature: MA Experiment 20000171 PARAMETER Experiment Name: At_42deg_Heat_P Parameter: Timepoint (hr) Value: 1
  misc_feature: MA Experiment 20000171 PARAMETER Experiment Name: At_42deg_Heat_P Parameter: Tissue Value: Aerial
  misc_feature: MA Experiment ID: 20000173 Result: Up-regulated in Transcription
  misc_feature: MA Experiment 20000173 PARAMETER Experiment Name: At_42deg_Heat_P Parameter: Age (day) Value: 14
  misc_feature: MA Experiment 20000173 PARAMETER Experiment Name: At_42deg_Heat_P Parameter: Organism Value: A. thaliana
  misc_feature: MA Experiment 20000173 PARAMETER Experiment Name: At_42deg_Heat_P Parameter: Plant Line Value: WS
  misc_feature: MA Experiment 20000173 PARAMETER Experiment Name: At_42deg_Heat_P Parameter: Temperature (deg C) Value: 42 vs. 22
  misc_feature: MA Experiment 20000173 PARAMETER Experiment Name: At_42deg_Heat_P Parameter: Timepoint (hr) Value: 6
  misc_feature: MA Experiment 20000173 PARAMETER Experiment Name: At_42deg_Heat_P Parameter: Tissue Value: Aerial
  misc_feature: MA Experiment ID: 20000179 Result: Up-regulated in Transcription
  misc_feature: MA Experiment 20000179 PARAMETER Experiment Name: At_Germinating_Seeds_P Parameter: Age (hr) Value: 6 vs. 0
  misc_feature: MA Experiment 20000179 PARAMETER Experiment Name: At_Germinating_Seeds_P Parameter: Tissue Value: Germinating Seeds
  misc_feature: MA Experiment ID: 20000180 Result: Up-regulated in Transcription
  misc_feature: MA Experiment 20000180 PARAMETER Experiment Name: At_Germinating_Seeds_P Parameter: Age (hr) Value: 24 vs. 0
  misc_feature: MA Experiment 20000180 PARAMETER Experiment Name: At_Germinating_Seeds_P Parameter: Tissue Value: Germinating Seeds
  misc_feature: MA Experiment ID: 20000182 Result: Up-regulated in Transcription
  misc_feature: MA Experiment 20000182 PARAMETER Experiment Name: At_2mM_SA_P Parameter: Age (day) Value: 14
  misc_feature: MA Experiment 20000182 PARAMETER Experiment Name: At_2mM_SA_P Parameter: Organism Value: A. thaliana
  misc_feature: MA Experiment 20000182 PARAMETER Experiment Name: At_2mM_SA_P Parameter: Plant Line Value: WS
  misc_feature: MA Experiment 20000182 PARAMETER Experiment Name: At_2mM_SA_P Parameter: Timepoint (hr) Value: 6
  misc_feature: MA Experiment 20000182 PARAMETER Experiment Name: At_2mM_SA_P Parameter: Tissue Value: Aerial
  misc_feature: MA Experiment 20000182 PARAMETER Experiment Name: At_2mM_SA_P Parameter: Treatment Value: 2mM SA vs. No Treatment
  misc_feature: MA Experiment ID: 20000224 Result: Up-regulated in Transcription
  misc_feature: MA Experiment ID: 20000264 Result: Down-regulated in Transcription
  misc_feature: MA Experiment 20000264 PARAMETER Experiment Name: At_Open_Flower_P Parameter: Age (day) Value: 21
  misc_feature: MA Experiment 20000264 PARAMETER Experiment Name: At_Open_Flower_P Parameter: Plant Line Value: WS
  misc_feature: MA Experiment 20000264 PARAMETER Experiment Name: At_Open_Flower_P Parameter: Tissue Value: Open Flower vs. Whole Plant
  misc_feature: MA Experiment ID: 20000265 Result: Down-regulated in Transcription
  misc_feature: MA Experiment 20000265 PARAMETER Experiment Name: At_Open_Flower_P Parameter: Age (day) Value: 21
  misc_feature: MA Experiment 20000265 PARAMETER Experiment Name: At_Open_Flower_P Parameter: Plant Line Value: WS
  misc_feature: MA Experiment 20000265 PARAMETER Experiment Name: At_Open_Flower_P Parameter: Tissue Value: Closed Flower vs. Whole Plant
  misc_feature: MA Experiment ID: 20000286 Result: Down-regulated in Transcription
  misc_feature: MA Experiment 20000286 PARAMETER Experiment Name: At_Open_Flower_P Parameter: Age (day) Value: 21
  misc_feature: MA Experiment 20000286 PARAMETER Experiment Name: At_Open_Flower_P Parameter: Plant Line Value: WS
  misc_feature: MA Experiment 20000286 PARAMETER Experiment Name: At_Open_Flower_P Parameter: Tissue Value: Half Open vs. Whole Plant
  misc_feature: MA Experiment ID: 20000436 Result: Up-regulated in Transcription
  misc_feature: MA Experiment 20000436 PARAMETER Experiment Name: At_Drought_P Parameter: Age (day) Value: 7
  misc_feature: MA Experiment 20000436 PARAMETER Experiment Name: At_Drought_P Parameter: Organism Value: A. thaliana
  misc_feature: MA Experiment 20000436 PARAMETER Experiment Name: At_Drought_P Parameter: Plant Line Value: WS
  misc_feature: MA Experiment 20000436 PARAMETER Experiment Name: At_Drought_P Parameter: Timepoint (hr) Value: 12
  misc_feature: MA Experiment 20000436 PARAMETER Experiment Name: At_Drought_P Parameter: Tissue Value: Whole Plant
  misc_feature: MA Experiment 20000436 PARAMETER Experiment Name: At_Drought_P Parameter: Treatment Value: Drought vs. No Drought
  misc_feature: MA Experiment ID: 20000437 Result: Up-regulated in Transcription
  misc_feature: MA Experiment 20000437 PARAMETER Experiment Name: At_Drought_P Parameter: Age (day) Value: 8
  misc_feature: MA Experiment 20000437 PARAMETER Experiment Name: At_Drought_P Parameter: Organism Value: A. thaliana
  misc_feature: MA Experiment 20000437 PARAMETER Experiment Name: At_Drought_P Parameter: Plant Line Value: WS
  misc_feature: MA Experiment 20000437 PARAMETER Experiment Name: At_Drought_P Parameter: Timepoint (hr) Value: 24
  misc_feature: MA Experiment 20000437 PARAMETER Experiment Name: At_Drought_P Parameter: Tissue Value: Whole Plant
  misc_feature: MA Experiment 20000437 PARAMETER Experiment Name: At_Drought_P Parameter: Treatment Value: Drought vs. No Drought
  misc_feature: MA Experiment ID: 20000441 Result: Up-regulated in Transcription
  misc_feature: MA Experiment 20000441 PARAMETER Experiment Name: At_1uM_BR-BRZ__P Parameter: Tissue Value: Shoot Apices
  misc_feature: MA Experiment 20000441 PARAMETER Experiment Name: At_1uM_BR-BRZ__P Parameter: Treatment Value: 1uM BR vs. No Treatment
  misc_feature: MA Experiment ID: 20000443 Result: Up-regulated in Transcription
  misc_feature: MA Experiment 20000443 PARAMETER Experiment Name: At_1uM_BR-BRZ__P Parameter: Tissue Value: Shoot Apices
  misc_feature: MA Experiment 20000443 PARAMETER Experiment Name: At_1uM_BR-BRZ__P Parameter: Treatment Value: 1uM BRZ vs. No Treatment
  misc_feature: MA Experiment ID: 20000453 Result: Up-regulated in Transcription
  misc_feature: MA Experiment 20000453 PARAMETER Experiment Name: At_100uM_ABA_P Parameter: Age (day) Value: 15
  misc_feature: MA Experiment 20000453 PARAMETER Experiment Name: At_100uM_ABA_P Parameter: Organism Value: A. thaliana
  misc_feature: MA Experiment 20000453 PARAMETER Experiment Name: At_100uM_ABA_P Parameter: Plant Line Value: WS
  misc_feature: MA Experiment 20000453 PARAMETER Experiment Name: At_100uM_ABA_P Parameter: Timepoint (hr) Value: 24
  misc_feature: MA Experiment 20000453 PARAMETER Experiment Name: At_100uM_ABA_P Parameter: Tissue Value: Aerial
  misc_feature: MA Experiment 20000453 PARAMETER Experiment Name: At_100uM_ABA_P Parameter: Treatment Value: 100uM ABA vs. No Treatment
  misc_feature: MA Experiment ID: 20000709 Result: Up-regulated in Transcription
  misc_feature: MA Experiment 20000709 PARAMETER Experiment Name: At_15mM_NH4NO3_L-to-H_P Parameter: Age (hr) Value: 14
  misc_feature: MA Experiment 20000709 PARAMETER Experiment Name: At_15mM_NH4NO3_L-to-H_P Parameter: Organism Value: A. thaliana
  misc_feature: MA Experiment 20000709 PARAMETER Experiment Name: At_15mM_NH4NO3_L-to-H_P Parameter: Plant Line Value: WS
  misc_feature: MA Experiment 20000709 PARAMETER Experiment Name: At_15mM_NH4NO3_L-to-H_P Parameter: Timepoint (hr) Value: 4
  misc_feature: MA Experiment 20000709 PARAMETER Experiment Name: At_15mM_NH4NO3_L-to-H_P Parameter: Tissue Value: Aerial
  misc_feature: MA Experiment 20000709 PARAMETER Experiment Name: At_15mM_NH4NO3_L-to-H_P Parameter: Treatment Value: 15mM NH4NO3 vs. 30mM Mannitol
  misc_feature: MA Experiment ID: 20001247 Result: Down-regulated in Transcription
  misc_feature: MA Experiment 20001247 PARAMETER Experiment Name: At_Far-red-induction_P Parameter: Age (day) Value: 7
  misc_feature: MA Experiment 20001247 PARAMETER Experiment Name: At_Far-red-induction_P Parameter: Light Value: Far-red vs. White
  misc_feature: MA Experiment 20001247 PARAMETER Experiment Name: At_Far-red-induction_P Parameter: Organism Value: A. thaliana
  misc_feature: MA Experiment 20001247 PARAMETER Experiment Name: At_Far-red-induction_P Parameter: Plant Line Value: Columbia
  misc_feature: MA Experiment 20001247 PARAMETER Experiment Name: At_Far-red-induction_P Parameter: Timepoint (hr) Value: 1
  misc_feature: MA Experiment 20001247 PARAMETER Experiment Name: At_Far-red-induction_P Parameter: Tissue Value: Whole Plant
  misc_feature: MA Experiment ID: 20001248 Result: Down-regulated in Transcription
  misc_feature: MA Experiment 20001248 PARAMETER Experiment Name: At_Far-red-induction_P Parameter: Age (day) Value: 7
  misc_feature: MA Experiment 20001248 PARAMETER Experiment Name: At_Far-red-induction_P Parameter: Light Value: Far-red vs. White
  misc_feature: MA Experiment 20001248 PARAMETER Experiment Name: At_Far-red-induction_P Parameter: Organism Value: A. thaliana
  misc_feature: MA Experiment 20001248 PARAMETER Experiment Name: At_Far-red-induction_P Parameter: Plant Line Value: Columbia
  misc_feature: MA Experiment 20001248 PARAMETER Experiment Name: At_Far-red-induction_P Parameter: Timepoint (hr) Value: 4
  misc_feature: MA Experiment 20001248 PARAMETER Experiment Name: At_Far-red-induction_P Parameter: Tissue Value: Whole Plant
  misc_feature: MA Experiment ID: 20001450 Result: Down-regulated in Transcription
  misc_feature: MA Experiment 20001450 PARAMETER Experiment Name: At_Far-red-induction_P Parameter: Age (day) Value: 7
  misc_feature: MA Experiment 20001450 PARAMETER Experiment Name: At_Far-red-induction_P Parameter: Light Value: Far-red vs. White
  misc_feature: MA Experiment 20001450 PARAMETER Experiment Name: At_Far-red-induction_P Parameter: Organism Value: A. thaliana
  misc_feature: MA Experiment 20001450 PARAMETER Experiment Name: At_Far-red-induction_P Parameter: Plant Line Value: Columbia
  misc_feature: MA Experiment 20001450 PARAMETER Experiment Name: At_Far-red-induction_P Parameter: Timepoint (hr) Value: 8
  misc_feature: MA Experiment 20001450 PARAMETER Experiment Name: At_Far-red-induction_P Parameter: Tissue Value: Whole Plant
  misc_feature: MA Experiment ID: 20001554 Result: Up-regulated in Transcription
  misc_feature: MA Experiment 20001554 PARAMETER Experiment Name: At_Drought_Soil_Dry_P Parameter: Age (day) Value: 21
  misc_feature: MA Experiment 20001554 PARAMETER Experiment Name: At_Drought_Soil_Dry_P Parameter: Organism Value: A. thaliana
  misc_feature: MA Experiment 20001554 PARAMETER Experiment Name: At_Drought_Soil_Dry_P Parameter: Plant Line Value: WS
  misc_feature: MA Experiment 20001554 PARAMETER Experiment Name: At_Drought_Soil_Dry_P Parameter: Post Timepoint (hr) Value: None
  misc_feature: MA Experiment 20001554 PARAMETER Experiment Name: At_Drought_Soil_Dry_P Parameter: Post-Treatment Value: None
  misc_feature: MA Experiment 20001554 PARAMETER Experiment Name: At_Drought_Soil_Dry_P Parameter: Timepoint (day) Value: 7
  misc_feature: MA Experiment 20001554 PARAMETER Experiment Name: At_Drought_Soil_Dry_P Parameter: Treatment Value: Drought vs. No Drought
  misc_feature: MA Experiment ID: 20001555 Result: Up-regulated in Transcription
  misc_feature: MA Experiment 20001555 PARAMETER Experiment Name: At_Drought_Soil_Dry_P Parameter: Age (day) Value: 24
  misc_feature: MA Experiment 20001555 PARAMETER Experiment Name: At_Drought_Soil_Dry_P Parameter: Organism Value: A. thaliana
  misc_feature: MA Experiment 20001555 PARAMETER Experiment Name: At_Drought_Soil_Dry_P Parameter: Plant Line Value: WS
  misc_feature: MA Experiment 20001555 PARAMETER Experiment Name: At_Drought_Soil_Dry_P Parameter: Post Timepoint (hr) Value: None
  misc_feature: MA Experiment 20001555 PARAMETER Experiment Name: At_Drought_Soil_Dry_P Parameter: Post-Treatment Value: None
  misc_feature: MA Experiment 20001555 PARAMETER Experiment Name: At_Drought_Soil_Dry_P Parameter: Timepoint (day) Value: 10
  misc_feature: MA Experiment 20001555 PARAMETER Experiment Name: At_Drought_Soil_Dry_P Parameter: Treatment Value: Drought vs. No Drought
  misc_feature: MA Experiment ID: 20001772 Result: Down-regulated in Transcription
  misc_feature: MA Experiment 20001772 PARAMETER Experiment Name: At_Far-red-enriched-adult_P Parameter: Age (day) Value: 29
  misc_feature: MA Experiment 20001772 PARAMETER Experiment Name: At_Far-red-enriched-adult_P Parameter: Light Value: Far-red enriched vs. White
  misc_feature: MA Experiment 20001772 PARAMETER Experiment Name: At_Far-red-enriched-adult_P Parameter: Organism Value: A. thaliana
  misc_feature: MA Experiment 20001772 PARAMETER Experiment Name: At_Far-red-enriched-adult_P Parameter: Plant Line Value: Columbia
  misc_feature: MA Experiment 20001772 PARAMETER Experiment Name: At_Far-red-enriched-adult_P Parameter: Timepoint (hr) Value: 24
  misc_feature: MA Experiment 20001772 PARAMETER Experiment Name: At_Far-red-enriched-adult_P Parameter: Tissue Value: Aerial
  misc_feature: MA Experiment ID: 20001905 Result: Up-regulated in Transcription
  misc_feature: MA Experiment 20001905 PARAMETER Experiment Name: At_Drought_Reproduction_P Parameter: Age (day) Value: 40
  misc_feature: MA Experiment 20001905 PARAMETER Experiment Name: At_Drought_Reproduction_P Parameter: Organism Value: A. thaliana
  misc_feature: MA Experiment 20001905 PARAMETER Experiment Name: At_Drought_Reproduction_P Parameter: Plant Line Value: WS
  misc_feature: MA Experiment 20001905 PARAMETER Experiment Name: At_Drought_Reproduction_P Parameter: Timepoint (day) Value: 10
  misc_feature: MA Experiment 20001905 PARAMETER Experiment Name: At_Drought_Reproduction_P Parameter: Tissue Value: Rosettes
  misc_feature: MA Experiment 20001905 PARAMETER Experiment Name: At_Drought_Reproduction_P Parameter: Treatment Value: Drought vs. No Drought
  misc_feature: MA Experiment ID: 20001906 Result: Up-regulated in Transcription
  misc_feature: MA Experiment 20001906 PARAMETER Experiment Name: At_Drought_Reproduction_P Parameter: Age (day) Value: 35
  misc_feature: MA Experiment 20001906 PARAMETER Experiment Name: At_Drought_Reproduction_P Parameter: Organism Value: A. thaliana
  misc_feature: MA Experiment 20001906 PARAMETER Experiment Name: At_Drought_Reproduction_P Parameter: Plant Line Value: WS
  misc_feature: MA Experiment 20001906 PARAMETER Experiment Name: At_Drought_Reproduction_P Parameter: Timepoint (day) Value: 5
  misc_feature: MA Experiment 20001906 PARAMETER Experiment Name: At_Drought_Reproduction_P Parameter: Tissue Value: Siliques
  misc_feature: MA Experiment 20001906 PARAMETER Experiment Name: At_Drought_Reproduction_P Parameter: Treatment Value: Drought vs. No Drought
  misc_feature: MA Experiment ID: 20001908 Result: Up-regulated in Transcription
  misc_feature: MA Experiment 20001908 PARAMETER Experiment Name: At_Drought_Reproduction_P Parameter: Age (day) Value: 40
  misc_feature: MA Experiment 20001908 PARAMETER Experiment Name: At_Drought_Reproduction_P Parameter: Organism Value: A. thaliana
  misc_feature: MA Experiment 20001908 PARAMETER Experiment Name: At_Drought_Reproduction_P Parameter: Plant Line Value: WS
  misc_feature: MA Experiment 20001908 PARAMETER Experiment Name: At_Drought_Reproduction_P Parameter: Timepoint (day) Value: 10
  misc_feature: MA Experiment 20001908 PARAMETER Experiment Name: At_Drought_Reproduction_P Parameter: Tissue Value: Siliques
  misc_feature: MA Experiment 20001908 PARAMETER Experiment Name: At_Drought_Reproduction_P Parameter: Treatment Value: Drought vs. No Drought
  misc_feature: MA Experiment ID: 20001911 Result: Up-regulated in Transcription
  misc_feature: MA Experiment 20001911 PARAMETER Experiment Name: At_Drought_Reproduction_P Parameter: Age (day) Value: 40
  misc_feature: MA Experiment 20001911 PARAMETER Experiment Name: At_Drought_Reproduction_P Parameter: Organism Value: A. thaliana
  misc_feature: MA Experiment 20001911 PARAMETER Experiment Name: At_Drought_Reproduction_P Parameter: Plant Line Value: WS
  misc_feature: MA Experiment 20001911 PARAMETER Experiment Name: At_Drought_Reproduction_P Parameter: Timepoint (day) Value: 10
  misc_feature: MA Experiment 20001911 PARAMETER Experiment Name: At_Drought_Reproduction_P Parameter: Tissue Value: Flowers
  misc_feature: MA Experiment 20001911 PARAMETER Experiment Name: At_Drought_Reproduction_P Parameter: Treatment Value: Drought vs. No Drought
atcttcatcgtttctcaatttcaaaactcagattaataaaattttcgcgttgttcctttctctcaattcatcgacgatgccgagcagatacccaggagcagtaacacaagactgggaaccagtagttctccacaaatcaaaacaaaagagccaagacctacgcgatccgaaagcggttaacgcagctctgagaaacggtgtcgcggttcaaacggttaagaaattcgatgccggttcgaacaaaaaggggaaatctacggcggttccggtgattaacacgaagaagctggaagaagaaacagagcctgcggcgatggatcgtgtgaaagcagaggtgaggttgatgatacagaaagcgagattggagaagaagatgtcacaagcggatttggcgaaacagatcaatgagaggactcaggtagttcaggaatatgagaatggtaaagctgttcctaatcaggctgtgcttgcgaagatggagaaggttctaggtgttaaacttaggggtaaaattgggaaatgattaaacgatgtcgtttatcttgtattttgttgaccaatgtaaaaagtaaaaaaaaagtcttgttgttttgtttgataaatgaaaaaacaatatatatcttt

SEQ ID NO: 99342 - protein, 173 aa, Arabidopsis thaliana
  peptide (1)..(173): Ceres Seq. ID no. 13602690
  misc_feature (116)..(170): Pfam Name: Helix-turn-helix Pfam Description: Helix-turn-helix
  misc_feature (26)..(173): Homolog of NCBI NO: 15230125 NR Description: ethylene-responsive transcriptional coactivator
  misc_feature (26)..(173): Homolog of NCBI NO: 21553721 NR Description: ethylene-responsive transcriptional coactivator,
  misc_feature (26)..(173): Homolog of NCBI NO: 19225065 NR Description: ethylene-responsive transciptional
  misc_feature (26)..(173): Homolog of NCBI NO: 5669634 NR Description: ethylene-responsive transcriptional coactivator
  misc_feature (32)..(170): Homolog of NCBI NO: 15231105 NR Description: transcriptional coactivator - like protein
  misc_feature (32)..(170): Homolog of NCBI NO: 7488897 NR Description: hypothetical protein - castor bean
  misc_feature (32)..(170): Homolog of NCBI NO: 38637102 NR Description: putative ethylene-responsive transcriptional
  misc_feature (32)..(170): Homolog of NCBI NO: 18406032 NR Description: expressed protein [Arabidopsis thaliana]
  misc_feature (32)..(170): Homolog of NCBI NO: 20086364 NR Description: putative multiprotein bridging factor 1
  misc_feature (34)..(170): Homolog of NCBI NO: 8895787 NR Description: multiprotein bridging factor 1 [Solanum tuberosum]
SSSFLNFKTQINKIFALFLSLNSSTMPSRYPGAVTQDWEPVVLHKSKQKSQDLRDPKAVNAALRNGVAVQTVKKFDAGSNKKGKSTAVPVINTKKLEEETEPAAMDRVKAEVRLMIQKARLEKKMSQADLAKQINERTQVVQEYENGKAVPNQAVLAKMEKVLGVKLRGKIGK

SEQ ID NO: 99343 - protein, 148 aa, Arabidopsis thaliana
  peptide (1)..(148): Ceres Seq. ID no. 13602691
  misc_feature (91)..(145): Pfam Name: Helix-turn-helix Pfam Description: Helix-turn-helix
  misc_feature (1)..(148): Homolog of NCBI NO: 15230125 NR Description: ethylene-responsive transcriptional coactivator
  misc_feature (1)..(148): Homolog of NCBI NO: 21553721 NR Description: ethylene-responsive transcriptional coactivator,
  misc_feature (1)..(148): Homolog of NCBI NO: 19225065 NR Description: ethylene-responsive transciptional
  misc_feature (1)..(148): Homolog of NCBI NO: 5669634 NR Description: ethylene-responsive transcriptional coactivator
  misc_feature (7)..(145): Homolog of NCBI NO: 15231105 NR Description: transcriptional coactivator - like protein
  misc_feature (7)..(145): Homolog of NCBI NO: 7488897 NR Description: hypothetical protein - castor bean
  misc_feature (7)..(145): Homolog of NCBI NO: 38637102 NR Description: putative ethylene-responsive transcriptional
  misc_feature (7)..(145): Homolog of NCBI NO: 18406032 NR Description: expressed protein [Arabidopsis thaliana]
  misc_feature (7)..(145): Homolog of NCBI NO: 20086364 NR Description: putative multiprotein bridging factor 1
  misc_feature (9)..(145): Homolog of NCBI NO: 8895787 NR Description: multiprotein bridging factor 1 [Solanum tuberosum]
MPSRYPGAVTQDWEPVVLHKSKQKSQDLRDPKAVNAALRNGVAVQTVKKFDAGSNKKGKSTAVPVINTKKLEEETEPAAMDRVKAEVRLMIQKARLEKKMSQADLAKQINERTQVVQEYENGKAVPNQAVLAKMEKVLGVKLRGKIGK

SEQ ID NO: 99344 - DNA, 1042 bp, Arabidopsis thaliana
  misc_feature (1)..(1042): Ceres Seq. ID no. 13602696
  misc_feature: MA Experiment ID: 20000182 Result: Down-regulated in Transcription
  misc_feature: MA Experiment 20000182 PARAMETER Experiment Name: At_2mM_SA_P Parameter: Age (day) Value: 14
  misc_feature: MA Experiment 20000182 PARAMETER Experiment Name: At_2mM_SA_P Parameter: Organism Value: A. thaliana
  misc_feature: MA Experiment 20000182 PARAMETER Experiment Name: At_2mM_SA_P Parameter: Plant Line Value: WS
  misc_feature: MA Experiment 20000182 PARAMETER Experiment Name: At_2mM_SA_P Parameter: Timepoint (hr) Value: 6
  misc_feature: MA Experiment 20000182 PARAMETER Experiment Name: At_2mM_SA_P Parameter: Tissue Value: Aerial
  misc_feature: MA Experiment 20000182 PARAMETER Experiment Name: At_2mM_SA_P Parameter: Treatment Value: 2mM SA vs. No Treatment
  misc_feature: MA Experiment ID: 20000495 Result: Down-regulated in Transcription
  misc_feature: MA Experiment 20000495 PARAMETER Experiment Name: At_Guard_Cells_P Parameter: Harvest Date Value: 8/2/2002
  misc_feature: MA Experiment 20000495 PARAMETER Experiment Name: At_Guard_Cells_P Parameter: Organism Value: A. thaliana
  misc_feature: MA Experiment 20000495 PARAMETER Experiment Name: At_Guard_Cells_P Parameter: Tissue Value: Guard Cells vs. Leaves
  misc_feature: MA Experiment ID: 20001248 Result: Down-regulated in Transcription
  misc_feature: MA Experiment 20001248 PARAMETER Experiment Name: At_Far-red-induction_P Parameter: Age (day) Value: 7
  misc_feature: MA Experiment 20001248 PARAMETER Experiment Name: At_Far-red-induction_P Parameter: Light Value: Far-red vs. White
  misc_feature: MA Experiment 20001248 PARAMETER Experiment Name: At_Far-red-induction_P Parameter: Organism Value: A. thaliana
  misc_feature: MA Experiment 20001248 PARAMETER Experiment Name: At_Far-red-induction_P Parameter: Plant Line Value: Columbia
  misc_feature: MA Experiment 20001248 PARAMETER Experiment Name: At_Far-red-induction_P Parameter: Timepoint (hr) Value: 4
  misc_feature: MA Experiment 20001248 PARAMETER Experiment Name: At_Far-red-induction_P Parameter: Tissue Value: Whole Plant
  misc_feature: MA Experiment ID: 20001450 Result: Down-regulated in Transcription
  misc_feature: MA Experiment 20001450 PARAMETER Experiment Name: At_Far-red-induction_P Parameter: Age (day) Value: 7
  misc_feature: MA Experiment 20001450 PARAMETER Experiment Name: At_Far-red-induction_P Parameter: Light Value: Far-red vs. White
  misc_feature: MA Experiment 20001450 PARAMETER Experiment Name: At_Far-red-induction_P Parameter: Organism Value: A. thaliana
  misc_feature: MA Experiment 20001450 PARAMETER Experiment Name: At_Far-red-induction_P Parameter: Plant Line Value: Columbia
  misc_feature: MA Experiment 20001450 PARAMETER Experiment Name: At_Far-red-induction_P Parameter: Timepoint (hr) Value: 8
  misc_feature: MA Experiment 20001450 PARAMETER Experiment Name: At_Far-red-induction_P Parameter: Tissue Value: Whole Plant
  misc_feature: MA Experiment ID: 20001451 Result: Down-regulated in Transcription
  misc_feature: MA Experiment 20001451 PARAMETER Experiment Name: At_Far-red-induction_P Parameter: Age (day) Value: 7
  misc_feature: MA Experiment 20001451 PARAMETER Experiment Name: At_Far-red-induction_P Parameter: Light Value: Far-red vs. White
  misc_feature: MA Experiment 20001451 PARAMETER Experiment Name: At_Far-red-induction_P Parameter: Organism Value: A. thaliana
  misc_feature: MA Experiment 20001451 PARAMETER Experiment Name: At_Far-red-induction_P Parameter: Plant Line Value: Columbia
  misc_feature: MA Experiment 20001451 PARAMETER Experiment Name: At_Far-red-induction_P Parameter: Timepoint (hr) Value: 24
  misc_feature: MA Experiment 20001451 PARAMETER Experiment Name: At_Far-red-induction_P Parameter: Tissue Value: Whole Plant
tccaaataaaaaaaaaaacccccccccccccccccggagaaagccattgtttcagttgatgatggtgatgatatctcttcacttctctactccgccgctagcttttctcaaatctgattccaattccagatttctcaagaaccctaatcctaattttatccaattcaccccaaaatcccaacttcttttcccccaacgtctcaatttcaacaccggaacaaatttaaaccggcgaactctgagttgctatgggattaaggattcaagtgagacaacgaagtctgcgccgtcattagactccggcgacggtggcggcggagatggtggtgatgatgataaaggtgaagtggaggaaaaaaacagactttttccggaatggttggattttacctcggatgatgcacagactgtgtttgtggctatagctgtatcgttggcgtttcgttattttatcgcagaaccaagatatattccttctttgtctatgtatcctacttttgatgttggagacagattagttgcagagaaggtgagttattatttcaggaagccttgtgcaaatgatattgtcatctttaaaagtccaccagttcttcaggaagttgggtatactgatgccgatgtatttattaaacggattgttgccaaagaaggtgaccttgtggaggtacataatgggaaactgatggttaatggtgttgctaggaatgaaaaattcatcttagagcctcctggttatgaaatgacaccaattagggtaccggaaaattcagtctttgtgatgggtgataaccggaataacagttatgattcgcacgtatggggtcctctgcctttgaagaatattattggacggtcggtttttcggtattggccaccaaacagagtaagcgggacagtgctagaaggtggctgtgctgtggataagcaatagaacatattgtaacgttttgattcggcatgtcttcatttgaaacacttgtgcagataaaaacgaaaacaatgtacctttttatgaaggagagagttgcacatttgaatt

SEQ ID NO: 99345 - protein, 310 aa, Arabidopsis thaliana
  peptide (1)..(310): Ceres Seq. ID no. 13602697
  misc_feature (129)..(284): Pfam Name: Signal peptidase I Pfam Description: Signal peptidase I
  misc_feature (13)..(310): Homolog of NCBI NO: 9294054 NR Description: contains similarity to signal peptidase (leader
  misc_feature (20)..(310): Homolog of NCBI NO: 30687572 NR Description: chloroplast thylakoidal processing peptidase
  misc_feature (20)..(310): Homolog of NCBI NO: 25082936 NR Description: chloroplast thylakoidal processing peptidase,
  misc_feature (115)..(297): Homolog of NCBI NO: 31415933 NR Description: putative chloroplast thylakoidal processing
  misc_feature (89)..(300): Homolog of NCBI NO: 25408074 NR Description: probable signal peptidase I [imported] - thaliana >gi|1946373|gb|AAB63091.1| putative signal peptidase I
  misc_feature (89)..(300): Homolog of NCBI NO: 30684587 NR Description: signal peptidase I -related [Arabidopsis >gi|2769566|emb|CAA71502.1| chloroplast thylakoidal processing [Arabidopsis thaliana] >gi|22135950|gb|AAM91557.1| putative
  misc_feature (127)..(300): Homolog of NCBI NO: 15222236 NR Description: chloroplast thylakoidal processing peptidase [Arabidopsis thaliana] >gi|25406944|pir||E86203 probable signal
  misc_feature (127)..(300): Homolog of NCBI NO: 21553622 NR Description: chloroplast thylakoidal processing peptidase,
  misc_feature (120)..(300): Homolog of NCBI NO: 23042815 NR Description: hypothetical protein [Trichodesmium erythraeum
  misc_feature (119)..(295): Homolog of NCBI NO: 16329254 NR Description: leader peptidase I [Synechocystis sp. PCC 6803]
PNKKKNPPPPPRRKPLFQLMMVMISLHFSTPPLAFLKSDSNSRFLKNPNPNFIQFTPKSQLLFPQRLNFNTGTNLNRRTLSCYGIKDSSETTKSAPSLDSGDGGGGDGGDDDKGEVEEKNRLFPEWLDFTSDDAQTVFVAIAVSLAFRYFIAEPRYIPSLSMYPTFDVGDRLVAEKVSYYFRKPCANDIVIFKSPPVLQEVGYTDADVFIKRIVAKEGDLVEVHNGKLMVNGVARNEKFILEPPGYEMTPIRVPENSVFVMGDNRNNSYDSHVWGPLPLKNIIGRSVFRYWPPNRVSGTVLEGGCAVDKQ

SEQ ID NO: 99346 - protein, 291 aa, Arabidopsis thaliana
  peptide (1)..(291): Ceres Seq. ID no. 13602698
  misc_feature (110)..(265): Pfam Name: Signal peptidase I Pfam Description: Signal peptidase I
  misc_feature (1)..(291): Homolog of NCBI NO: 9294054 NR Description: contains similarity to signal peptidase (leader
  misc_feature (1)..(291): Homolog of NCBI NO: 30687572 NR Description: chloroplast thylakoidal processing peptidase
  misc_feature (1)..(291): Homolog of NCBI NO: 25082936 NR Description: chloroplast thylakoidal processing peptidase,
  misc_feature (96)..(278): Homolog of NCBI NO: 31415933 NR Description: putative chloroplast thylakoidal processing
  misc_feature (70)..(281): Homolog of NCBI NO: 25408074 NR Description: probable signal peptidase I [imported] - thaliana >gi|1946373|gb|AAB63091.1| putative signal peptidase I
  misc_feature (70)..(281): Homolog of NCBI NO: 30684587 NR Description: signal peptidase I -related [Arabidopsis >gi|2769566|emb|CAA71502.1| chloroplast thylakoidal processing [Arabidopsis thaliana] >gi|22135950|gb|AAM91557.1| putative
  misc_feature (108)..(281): Homolog of NCBI NO: 15222236 NR Description: chloroplast thylakoidal processing peptidase [Arabidopsis thaliana] >gi|25406944|pir||E86203 probable signal
  misc_feature (108)..(281): Homolog of NCBI NO: 21553622 NR Description: chloroplast thylakoidal processing peptidase,
  misc_feature (101)..(281): Homolog of NCBI NO: 23042815 NR Description: hypothetical protein [Trichodesmium erythraeum
  misc_feature (100)..(276): Homolog of NCBI NO: 16329254 NR Description: leader peptidase I [Synechocystis sp. PCC 6803]
MMVMISLHFSTPPLAFLKSDSNSRFLKNPNPNFIQFTPKSQLLFPQRLNFNTGTNLNRRTLSCYGIKDSSETTKSAPSLDSGDGGGGDGGDDDKGEVEEKNRLFPEWLDFTSDDAQTVFVAIAVSLAFRYFIAEPRYIPSLSMYPTFDVGDRLVAEKVSYYFRKPCANDIVIFKSPPVLQEVGYTDADVFIKRIVAKEGDLVEVHNGKLMVNGVARNEKFILEPPGYEMTPIRVPENSVFVMGDNRNNSYDSHVWGPLPLKNIIGRSVFRYWPPNRVSGTVLEGGCAVDKQ

SEQ ID NO: 99347 - protein, 290 aa, Arabidopsis thaliana
  peptide (1)..(290): Ceres Seq. ID no. 13602699
  misc_feature (109)..(264): Pfam Name: Signal peptidase I Pfam Description: Signal peptidase I
  misc_feature (1)..(290): Homolog of NCBI NO: 9294054 NR Description: contains similarity to signal peptidase (leader
  misc_feature (1)..(290): Homolog of NCBI NO: 30687572 NR Description: chloroplast thylakoidal processing peptidase
  misc_feature (1)..(290): Homolog of NCBI NO: 25082936 NR Description: chloroplast thylakoidal processing peptidase,
  misc_feature (95)..(277): Homolog of NCBI NO: 31415933 NR Description: putative chloroplast thylakoidal processing
  misc_feature (69)..(280): Homolog of NCBI NO: 25408074 NR Description: probable signal peptidase I [imported] - thaliana >gi|1946373|gb|AAB63091.1| putative signal peptidase I
  misc_feature (69)..(280): Homolog of NCBI NO: 30684587 NR Description: signal peptidase I -related [Arabidopsis >gi|2769566|emb|CAA71502.1| chloroplast thylakoidal processing [Arabidopsis thaliana] >gi|22135950|gb|AAM91557.1| putative
  misc_feature (107)..(280): Homolog of NCBI NO: 15222236 NR Description: chloroplast thylakoidal processing peptidase [Arabidopsis thaliana] >gi|25406944|pir||E86203 probable signal
  misc_feature (107)..(280): Homolog of NCBI NO: 21553622 NR Description: chloroplast thylakoidal processing peptidase,
  misc_feature (100)..(280): Homolog of NCBI NO: 23042815 NR Description: hypothetical protein [Trichodesmium erythraeum
  misc_feature (99)..(275): Homolog of NCBI NO: 16329254 NR Description: leader peptidase I [Synechocystis sp. PCC 6803]
MVMISLHFSTPPLAFLKSDSNSRFLKNPNPNFIQFTPKSQLLFPQRLNFNTGTNLNRRTLSCYGIKDSSETTKSAPSLDSGDGGGGDGGDDDKGEVEEKNRLFPEWLDFTSDDAQTVFVAIAVSLAFRYFIAEPRYIPSLSMYPTFDVGDRLVAEKVSYYFRKPCANDIVIFKSPPVLQEVGYTDADVFIKRIVAKEGDLVEVHNGKLMVNGVARNEKFILEPPGYEMTPIRVPENSVFVMGDNRNNSYDSHVWGPLPLKNIIGRSVFRYWPPNRVSGTVLEGGCAVDKQ

SEQ ID NO: 99348 - DNA, 623 bp, Arabidopsis thaliana
  misc_feature (1)..(623): Ceres Seq. ID no. 13602700
  misc_feature: MA Experiment ID: 20001451 Result: Up-regulated in Transcription
  misc_feature: MA Experiment 20001451 PARAMETER Experiment Name: At_Far-red-induction_P Parameter: Age (day) Value: 7
  misc_feature: MA Experiment 20001451 PARAMETER Experiment Name: At_Far-red-induction_P Parameter: Light Value: Far-red vs. White
  misc_feature: MA Experiment 20001451 PARAMETER Experiment Name: At_Far-red-induction_P Parameter: Organism Value: A. thaliana
  misc_feature: MA Experiment 20001451 PARAMETER Experiment Name: At_Far-red-induction_P Parameter: Plant Line Value: Columbia
  misc_feature: MA Experiment 20001451 PARAMETER Experiment Name: At_Far-red-induction_P Parameter: Timepoint (hr) Value: 24
  misc_feature: MA Experiment 20001451 PARAMETER Experiment Name: At_Far-red-induction_P Parameter: Tissue Value: Whole Plant
atgtcgtataattcttacgccgagatgagttatcttctgaagacgttaacgacgaaggaagagattgatcgggttatcagagacaccattgatgaagttcttgttttacgatttggtcgttcctccgacgccgtttgtcttcagcatgatgaaatccttgcgaaatcggtgagagatgtttcgaaatttgctaaggtagctttggttgatgttgattcagaggatgttcaagtgtatgtgaagtattttgatatcacgttgtttccttcgacgatcttcttcttcaatgcgcatcatatgaaattggattctggaactgcggatcatactaaatgggttggtgcatttcatataaaacaagactttattgatgttgttgaggctatatatcgaggagcaatgaaagggaagatgattgttcaatgtccaataccgccagagaggataccaaagtaccagctcgtgtacaaggatgtgtagacactaaagtttgttgtgcttacaatgcaaaatctgtttctcatcttctgtgttggcaataatatttacatttgacattttgagatttacagttatgtttttgtacaaagttgaagaatgagaataaatatgcagatttttcg

SEQ ID NO: 99349 - protein, 159 aa, Arabidopsis thaliana
  peptide (1)..(159): Ceres Seq. ID no. 13602701
  misc_feature (1)..(159): Homolog of NCBI NO: 15230169 NR Description: hypothetical protein [Arabidopsis thaliana] contains similarity to spliceosomal protein~gene_id:K7P8.2
  misc_feature (9)..(159): Homolog of NCBI NO: 8923475 NR Description: hypothetical protein FLJ20511 [Homo sapiens] unnamed protein product [Homo sapiens]
  misc_feature (9)..(159): Homolog of NCBI NO: 27659170 NR Description: similar to hypothetical protein FLJ20511 [Homo
  misc_feature (9)..(159): Homolog of NCBI NO: 28316734 NR Description: RIKEN cDNA D530025J19 gene [Mus musculus]
  misc_feature (9)..(143): Homolog of NCBI NO: 37535532 NR Description: putative thioredoxin-like U5 small
  misc_feature (9)..(143): Homolog of NCBI NO: 15241574 NR Description: YLS8, Dim1 homolog [Arabidopsis thaliana] putative protein [Arabidopsis thaliana] AT5g08290 [Arabidopsis thaliana]
  misc_feature (9)..(143): Homolog of NCBI NO: 21537271 NR Description: putative thioredoxin-like U5 small
  misc_feature (9)..(143): Homolog of NCBI NO: 5729802 NR Description: similar to S. pombe dim1+ [Homo sapiens] dim1 [Mus musculus] >gi|27679028|ref|XP_214528.1| similar to [Drosophila melanogaster] [Rattus norvegicus]
  misc_feature (10)..(151): Homolog of NCBI NO: 32417926 NR Description: hypothetical protein [Neurospora crassa]
  misc_feature (9)..(143): Homolog of NCBI NO: 31222366 NR Description: ENSANGP00000018231 [Anopheles gambiae]
MSYNSYAEMSYLLKTLTTKEEIDRVIRDTIDEVLVLRFGRSSDAVCLQHDEILAKSVRDVSKFAKVALVDVDSEDVQVYVKYFDITLFPSTIFFFNAHHMKLDSGTADHTKWVGAFHIKQDFIDVVEAIYRGAMKGKMIVQCPIPPERIPKYQLVYKDV

SEQ ID NO: 99350 - protein, 151 aa, Arabidopsis thaliana
  peptide (1)..(151): Ceres Seq. ID no. 13602702
  misc_feature (1)..(151): Homolog of NCBI NO: 15230169 NR Description: hypothetical protein [Arabidopsis thaliana] contains similarity to spliceosomal protein~gene_id:K7P8.2
  misc_feature (1)..(151): Homolog of NCBI NO: 8923475 NR Description: hypothetical protein FLJ20511 [Homo sapiens] unnamed protein product [Homo sapiens]
  misc_feature (1)..(151): Homolog of NCBI NO: 27659170 NR Description: similar to hypothetical protein FLJ20511 [Homo
  misc_feature (1)..(151): Homolog of NCBI NO: 28316734 NR Description: RIKEN cDNA D530025J19 gene [Mus musculus]
  misc_feature (1)..(135): Homolog of NCBI NO: 37535532 NR Description: putative thioredoxin-like U5 small
  misc_feature (1)..(135): Homolog of NCBI NO: 15241574 NR Description: YLS8, Dim1 homolog [Arabidopsis thaliana] putative protein [Arabidopsis thaliana] AT5g08290 [Arabidopsis thaliana]
  misc_feature (1)..(135): Homolog of NCBI NO: 21537271 NR Description: putative thioredoxin-like U5 small
  misc_feature (1)..(135): Homolog of NCBI NO: 5729802 NR Description: similar to S. pombe dim1+ [Homo sapiens] dim1 [Mus musculus] >gi|27679028|ref|XP_214528.1| similar to [Drosophila melanogaster] [Rattus norvegicus]
  misc_feature (2)..(143): Homolog of NCBI NO: 32417926 NR Description: hypothetical protein [Neurospora crassa]
  misc_feature (1)..(135): Homolog of NCBI NO: 31222366 NR Description: ENSANGP00000018231 [Anopheles gambiae]
MSYLLKTLTTKEEIDRVIRDTIDEVLVLRFGRSSDAVCLQHDEILAKSVRDVSKFAKVALVDVDSEDVQVYVKYFDITLFPSTIFFFNAHHMKLDSGTADHTKWVGAFHIKQDFIDVVEAIYRGAMKGKMIVQCPIPPERIPKYQLVYKDV

SEQ ID NO: 99351 - DNA, 1062 bp, Arabidopsis thaliana
  misc_feature (1)..(1062): Ceres Seq. ID no. 13602711
  misc_feature: MA Experiment ID: 20000234 Result: Up-regulated in Transcription
  misc_feature: MA Experiment 20000234 PARAMETER Experiment Name: At_Siliques_P Parameter: Age (day) Value: 21
  misc_feature: MA Experiment 20000234 PARAMETER Experiment Name: At_Siliques_P Parameter: Organism Value: A. thaliana
  misc_feature: MA Experiment 20000234 PARAMETER Experiment Name: At_Siliques_P Parameter: Plant Line Value: WS
  misc_feature: MA Experiment 20000234 PARAMETER Experiment Name: At_Siliques_P Parameter: Tissue Value: Less Than 5mm Siliques vs. Whole Plant
ttttccaagaaaataaaaaacagaaaaaattcgtggaaacgccattaacgagatctagcacaaactcgtagtgtggtgtagaagaagacaaaagcaaggagcttcataataaaaccctagagatatttgtttctccaatttcaaaagacgagacgtgaagaagacgatcgaagatgaacattttcagattagctggtgatatgactcacctagccagtgttcttgtcttgcttctcaagatccacaccatcaaatcctgcgctggtgtttcattgaagactcaagaactctatgccattgtctttgcgacgcgttatttggatattttcacgagttttgtgtctctgtacaacacctctatgaagttggtgtttttaggaagttctttttcgattgtgtggtacatgaagtatcataaggccgtccacaggacttacgacagagagcaagatacgtttcgtcattggttccttgtgcttccttgctttctcttagctcttttgatacatgaaaagtttacctttcttgaggtattgtggacgtcttcattgtacttggaggctgttgccatattacctcagcttgtcttgttgcaaaggactagaaatattgacaacttgaccggacaatatatatttctccttggggggtaccgtggattatacatcctcaactggatctaccgttacttcactgagccgcactttgttcactggataacatggatcgccgggtttgttcaaacactgctctatgccgacttcttctattattatttcctaagctggaagaacaacaaaaagctccaattaccagcttaatttctaaagtttcaatgctcgggaaccctacggattcgatttggtgcccgacaaaacatctaccggaatgttaccaatttactctgttggtggttattagaggagaacgagcatagatgtgtaaactccagcaatctaacttattacactttctttagactttctcgtctctcatcttttttttggtcgacttagtgttactaaatatttcgacgcgacagtaatatattcaccacaattc

SEQ ID NO: 99352 - protein, 215 aa, Arabidopsis thaliana; identical to SEQ ID NO: 35467
  peptide (1)..(215): Ceres Seq. ID no. 13602712
  misc_feature (1)..(205): Pfam Name: ER lumen protein retaining receptor Pfam Description: ER lumen protein retaining receptor
  misc_feature (1)..(215): Homolog of NCBI NO: 18404390 NR Description: ER lumen retaining receptor (HDEL receptor)
  misc_feature (1)..(215): Homolog of NCBI NO: 21592401 NR Description: ER lumen retaining receptor (HDEL receptor),
  misc_feature (1)..(215): Homolog of NCBI NO: 9293986 NR Description: ER lumen protein-retaining receptor-like protein
  misc_feature (1)..(215): Homolog of NCBI NO: 6685428 NR Description: ER lumen protein retaining receptor (HDEL (PGP169- 12) >gi|4105782|gb|AAD02548.1| PGPS/D6 [Petunia x
  misc_feature (1)..(214): Homolog of NCBI NO: 21743051 NR Description: OSJNBa0083D01.1 [Oryza sativa (japonica
  misc_feature (1)..(215): Homolog of NCBI NO: 14285310 NR Description: ERD2 protein [Scherffelia dubia]
  misc_feature (1)..(215): Homolog of NCBI NO: 18397049 NR Description: ER lumen protein retaining receptor [Arabidopsis >gi|544250|sp|P35402|ERD2_ARATH ER lumen protein retaining
  misc_feature (1)..(215): Homolog of NCBI NO: 31196307 NR Description: ENSANGP00000012108 [Anopheles gambiae] ENSANGP00000014488 [Anopheles gambiae] ENSANGP00000012108 [Anopheles gambiae str. PEST]
  misc_feature (1)..(215): Homolog of NCBI NO: 17137442 NR Description: KDEL receptor CG5183-PA [Drosophila melanogaster]
  misc_feature (1)..(214): Homolog of NCBI NO: 22656361 NR Description: endoplasmic reticulum retention receptor

SEQ ID NO: 99353 - protein, 206 aa, Arabidopsis thaliana; identical to SEQ ID NO: 35468
  peptide (1)..(206): Ceres Seq. ID no. 13602713
  misc_feature (1)..(196): Pfam Name: ER lumen protein retaining receptor Pfam Description: ER lumen protein retaining receptor
  misc_feature (1)..(206): Homolog of NCBI NO: 18404390 NR Description: ER lumen retaining receptor (HDEL receptor)
  misc_feature (1)..(206): Homolog of NCBI NO: 21592401 NR Description: ER lumen retaining receptor (HDEL receptor),
  misc_feature (1)..(206): Homolog of NCBI NO: 9293986 NR Description: ER lumen protein-retaining receptor-like protein
  misc_feature (1)..(206): Homolog of NCBI NO: 6685428 NR Description: ER lumen protein retaining receptor (HDEL (PGP169- 12) >gi|4105782|gb|AAD02548.1| PGPS/D6 [Petunia x
  misc_feature (1)..(205): Homolog of NCBI NO: 21743051 NR Description: OSJNBa0083D01.1 [Oryza sativa (japonica
  misc_feature (1)..(206): Homolog of NCBI NO: 14285310 NR Description: ERD2 protein [Scherffelia dubia]
  misc_feature (1)..(206): Homolog of NCBI NO: 18397049 NR Description: ER lumen protein retaining receptor [Arabidopsis >gi|544250|sp|P35402|ERD2_ARATH ER lumen protein retaining
  misc_feature (1)..(206): Homolog of NCBI NO: 31196307 NR Description: ENSANGP00000012108 [Anopheles gambiae] ENSANGP00000014488 [Anopheles gambiae] ENSANGP00000012108 [Anopheles gambiae str. PEST]
  misc_feature (1)..(206): Homolog of NCBI NO: 17137442 NR Description: KDEL receptor CG5183-PA [Drosophila melanogaster]
  misc_feature (1)..(205): Homolog of NCBI NO: 22656361 NR Description: endoplasmic reticulum retention receptor

SEQ ID NO: 99354 - protein, 153 aa, Arabidopsis thaliana; identical to SEQ ID NO: 35469
  peptide (1)..(153): Ceres Seq. ID no. 13602714
  misc_feature (1)..(143): Pfam Name: ER lumen protein retaining receptor Pfam Description: ER lumen protein retaining receptor
  misc_feature (1)..(153): Homolog of NCBI NO: 18404390 NR Description: ER lumen retaining receptor (HDEL receptor)
  misc_feature (1)..(153): Homolog of NCBI NO: 21592401 NR Description: ER lumen retaining receptor (HDEL receptor),
  misc_feature (1)..(153): Homolog of NCBI NO: 9293986 NR Description: ER lumen protein-retaining receptor-like protein
  misc_feature (1)..(153): Homolog of NCBI NO: 6685428 NR Description: ER lumen protein retaining receptor (HDEL (PGP169- 12) >gi|4105782|gb|AAD02548.1| PGPS/D6 [Petunia x
  misc_feature (1)..(152): Homolog of NCBI NO: 21743051 NR Description: OSJNBa0083D01.1 [Oryza sativa (japonica
  misc_feature (1)..(153): Homolog of NCBI NO: 14285310 NR Description: ERD2 protein [Scherffelia dubia]
  misc_feature (1)..(153): Homolog of NCBI NO: 18397049 NR Description: ER lumen protein retaining receptor [Arabidopsis >gi|544250|sp|P35402|ERD2_ARATH ER lumen protein retaining
  misc_feature (1)..(153): Homolog of NCBI NO: 31196307 NR Description: ENSANGP00000012108 [Anopheles gambiae] ENSANGP00000014488 [Anopheles gambiae] ENSANGP00000012108 [Anopheles gambiae str. PEST]
  misc_feature (1)..(153): Homolog of NCBI NO: 17137442 NR Description: KDEL receptor CG5183-PA [Drosophila melanogaster]
  misc_feature (1)..(152): Homolog of NCBI NO: 22656361 NR Description: endoplasmic reticulum retention receptor

SEQ ID NO: 99355 - DNA, 1919 bp, Arabidopsis thaliana
  misc_feature (1)..(1919): Ceres Seq. ID no. 13602718
  misc_feature: MA Experiment ID: 108461 Result: Up-regulated in Transcription
  misc_feature: MA Experiment 108461 PARAMETER Experiment Name: At_Germinating_Seeds_cDNA_P Parameter: Age (day) Value: 1 vs. 0
  misc_feature: MA Experiment 108461 PARAMETER Experiment Name: At_Germinating_Seeds_cDNA_P Parameter: Tissue Value: Germinating Seeds
  misc_feature: MA Experiment ID: 108462 Result: Up-regulated in Transcription
  misc_feature: MA Experiment 108462 PARAMETER Experiment Name: At_Germinating_Seeds_cDNA_P Parameter: Age (day) Value: 2 vs. 0
  misc_feature: MA Experiment 108462 PARAMETER Experiment Name: At_Germinating_Seeds_cDNA_P Parameter: Tissue Value: Germinating Seeds
  misc_feature: MA Experiment ID: 108569 Result: Up-regulated in Transcription
  misc_feature: MA Experiment 108569 PARAMETER Experiment Name: At_0.001%_MeJA__cDNA_P Parameter: Timepoint (hr) Value: 6
  misc_feature: MA Experiment 108569 PARAMETER Experiment Name: At_0.001%_MeJA__cDNA_P Parameter: Tissue Value: Aerial
  misc_feature: MA Experiment 108569 PARAMETER Experiment Name: At_0.001%_MeJA__cDNA_P Parameter: Treatment Value: 0.001% MeJA vs. No Treatment
  misc_feature: MA Experiment ID: 108572 Result: Down-regulated in Transcription
  misc_feature: MA Experiment 108572 PARAMETER Experiment Name: At_Drought_cDNA_P Parameter: Timepoint (hr) Value: 1
  misc_feature: MA Experiment 108572 PARAMETER Experiment Name: At_Drought_cDNA_P Parameter: Tissue Value: Aerial
  misc_feature: MA Experiment 108572 PARAMETER Experiment Name: At_Drought_cDNA_P Parameter: Treatment Value: Drought vs. No Drought
  misc_feature: MA Experiment ID: 108579 Result: Up-regulated in Transcription
  misc_feature: MA Experiment 108579 PARAMETER Experiment Name: At_4deg_Cold_cDNA_P Parameter: Temperature (deg C) Value: 4 vs. 22
  misc_feature: MA Experiment 108579 PARAMETER Experiment Name: At_4deg_Cold_cDNA_P Parameter: Timepoint (hr) Value: 6
  misc_feature: MA Experiment 108579 PARAMETER Experiment Name: At_4deg_Cold_cDNA_P Parameter: Tissue Value: Aerial
  misc_feature: MA Experiment ID: 20001451 Result: Down-regulated in Transcription
  misc_feature: MA Experiment 20001451 PARAMETER Experiment Name: At_Far-red-induction_P Parameter: Age (day) Value: 7
  misc_feature: MA Experiment 20001451 PARAMETER Experiment Name: At_Far-red-induction_P Parameter: Light Value: Far-red vs. White
  misc_feature: MA Experiment 20001451 PARAMETER Experiment Name: At_Far-red-induction_P Parameter: Organism Value: A. thaliana
  misc_feature: MA Experiment 20001451 PARAMETER Experiment Name: At_Far-red-induction_P Parameter: Plant Line Value: Columbia
  misc_feature: MA Experiment 20001451 PARAMETER Experiment Name: At_Far-red-induction_P Parameter: Timepoint (hr) Value: 24
  misc_feature: MA Experiment 20001451 PARAMETER Experiment Name: At_Far-red-induction_P Parameter: Tissue Value: Whole Plant
acactgtgagattcaagtgtaaagtgctctctccccaatggctaatcaccaccgacttttacgcggcggcggatctccggccataatcggtggcagaatcacactcacagctttcgcttccactatcgcactcttcctcttcactctctccttcttcttcgcttcagattctaacgattctcctgatctccttcttcccggtgttgagtactctaatggagtcggatctagaagatccatgttggatatcaaatcggatccgcttaagccacggttgattcagatccggaaacaagctgatgatcatcggtcattagcattagcttatgcttcttacgcgagaaagcttaagctcgagaattcgaaactcgtcaggatcttcgctgatctttcgaggaattacacggatctgattaacaaaccgacgtatcgagctttgtatgattctgatggagcctcgattgaagaatctgtgcttaggcaatttgagaaagaagttaaggaacggattaaaatgactcgtcaagtgattgctgaagctaaagagtcttttgataatcagttgaagattcagaagctgaaagatacgattttcgctgttaacgaacagttaactaatgctaagaagcaaggtgcgttttcgagtttgatcgctgcgaaatcgattccgaaaggattgcattgtcttgctatgaggctgatggaagagaggattgctcaccctgagaagtatactgatgaagggaaagatagaccgcgggagctcgaggatccgaatctttaccattacgctatattttcggataatgtgattgcggcttcggtggttgtgaactctgctgtgaagaatgctaaggagccgtggaagcatgtttttcacgttgtgactgataagatgaatcttggagctatgcaggttatgtttaaactgaaggagtataaaggagctcatgtagaagttaaagctgttgaggattatacgtttttgaactcttcgtatgtgcctgtgttgaagcagttagaatctgcgaatcttcagaagttttatttcgagaataagctcgagaatgcgacgaaagataccacgaatatgaagttcaggaaccccaagtatttatctatattgaatcacttgaggttttatttacccgagatgtacccgaaactacataggatactgtttttggacgatgatgtggttgtgcagaaggatttaacgggtctgtgggagattgatatggatgggaaagtgaatggagctgtagagacttgttttgggtcgtttcatcggtacgctcaatacatgaatttctcacatcctttgatcaaagagaagtttaatcccaaagcatgtgcgtgggcgtatggaatgaacttctttgatcttgatgcttggagaagagagaagtgcacagaagaatatcactactggcaaaatctgaacgagaacagggctctatggaaactggggacgttaccaccgggactgatcaccttttactcaaccacaaagccgctggacaaatcatggcatgtgcttgggctgggttacaatccgagcattagcatggatgagatccgcaacgctgcagtggtacacttcaacggtaacatgaagccatggcttgacatagctatgaaccagtttcgaccactttggaccaaacacgtcgactatgacctcgagtttgttcaggcttgcaattttggcctctgaactatgaaaattttctttatcatcaaaatctgaaagcatatgttgtttgttacttcagctctacgaagttttaaccttagtttttgtttgtgtttatttatatatttttgggggtttagtagaacacttgtattttgttcatagctatctttgttctatggcaacctataatcaaagcttaattataaagtcacattatgcc

SEQ ID NO: 99356 - protein, 559 aa, Arabidopsis thaliana; identical to SEQ ID NO: 35694
  peptide (1)..(559): Ceres Seq. ID no. 13602719
  misc_feature (1)..(559): Homolog of NCBI NO: 15230806 NR Description: glycosyltransferase family 8 [Arabidopsis >gi|26398609|sp|Q9LSG3|QUA1_ARATH Glycosyltransferase QUASIMODO1 emb|CAB71043.1~gene_id:MJL12.8~similar to unknown protein
  misc_feature (9)..(559): Homolog of NCBI NO: 18396159 NR Description: glycosyltransferase family 8 [Arabidopsis >gi|26394254|sp|Q9FWA4|GLTR_ARATH Probable glycosyltransferase
  misc_feature (111)..(556): Homolog of NCBI NO: 15233046 NR Description: glycosyltransferase family 8 [Arabidopsis
  misc_feature (97)..(555): Homolog of NCBI NO: 7271113 NR Description: 68 kDa protein [Cicer arietinum]
  misc_feature (152)..(556): Homolog of NCBI NO: 10177914 NR Description: emb|CAB71043.1~gene_id:MCA23.10~strong similarity
  misc_feature (152)..(556): Homolog of NCBI NO: 18422837 NR Description: glycosyltransferase family 8 [Arabidopsis >gi|15810327|gb|AAL07051.1| unknown protein [Arabidopsis >gi|20259235|gb|AAM14333.1| unknown protein [Arabidopsis
  misc_feature (152)..(556): Homolog of NCBI NO: 38423965 NR Description: putative glycosyltransferase [Oryza sativa
  misc_feature (56)..(556): Homolog of NCBI NO: 7485958 NR Description: hypothetical protein F22I13.40 - Arabidopsis >gi|4539335|emb|CAB37483.1| putative protein [Arabidopsis >gi|7270811|emb|CAB80492.1| putative protein [Arabidopsis
  misc_feature (56)..(556): Homolog of NCBI NO: 30691875 NR Description: glycosyltransferase family 8 [Arabidopsis
  misc_feature (149)..(555): Homolog of NCBI NO: 37533460 NR Description: hypothetical protein [Oryza sativa (japonica group)] >gi|20279459|gb|AAM18739.1| hypothetical protein [Oryza

SEQ ID NO: 99357 - protein, 492 aa, Arabidopsis thaliana; identical to SEQ ID NO: 35695
  peptide (1)..(492): Ceres Seq. ID no. 13602720
  misc_feature (1)..(492): Homolog of NCBI NO: 15230806 NR Description: glycosyltransferase family 8 [Arabidopsis >gi|26398609|sp|Q9LSG3|QUA1_ARATH Glycosyltransferase QUASIMODO1 emb|CAB71043.1~gene_id:MJL12.8~similar to unknown protein
  misc_feature (1)..(492): Homolog of NCBI NO: 18396159 NR Description: glycosyltransferase family 8 [Arabidopsis >gi|26394254|sp|Q9FWA4|GLTR_ARATH Probable glycosyltransferase
  misc_feature (44)..(489): Homolog of NCBI NO: 15233046 NR Description: glycosyltransferase family 8 [Arabidopsis
  misc_feature (30)..(488): Homolog of NCBI NO: 7271113 NR Description: 68 kDa protein [Cicer arietinum]
  misc_feature (85)..(489): Homolog of NCBI NO: 10177914 NR Description: emb|CAB71043.1~gene_id:MCA23.10~strong similarity
  misc_feature (85)..(489): Homolog of NCBI NO: 18422837 NR Description: glycosyltransferase family 8 [Arabidopsis >gi|15810327|gb|AAL07051.1| unknown protein [Arabidopsis >gi|20259235|gb|AAM14333.1| unknown protein [Arabidopsis
  misc_feature (85)..(489): Homolog of NCBI NO: 38423965 NR Description: putative glycosyltransferase [Oryza sativa
  misc_feature (1)..(489): Homolog of NCBI NO: 7485958 NR Description: hypothetical protein F22I13.40 - Arabidopsis >gi|4539335|emb|CAB37483.1| putative protein [Arabidopsis >gi|7270811|emb|CAB80492.1| putative protein [Arabidopsis
  misc_feature (1)..(489): Homolog of NCBI NO: 30691875 NR Description: glycosyltransferase family 8 [Arabidopsis
  misc_feature (82)..(488): Homolog of NCBI NO: 37533460 NR Description: hypothetical protein [Oryza sativa (japonica group)] >gi|20279459|gb|AAM18739.1| hypothetical protein [Oryza

SEQ ID NO: 99358 - protein, 400 aa, Arabidopsis thaliana; identical to SEQ ID NO: 35696
  peptide (1)..(400): Ceres Seq. ID no. 13602721
  misc_feature (1)..(400): Homolog of NCBI NO: 15230806 NR Description: glycosyltransferase family 8 [Arabidopsis >gi|26398609|sp|Q9LSG3|QUA1_ARATH Glycosyltransferase QUASIMODO1 emb|CAB71043.1~gene_id:MJL12.8~similar to unknown protein
  misc_feature (1)..(400): Homolog of NCBI NO: 18396159 NR Description: glycosyltransferase family 8 [Arabidopsis >gi|26394254|sp|Q9FWA4|GLTR_ARATH Probable glycosyltransferase
  misc_feature (1)..(397): Homolog of NCBI NO: 15233046 NR Description: glycosyltransferase family 8 [Arabidopsis
  misc_feature (1)..(396): Homolog of NCBI NO: 7271113 NR Description: 68 kDa protein [Cicer arietinum]
  misc_feature (1)..(397): Homolog of NCBI NO: 10177914 NR Description: emb|CAB71043.1~gene_id:MCA23.10~strong similarity
  misc_feature (1)..(397): Homolog of NCBI NO: 18422837 NR Description: glycosyltransferase family 8 [Arabidopsis >gi|15810327|gb|AAL07051.1| unknown protein [Arabidopsis >gi|20259235|gb|AAM14333.1| unknown protein [Arabidopsis
  misc_feature (1)..(397): Homolog of NCBI NO: 38423965 NR Description: putative glycosyltransferase [Oryza sativa
  misc_feature (1)..(397): Homolog of NCBI NO: 7485958 NR Description: hypothetical protein F22I13.40 - Arabidopsis >gi|4539335|emb|CAB37483.1| putative protein [Arabidopsis >gi|7270811|emb|CAB80492.1| putative protein [Arabidopsis
  misc_feature (1)..(397): Homolog of NCBI NO: 30691875 NR Description: glycosyltransferase family 8 [Arabidopsis
  misc_feature (1)..(396): Homolog of NCBI NO: 37533460 NR Description: hypothetical protein [Oryza sativa (japonica group)] >gi|20279459|gb|AAM18739.1| hypothetical protein [Oryza

SEQ ID NO: 99359 - DNA, 1829 bp, Arabidopsis thaliana
  misc_feature (1)..(1829): Ceres Seq. ID no. 13602722
  misc_feature: MA Experiment ID: 108434 Result: Up-regulated in Transcription
  misc_feature: MA Experiment 108434 PARAMETER Experiment Name: At_Root_Tips_cDNA_P Parameter: Tissue Value: Root Tips
  misc_feature: MA Experiment ID: 20000179 Result: Up-regulated in Transcription
  misc_feature: MA Experiment 20000179 PARAMETER Experiment Name: At_Germinating_Seeds_P Parameter: Age (hr) Value: 6 vs. 0
  misc_feature: MA Experiment 20000179 PARAMETER Experiment Name: At_Germinating_Seeds_P Parameter: Tissue Value: Germinating Seeds
  misc_feature: MA Experiment ID: 20000184 Result: Down-regulated in Transcription
  misc_feature: MA Experiment 20000184 PARAMETER Experiment Name: At_Shoots__P Parameter: Age (day) Value: 7
  misc_feature: MA Experiment 20000184 PARAMETER Experiment Name: At_Shoots__P Parameter: Tissue Value: Shoots vs. Whole Plant
  misc_feature: MA Experiment ID: 20000495 Result: Up-regulated in Transcription
  misc_feature: MA Experiment 20000495 PARAMETER Experiment Name: At_Guard_Cells_P Parameter: Harvest Date Value: 8/2/2002
  misc_feature: MA Experiment 20000495 PARAMETER Experiment Name: At_Guard_Cells_P Parameter: Organism Value: A. thaliana
  misc_feature: MA Experiment 20000495 PARAMETER Experiment Name: At_Guard_Cells_P Parameter: Tissue Value: Guard Cells vs. Leaves
  misc_feature: MA Experiment ID: 20001451 Result: Up-regulated in Transcription
  misc_feature: MA Experiment 20001451 PARAMETER Experiment Name: At_Far-red-induction_P Parameter: Age (day) Value: 7
  misc_feature: MA Experiment 20001451 PARAMETER Experiment Name: At_Far-red-induction_P Parameter: Light Value: Far-red vs. White
  misc_feature: MA Experiment 20001451 PARAMETER Experiment Name: At_Far-red-induction_P Parameter: Organism Value: A. thaliana
  misc_feature: MA Experiment 20001451 PARAMETER Experiment Name: At_Far-red-induction_P Parameter: Plant Line Value: Columbia
  misc_feature: MA Experiment 20001451 PARAMETER Experiment Name: At_Far-red-induction_P Parameter: Timepoint (hr) Value: 24
  misc_feature: MA Experiment 20001451 PARAMETER Experiment Name: At_Far-red-induction_P Parameter: Tissue Value: Whole Plant
tttttttcttcttcttccatttttttgttctcacgtcgctctctctttttttcgagattcagctgtaaaaccctaactagcgccatagccaaggaagctttcctcagatcgtctctccgaaattttccggttaatcgtcagttaaggggaaaattaggctatggcgatgttaggtgcacagcaagttccagcagcagcttgtactccagatatggttgggaatgcttttgtgccccagtattatcacatattgcatcaatcacctgagcatgttcacagattttaccaagagattagcaagttaggtcgtcctgaagagaatggtttaatgagcatcacttctaccttgcaagctattgacaagaagataatggcgcttggttacggtgtaatcagtgcagagatagctactgtggacacacaagaatctcatggaggtggttatattgtactggtgactgggtatttgacgggaaaagacagtgtcaggaggacgtttagtcagaccttcttccttgctccacaggagacaggatactttgtcttgaatgatatgtttcgattcattgatgaaggcactgtcgtacatggaaatcagattccagtgaacaacgtccaagctcctgtcaacacttaccaggacacagctgctgcgaaggaaattccagatgactttgttcaggagaaatatgtccaagagaatcatgctgttaagcaaaccgaggtgttgtccaagagcattaatgagcctgaaaaagtgttcacgccctctgaagatgaacaagtatcagctgcagaagaagctctggtgactgaaacagttaatgaagcaccaattgaagtgcaaaaggttggagaatctgattctaggactggcgaaattccaaagagatcttatgcatcaattgtgaaggttatgaaagaaaatgctgcaccaatgtctgcttcgagaactccaacaaaggtggaaccaaagaaacaagaagatcaagccattcatatccctctaccaacaccattgtctgagaaatcagattcaggagcaaatgttgctgtaaatgagaacaatcaagagaatgaaagagctctaggtccatccatctatctaaagggtttaccccttgatgcaacacctgccttgcttgagaatgagttccagaaatttggacttattaggaccaatggaattcaagtgagaagccagaagggattctgttttggttttgttgagtttgaatccgcaagttccatgcaaagcgctatcgaggcatcacctgtcatgctcaatggacacaaagttgttgtggaggaaaagcgatctaccgcaagagggaactatagaggacgttcgacgtttggtgtaaacacaggctacagaaacgaaggaggaaggggtcgtgggagctttggaggtggaagaggaggatatggccggaccgatttcaacggatatggtaataacaggggaaacaatagaggcggatacgcaaaccgagcaaatggtgatggtggtgggttcccgagggccaatggtaacaatggacgagtaagacgtggtggcggaaatgatgctaacagagctacgaaacccgtggatgatgctccccgtgtgtctgttgctgcgtaaatgtgcttttgaaacaaaaagctctattggttttagagagtttaggcgtagagcaatggcaaaaaaaaacactattattttcttttcactgtgtcgccattttattaattggagtcaaaacttgagagcaagagagagtttcgtcggttcttgcttgtctattttttcttcactgctaatgaaatctctttcttcatgtggc

SEQ ID NO: 99360 - protein, 488 aa, Arabidopsis thaliana; identical to SEQ ID NO: 24918
  peptide (1)..(488): Ceres Seq. ID no. 13602723
  misc_feature (19)..(135): Pfam Name: Nuclear transport factor 2 (NTF2) domain Pfam Description: Nuclear transport factor 2 (NTF2) domain
  misc_feature (1)..(488): Homolog of NCBI NO: 30687772 NR Description: NTF2-containing RNA-binding protein, putative thaliana] >gi|17979475|gb|AAL50074.1| AT3g25150/MJL12_9 thaliana] >gi|21360395|gb|AAM47313.1| AT3g25150/MJL12_9
  misc_feature (19)..(488): Homolog of NCBI NO: 9294171 NR Description: RNA-binding protein-like [Arabidopsis thaliana]
  misc_feature (10)..(471): Homolog of NCBI NO: 21742151 NR Description: OSJNBa0069D17.2 [Oryza sativa (japonica
  misc_feature (6)..(469): Homolog of NCBI NO: 30697452 NR Description: NTF2-containing RNA-binding protein, putative
  misc_feature (6)..(469): Homolog of NCBI NO: 30697455 NR Description: NTF2-containing RNA-binding protein, putative
  misc_feature (6)..(469): Homolog of NCBI NO: 21553535 NR Description: ras-GTPase-activating protein SH3-domain binding
  misc_feature (10)..(488): Homolog of NCBI NO: 31126693 NR Description: putative GAP SH3 binding protein [Oryza sativa
  misc_feature (16)..(437): Homolog of NCBI NO: 30695510 NR Description: NTF2-containing RNA-binding protein, putative
  misc_feature (16)..(441): Homolog of NCBI NO: 10177355 NR Description: RNA-binding protein-like [Arabidopsis thaliana]
  misc_feature (1)..(472): Homolog of NCBI NO: 34394922 NR Description: putative Ras-GTPase activating protein SH3

SEQ ID NO: 99361 - protein, 486 aa, Arabidopsis thaliana; identical to SEQ ID NO: 24919
  peptide (1)..(486): Ceres Seq. ID no. 13602724
  misc_feature (17)..(133): Pfam Name: Nuclear transport factor 2 (NTF2) domain Pfam Description: Nuclear transport factor 2 (NTF2) domain
  misc_feature (1)..(486): Homolog of NCBI NO: 30687772 NR Description: NTF2-containing RNA-binding protein, putative thaliana] >gi|17979475|gb|AAL50074.1| AT3g25150/MJL12_9 thaliana] >gi|21360395|gb|AAM47313.1| AT3g25150/MJL12_9
  misc_feature (17)..(486): Homolog of NCBI NO: 9294171 NR Description: RNA-binding protein-like [Arabidopsis thaliana]
  misc_feature (8)..(469): Homolog of NCBI NO: 21742151 NR Description: OSJNBa0069D17.2 [Oryza sativa (japonica
  misc_feature (4)..(467): Homolog of NCBI NO: 30697452 NR Description: NTF2-containing RNA-binding protein, putative
  misc_feature (4)..(467): Homolog of NCBI NO: 30697455 NR Description: NTF2-containing RNA-binding protein, putative
  misc_feature (4)..(467): Homolog of NCBI NO: 21553535 NR Description: ras-GTPase-activating protein SH3-domain binding
  misc_feature (8)..(486): Homolog of NCBI NO: 31126693 NR Description: putative GAP SH3 binding protein [Oryza sativa
  misc_feature (14)..(435): Homolog of NCBI NO: 30695510 NR Description: NTF2-containing RNA-binding protein, putative
  misc_feature (14)..(439): Homolog of NCBI NO: 10177355 NR Description: RNA-binding protein-like [Arabidopsis thaliana]
  misc_feature (1)..(470): Homolog of NCBI NO: 34394922 NR Description: putative Ras-GTPase activating protein SH3

SEQ ID NO: 99362 - protein, 471 aa, Arabidopsis thaliana; identical to SEQ ID NO: 24920
  peptide (1)..(471): Ceres Seq. ID no. 13602725
  misc_feature (2)..(118): Pfam Name: Nuclear transport factor 2 (NTF2) domain Pfam Description: Nuclear transport factor 2 (NTF2) domain
  misc_feature (1)..(471): Homolog of NCBI NO: 30687772 NR Description: NTF2-containing RNA-binding protein, putative thaliana] >gi|17979475|gb|AAL50074.1| AT3g25150/MJL12_9 thaliana] >gi|21360395|gb|AAM47313.1| AT3g25150/MJL12_9
  misc_feature (2)..(471): Homolog of NCBI NO: 9294171 NR Description: RNA-binding protein-like [Arabidopsis thaliana]
  misc_feature (1)..(454): Homolog of NCBI NO: 21742151 NR Description: OSJNBa0069D17.2 [Oryza sativa (japonica
  misc_feature (1)..(452): Homolog of NCBI NO: 30697452 NR Description: NTF2-containing RNA-binding protein, putative
  misc_feature (1)..(452): Homolog of NCBI NO: 30697455 NR Description: NTF2-containing RNA-binding protein, putative
  misc_feature (1)..(452): Homolog of NCBI NO: 21553535 NR Description: ras-GTPase-activating protein SH3-domain binding
  misc_feature (1)..(471): Homolog of NCBI NO: 31126693 NR Description: putative GAP SH3 binding protein [Oryza sativa
  misc_feature (1)..(420): Homolog of NCBI NO: 30695510 NR Description: NTF2-containing RNA-binding protein, putative
  misc_feature (1)..(424): Homolog of NCBI NO: 10177355 NR Description: RNA-binding protein-like [Arabidopsis thaliana]
  misc_feature (1)..(455): Homolog of NCBI NO: 34394922 NR Description: putative Ras-GTPase activating protein SH3

SEQ ID NO: 99363 - DNA, 684 bp, Arabidopsis thaliana
  misc_feature (1)..(684): Ceres Seq. ID no. 13602729
  misc_feature: MA Experiment ID: 108434 Result: Up-regulated in Transcription
  misc_feature: MA Experiment 108434 PARAMETER Experiment Name: At_Root_Tips_cDNA_P Parameter: Tissue Value: Root Tips
  misc_feature: MA Experiment ID: 108573 Result: Down-regulated in Transcription
  misc_feature: MA Experiment 108573 PARAMETER Experiment Name: At_Drought_cDNA_P Parameter: Timepoint (hr) Value: 6
  misc_feature: MA Experiment 108573 PARAMETER Experiment Name: At_Drought_cDNA_P Parameter: Tissue Value: Aerial
  misc_feature: MA Experiment 108573 PARAMETER Experiment Name: At_Drought_cDNA_P Parameter: Treatment Value: Drought vs. No Drought
  misc_feature: MA Experiment ID: 108577 Result: Down-regulated in Transcription
  misc_feature: MA Experiment 108577 PARAMETER Experiment Name: At_42deg_Heat_cDNA_P Parameter: Temperature (deg C) Value: 42 vs. 22
  misc_feature: MA Experiment 108577 PARAMETER Experiment Name: At_42deg_Heat_cDNA_P Parameter: Timepoint (hr) Value: 6
  misc_feature: MA Experiment 108577 PARAMETER Experiment Name: At_42deg_Heat_cDNA_P Parameter: Tissue Value: Aerial
  misc_feature: MA Experiment ID: 20000111 Result: Down-regulated in Transcription
  misc_feature: MA Experiment 20000111 PARAMETER Experiment Name: At_42deg_Heat_cDNA_P Parameter: Temperature (deg C) Value: 42 vs. 22
  misc_feature: MA Experiment 20000111 PARAMETER Experiment Name: At_42deg_Heat_cDNA_P Parameter: Timepoint (hr) Value: 6
  misc_feature: MA Experiment 20000111 PARAMETER Experiment Name: At_42deg_Heat_cDNA_P Parameter: Tissue Value: Aerial
  misc_feature: MA Experiment ID: 20000112 Result: Down-regulated in Transcription
  misc_feature: MA Experiment 20000112 PARAMETER Experiment Name: At_42deg_Heat_cDNA_P Parameter: Temperature (deg C) Value: 42 vs. 22
  misc_feature: MA Experiment 20000112 PARAMETER Experiment Name: At_42deg_Heat_cDNA_P Parameter: Timepoint (hr) Value: 2
  misc_feature: MA Experiment 20000112 PARAMETER Experiment Name: At_42deg_Heat_cDNA_P Parameter: Tissue Value: Aerial
  misc_feature: MA Experiment ID: 20000113 Result: Down-regulated in Transcription
  misc_feature: MA Experiment 20000113 PARAMETER Experiment Name: At_42deg_Heat_cDNA_P Parameter: Temperature (deg C) Value: 42 vs. 22
  misc_feature: MA Experiment 20000113 PARAMETER Experiment Name: At_42deg_Heat_cDNA_P Parameter: Timepoint (hr) Value: 8
  misc_feature: MA Experiment 20000113 PARAMETER Experiment Name: At_42deg_Heat_cDNA_P Parameter: Tissue Value: Aerial
  misc_feature: MA Experiment ID: 20000173 Result: Down-regulated in Transcription
  misc_feature: MA Experiment 20000173 PARAMETER Experiment Name: At_42deg_Heat_P Parameter: Age (day) Value: 14
  misc_feature: MA Experiment 20000173 PARAMETER Experiment Name: At_42deg_Heat_P Parameter: Organism Value: A. thaliana
  misc_feature: MA Experiment 20000173 PARAMETER Experiment Name: At_42deg_Heat_P Parameter: Plant Line Value: WS
  misc_feature: MA Experiment 20000173 PARAMETER Experiment Name: At_42deg_Heat_P Parameter: Temperature (deg C) Value: 42 vs. 22
  misc_feature: MA Experiment 20000173 PARAMETER Experiment Name: At_42deg_Heat_P Parameter: Timepoint (hr) Value: 6
  misc_feature: MA Experiment 20000173 PARAMETER Experiment Name: At_42deg_Heat_P Parameter: Tissue Value: Aerial
  misc_feature: MA Experiment ID: 20000234 Result: Up-regulated in Transcription
  misc_feature: MA Experiment 20000234 PARAMETER Experiment Name: At_Siliques_P Parameter: Age (day) Value: 21
  misc_feature: MA Experiment 20000234 PARAMETER Experiment Name: At_Siliques_P Parameter: Organism Value: A. thaliana
  misc_feature: MA Experiment 20000234 PARAMETER Experiment Name: At_Siliques_P Parameter: Plant Line Value: WS
  misc_feature: MA Experiment 20000234 PARAMETER Experiment Name: At_Siliques_P Parameter: Tissue Value: Less Than 5mm Siliques vs. Whole Plant
  misc_feature: MA Experiment ID: 20000265 Result: Up-regulated in Transcription
  misc_feature: MA Experiment 20000265 PARAMETER Experiment Name: At_Open_Flower_P Parameter: Age (day) Value: 21
  misc_feature: MA Experiment 20000265 PARAMETER Experiment Name: At_Open_Flower_P Parameter: Plant Line Value: WS
  misc_feature: MA Experiment 20000265 PARAMETER Experiment Name: At_Open_Flower_P Parameter: Tissue Value: Closed Flower vs. Whole Plant
  misc_feature: MA Experiment ID: 20000495 Result: Up-regulated in Transcription
  misc_feature: MA Experiment 20000495 PARAMETER Experiment Name: At_Guard_Cells_P Parameter: Harvest Date Value: 8/2/2002
  misc_feature: MA Experiment 20000495 PARAMETER Experiment Name: At_Guard_Cells_P Parameter: Organism Value: A. thaliana
  misc_feature: MA Experiment 20000495 PARAMETER Experiment Name: At_Guard_Cells_P Parameter: Tissue Value: Guard Cells vs. Leaves
  misc_feature: MA Experiment ID: 20001911 Result: Down-regulated in Transcription
  misc_feature: MA Experiment 20001911 PARAMETER Experiment Name: At_Drought_Reproduction_P Parameter: Age (day) Value: 40
  misc_feature: MA Experiment 20001911 PARAMETER Experiment Name: At_Drought_Reproduction_P Parameter: Organism Value: A. thaliana
  misc_feature: MA Experiment 20001911 PARAMETER Experiment Name: At_Drought_Reproduction_P Parameter: Plant Line Value: WS
  misc_feature: MA Experiment 20001911 PARAMETER Experiment Name: At_Drought_Reproduction_P Parameter: Timepoint (day) Value: 10
  misc_feature: MA Experiment 20001911 PARAMETER Experiment Name: At_Drought_Reproduction_P Parameter: Tissue Value: Flowers
  misc_feature: MA Experiment 20001911 PARAMETER Experiment Name: At_Drought_Reproduction_P Parameter: Treatment Value: Drought vs. No Drought
agttgtcttccacaacaaaagagtaccctgaaacagatctttcgtataatcagtgacgtagagatcgaagacgatgatgagctctgcatccgccatgaaagctgttggatttttgcttctgcttaccattctaacattagcttatgcgaagaagtcaggtgatgtgacagagttgcagattggtgttaagtacaagcctcagaaatgtgatctccaggctcacaaaggggataagatcaaggttcactatcggggaaagttaactgatggaactgtctttgattcaagttttgagagaggtgaccctattgagtttgagcttggaactggtcaagtcatcccaggatgggaccagggtttattgggagcttgtgtaggtgagaagagaaagttgaaaatcccatccaagcttggttatggtgataacggctcaccaccaaaaatcccgggtggggcgacactgatattcgacaccgagcttgttgctgtgaacggagaaccatccagcgaagcgaaatcaaagaatgagctttgattacaccataattgtttttcatttaaaaggaaaccttgagtagtcatcgatgttggcatttgaatcttaaacagcctagaatcatttactttgctagttgaagacaataattatattttggtcataacattagttatgttggcagttct

SEQ ID NO: 99364 - protein, 153 aa, Arabidopsis thaliana; identical to SEQ ID NO: 25440
  peptide (1)..(153): Ceres Seq. ID no. 13602730
  misc_feature (43)..(137): Pfam Name: FKBP-type peptidyl-prolyl cis-trans isomerase Pfam Description: FKBP-type peptidyl-prolyl cis-trans isomerase
  misc_feature (1)..(153): Homolog of NCBI NO: 18404471 NR Description: immunophilin / FKBP-type peptidyl-prolyl
  misc_feature (8)..(153): Homolog of NCBI NO: 2129622 NR Description: probable peptidylprolyl isomerase (EC 5.2.1.8)
  misc_feature (8)..(153): Homolog of NCBI NO: 21593622 NR Description: immunophilin (FKBP15-1) [Arabidopsis thaliana]
  misc_feature (8)..(147): Homolog of NCBI NO: 38174807 NR Description: putative immunophilin [Hordeum vulgare subsp.
  misc_feature (2)..(144): Homolog of NCBI NO: 15239019 NR Description: immunophilin / FKBP-type peptidyl-prolyl isomerase, putative [Arabidopsis thaliana]
  misc_feature (2)..(144): Homolog of NCBI NO: 2129623 NR Description: probable peptidylprolyl isomerase (EC 5.2.1.8)
  misc_feature (12)..(153): Homolog of NCBI NO: 34906954 NR Description: rapamycin-binding protein-like [Oryza sativa
  misc_feature (8)..(153): Homolog of NCBI NO: 23396588 NR Description: FK506-binding protein 2 precursor
  misc_feature (17)..(139): Homolog of NCBI NO: 27694894 NR Description: Similar to FK506 binding protein 2 (13 kDa)
  misc_feature (8)..(139): Homolog of NCBI NO: 6679805 NR Description: FK506 binding protein 2; FK506 binding protein 2

SEQ ID NO: 99365 - protein, 152 aa, Arabidopsis thaliana; identical to SEQ ID NO: 25441
  peptide (1)..(152): Ceres Seq. ID no. 13602731
  misc_feature (42)..(136): Pfam Name: FKBP-type peptidyl-prolyl cis-trans isomerase Pfam Description: FKBP-type peptidyl-prolyl cis-trans isomerase
  misc_feature (1)..(152): Homolog of NCBI NO: 18404471 NR Description: immunophilin / FKBP-type peptidyl-prolyl
  misc_feature (7)..(152): Homolog of NCBI NO: 2129622 NR Description: probable peptidylprolyl isomerase (EC 5.2.1.8)
  misc_feature (7)..(152): Homolog of NCBI NO: 21593622 NR Description: immunophilin (FKBP15-1) [Arabidopsis thaliana]
  misc_feature (7)..(146): Homolog of NCBI NO: 38174807 NR Description: putative immunophilin [Hordeum vulgare subsp.
  misc_feature (1)..(143): Homolog of NCBI NO: 15239019 NR Description: immunophilin / FKBP-type peptidyl-prolyl isomerase, putative [Arabidopsis thaliana]
  misc_feature (1)..(143): Homolog of NCBI NO: 2129623 NR Description: probable peptidylprolyl isomerase (EC 5.2.1.8)
  misc_feature (11)..(152): Homolog of NCBI NO: 34906954 NR Description: rapamycin-binding protein-like [Oryza sativa
  misc_feature (7)..(152): Homolog of NCBI NO: 23396588 NR Description: FK506-binding protein 2 precursor
  misc_feature (16)..(138): Homolog of NCBI NO: 27694894 NR Description: Similar to FK506 binding protein 2 (13 kDa)
  misc_feature (7)..(138): Homolog of NCBI NO: 6679805 NR Description: FK506 binding protein 2; FK506 binding protein 2

SEQ ID NO: 99366 - protein, 146 aa, Arabidopsis thaliana; identical to SEQ ID NO: 25442
  peptide (1)..(146): Ceres Seq. ID no. 13602732
  misc_feature (36)..(130): Pfam Name: FKBP-type peptidyl-prolyl cis-trans isomerase Pfam Description: FKBP-type peptidyl-prolyl cis-trans isomerase
  misc_feature (1)..(146): Homolog of NCBI NO: 18404471 NR Description: immunophilin / FKBP-type peptidyl-prolyl
  misc_feature (1)..(146): Homolog of NCBI NO: 2129622 NR Description: probable peptidylprolyl isomerase (EC 5.2.1.8)
  misc_feature (1)..(146): Homolog of NCBI NO: 21593622 NR Description: immunophilin (FKBP15-1) [Arabidopsis thaliana]
  misc_feature (1)..(140): Homolog of NCBI NO: 38174807 NR Description: putative immunophilin [Hordeum vulgare subsp.
  misc_feature (1)..(137): Homolog of NCBI NO: 15239019 NR Description: immunophilin / FKBP-type peptidyl-prolyl isomerase, putative [Arabidopsis thaliana]
  misc_feature (1)..(137): Homolog of NCBI NO: 2129623 NR Description: probable peptidylprolyl isomerase (EC 5.2.1.8)
  misc_feature (5)..(146): Homolog of NCBI NO: 34906954 NR Description: rapamycin-binding protein-like [Oryza sativa
  misc_feature (1)..(146): Homolog of NCBI NO: 23396588 NR Description: FK506-binding protein 2 precursor
  misc_feature (10)..(132): Homolog of NCBI NO: 27694894 NR Description: Similar to FK506 binding protein 2 (13 kDa)
  misc_feature (1)..(132): Homolog of NCBI NO: 6679805 NR Description: FK506 binding protein 2; FK506 binding protein 2

SEQ ID NO: 99367 - DNA, 611 bp, Arabidopsis thaliana
  misc_feature (1)..(611): Ceres Seq. ID no. 13602733
  misc_feature: MA Experiment ID: 108561 Result: Up-regulated in Transcription
  misc_feature: MA Experiment 108561 PARAMETER Experiment Name: At_100uM_ABA_cDNA_P Parameter: Timepoint (hr) Value: 6
  misc_feature: MA Experiment 108561 PARAMETER Experiment Name: At_100uM_ABA_cDNA_P Parameter: Tissue Value: Aerial
  misc_feature: MA Experiment 108561 PARAMETER Experiment Name: At_100uM_ABA_cDNA_P Parameter: Treatment Value: 100uM ABA vs. No Treatment
  misc_feature: MA Experiment ID: 108585 Result: Up-regulated in Transcription
  misc_feature: MA Experiment 108585 PARAMETER Experiment Name: At_5mM_NaNP_cDNA_P Parameter: Timepoint (hr) Value: 6
  misc_feature: MA Experiment 108585 PARAMETER Experiment Name: At_5mM_NaNP_cDNA_P Parameter: Tissue Value: Aerial
  misc_feature: MA Experiment 108585 PARAMETER Experiment Name: At_5mM_NaNP_cDNA_P Parameter: Treatment Value: null
  misc_feature: MA Experiment ID: 108595 Result: Up-regulated in Transcription
  misc_feature: MA Experiment 108595 PARAMETER Experiment Name: At_Ler-pi_Ovule_cDNA_P Parameter: Plant Line Value: null
  misc_feature: MA Experiment ID: 108608 Result: Up-regulated in Transcription
  misc_feature: MA Experiment 108608 PARAMETER Experiment Name: At_100uM_ABA_cDNA_P Parameter: Timepoint (hr) Value: 1
  misc_feature: MA Experiment 108608 PARAMETER Experiment Name: At_100uM_ABA_cDNA_P Parameter: Tissue Value: Aerial
  misc_feature: MA Experiment 108608 PARAMETER Experiment Name: At_100uM_ABA_cDNA_P Parameter: Treatment Value: 100uM ABA vs. No Treatment
  misc_feature: MA Experiment ID: 108668 Result: Up-regulated in Transcription
  misc_feature: MA Experiment 108668 PARAMETER Experiment Name: At_2mM_SA_cDNA_P Parameter: Plant Line Value: WS
  misc_feature: MA Experiment 108668 PARAMETER Experiment Name: At_2mM_SA_cDNA_P Parameter: Timepoint (hr) Value: 6
  misc_feature: MA Experiment 108668 PARAMETER Experiment Name: At_2mM_SA_cDNA_P Parameter: Treatment Value: 2mM SA vs. No Treatment
  misc_feature: MA Experiment ID: 20000030 Result: Down-regulated in Transcription
  misc_feature: MA Experiment 20000030 PARAMETER Experiment Name: At_CS6630_Roots_cDNA_P Parameter: Plant Line Value: CS6630 vs. WS
  misc_feature: MA Experiment 20000030 PARAMETER Experiment Name: At_CS6630_Roots_cDNA_P Parameter: Tissue Value: Roots
  misc_feature: MA Experiment ID: 20000069 Result: Up-regulated in Transcription
  misc_feature: MA Experiment 20000069 PARAMETER Experiment Name: At_100uM_ABA_Mutants_cDNA_P Parameter: Plant Line Value: CS23
  misc_feature: MA Experiment 20000069 PARAMETER Experiment Name: At_100uM_ABA_Mutants_cDNA_P Parameter: Timepoint (hr) Value: 6
  misc_feature: MA Experiment 20000069 PARAMETER Experiment Name: At_100uM_ABA_Mutants_cDNA_P Parameter: Tissue Value: Aerial
  misc_feature: MA Experiment 20000069 PARAMETER Experiment Name: At_100uM_ABA_Mutants_cDNA_P Parameter: Treatment Value: 100uM ABA vs. No Treatment
  misc_feature: MA Experiment ID: 20000072 Result: Up-regulated in Transcription
  misc_feature: MA Experiment 20000072 PARAMETER Experiment Name: At_100uM_ABA_Mutants_cDNA_P Parameter: Plant Line Value: CS8105
  misc_feature: MA Experiment 20000072 PARAMETER Experiment Name: At_100uM_ABA_Mutants_cDNA_P Parameter: Timepoint (hr) Value: 6
  misc_feature: MA Experiment 20000072 PARAMETER Experiment Name: At_100uM_ABA_Mutants_cDNA_P Parameter: Tissue Value: Aerial
  misc_feature: MA Experiment 20000072 PARAMETER Experiment Name: At_100uM_ABA_Mutants_cDNA_P Parameter: Treatment Value: 100uM ABA vs. No Treatment
  misc_feature: MA Experiment ID: 20000166 Result: Up-regulated in Transcription
  misc_feature: MA Experiment 20000166 PARAMETER Experiment Name: At_100uM_ABA_P Parameter: Age (day) Value: 14
  misc_feature: MA Experiment 20000166 PARAMETER Experiment Name: At_100uM_ABA_P Parameter: Organism Value: A. thaliana
  misc_feature: MA Experiment 20000166 PARAMETER Experiment Name: At_100uM_ABA_P Parameter: Plant Line Value: WS
  misc_feature: MA Experiment 20000166 PARAMETER Experiment Name: At_100uM_ABA_P Parameter: Timepoint (hr) Value: 1
  misc_feature: MA Experiment 20000166 PARAMETER Experiment Name: At_100uM_ABA_P Parameter: Tissue Value: Aerial
  misc_feature: MA Experiment 20000166 PARAMETER Experiment Name: At_100uM_ABA_P Parameter: Treatment Value: 100uM ABA vs. No Treatment
  misc_feature: MA Experiment ID: 20000169 Result: Up-regulated in Transcription
  misc_feature: MA Experiment 20000169 PARAMETER Experiment Name: At_100uM_ABA_P Parameter: Age (day) Value: 14
  misc_feature: MA Experiment 20000169 PARAMETER Experiment Name: At_100uM_ABA_P Parameter: Organism Value: A. thaliana
  misc_feature: MA Experiment 20000169 PARAMETER Experiment Name: At_100uM_ABA_P Parameter: Plant Line Value: WS
  misc_feature: MA Experiment 20000169 PARAMETER Experiment Name: At_100uM_ABA_P Parameter: Timepoint (hr) Value: 6
  misc_feature: MA Experiment 20000169 PARAMETER Experiment Name: At_100uM_ABA_P Parameter: Tissue Value: Aerial
  misc_feature: MA Experiment 20000169 PARAMETER Experiment Name: At_100uM_ABA_P Parameter: Treatment Value: 100uM ABA vs. No Treatment
  misc_feature: MA Experiment ID: 20000173 Result: Down-regulated in Transcription
  misc_feature: MA Experiment 20000173 PARAMETER Experiment Name: At_42deg_Heat_P Parameter: Age (day) Value: 14
  misc_feature: MA Experiment 20000173 PARAMETER Experiment Name: At_42deg_Heat_P Parameter: Organism Value: A. thaliana
  misc_feature: MA Experiment 20000173 PARAMETER Experiment Name: At_42deg_Heat_P Parameter: Plant Line Value: WS
  misc_feature: MA Experiment 20000173 PARAMETER Experiment Name: At_42deg_Heat_P Parameter: Temperature (deg C) Value: 42 vs. 22
  misc_feature: MA Experiment 20000173 PARAMETER Experiment Name: At_42deg_Heat_P Parameter: Timepoint (hr) Value: 6
  misc_feature: MA Experiment 20000173 PARAMETER Experiment Name: At_42deg_Heat_P Parameter: Tissue Value: Aerial
  misc_feature: MA Experiment ID: 20000182 Result: Up-regulated in Transcription
  misc_feature: MA Experiment 20000182 PARAMETER Experiment Name: At_2mM_SA_P Parameter: Age (day) Value: 14
  misc_feature: MA Experiment 20000182 PARAMETER Experiment Name: At_2mM_SA_P Parameter: Organism Value: A. thaliana
  misc_feature: MA Experiment 20000182 PARAMETER Experiment Name: At_2mM_SA_P Parameter: Plant Line Value: WS
  misc_feature: MA Experiment 20000182 PARAMETER Experiment Name: At_2mM_SA_P Parameter: Timepoint (hr) Value: 6
  misc_feature: MA Experiment 20000182 PARAMETER Experiment Name: At_2mM_SA_P Parameter: Tissue Value: Aerial
  misc_feature: MA Experiment 20000182 PARAMETER Experiment Name: At_2mM_SA_P Parameter: Treatment Value: 2mM SA vs. No Treatment
  misc_feature: MA Experiment ID: 20000184 Result: Down-regulated in Transcription
  misc_feature: MA Experiment 20000184 PARAMETER Experiment Name: At_Shoots__P Parameter: Age (day) Value: 7
  misc_feature: MA Experiment 20000184 PARAMETER Experiment Name: At_Shoots__P Parameter: Tissue Value: Shoots vs. Whole Plant
  misc_feature: MA Experiment ID: 20000265 Result: Up-regulated in Transcription
  misc_feature: MA Experiment 20000265 PARAMETER Experiment Name: At_Open_Flower_P Parameter: Age (day) Value: 21
  misc_feature: MA Experiment 20000265 PARAMETER Experiment Name: At_Open_Flower_P Parameter: Plant Line Value: WS
  misc_feature: MA Experiment 20000265 PARAMETER Experiment Name: At_Open_Flower_P Parameter: Tissue Value: Closed Flower vs. Whole Plant
  misc_feature: MA Experiment ID: 20000453 Result: Up-regulated in Transcription
  misc_feature: MA Experiment 20000453 PARAMETER Experiment Name: At_100uM_ABA_P Parameter: Age (day) Value: 15
  misc_feature: MA Experiment 20000453 PARAMETER Experiment Name: At_100uM_ABA_P Parameter: Organism Value: A. thaliana
  misc_feature: MA Experiment 20000453 PARAMETER Experiment Name: At_100uM_ABA_P Parameter: Plant Line Value: WS
  misc_feature: MA Experiment 20000453 PARAMETER Experiment Name: At_100uM_ABA_P Parameter: Timepoint (hr) Value: 24
  misc_feature: MA Experiment 20000453 PARAMETER Experiment Name: At_100uM_ABA_P Parameter: Tissue Value: Aerial
  misc_feature: MA Experiment 20000453 PARAMETER Experiment Name: At_100uM_ABA_P Parameter: Treatment Value: 100uM ABA vs. No Treatment
  misc_feature: MA Experiment ID: 20001554 Result: Up-regulated in Transcription
  misc_feature: MA Experiment 20001554 PARAMETER Experiment Name: At_Drought_Soil_Dry_P Parameter: Age (day) Value: 21
  misc_feature: MA Experiment 20001554 PARAMETER Experiment Name: At_Drought_Soil_Dry_P Parameter: Organism Value: A. thaliana
  misc_feature: MA Experiment 20001554 PARAMETER Experiment Name: At_Drought_Soil_Dry_P Parameter: Plant Line Value: WS
  misc_feature: MA Experiment 20001554 PARAMETER Experiment Name: At_Drought_Soil_Dry_P Parameter: Post Timepoint (hr) Value: None
  misc_feature: MA Experiment 20001554 PARAMETER Experiment Name: At_Drought_Soil_Dry_P Parameter: Post-Treatment Value: None
  misc_feature: MA Experiment 20001554 PARAMETER Experiment Name: At_Drought_Soil_Dry_P Parameter: Timepoint (day) Value: 7
  misc_feature: MA Experiment 20001554 PARAMETER Experiment Name: At_Drought_Soil_Dry_P Parameter: Treatment Value: Drought vs. No Drought
  misc_feature: MA Experiment ID: 20001555 Result: Up-regulated in Transcription
  misc_feature: MA Experiment 20001555 PARAMETER Experiment Name: At_Drought_Soil_Dry_P Parameter: Age (day) Value: 24
  misc_feature: MA Experiment 20001555 PARAMETER Experiment Name: At_Drought_Soil_Dry_P Parameter: Organism Value: A. thaliana
  misc_feature: MA Experiment 20001555 PARAMETER Experiment Name: At_Drought_Soil_Dry_P Parameter: Plant Line Value: WS
  misc_feature: MA Experiment 20001555 PARAMETER Experiment Name: At_Drought_Soil_Dry_P Parameter: Post Timepoint (hr) Value: None
  misc_feature: MA Experiment 20001555 PARAMETER Experiment Name: At_Drought_Soil_Dry_P Parameter: Post-Treatment Value: None
  misc_feature: MA Experiment 20001555 PARAMETER Experiment Name: At_Drought_Soil_Dry_P Parameter: Timepoint (day) Value: 10
  misc_feature: MA Experiment 20001555 PARAMETER Experiment Name: At_Drought_Soil_Dry_P Parameter: Treatment Value: Drought vs. No Drought
  misc_feature: MA Experiment ID: 20001560 Result: Up-regulated in Transcription
  misc_feature: MA Experiment 20001560 PARAMETER Experiment Name: At_Drought_Soil_Dry_P Parameter: Age (day) Value: 28
  misc_feature: MA Experiment 20001560 PARAMETER Experiment Name: At_Drought_Soil_Dry_P Parameter: Organism Value: A. thaliana
  misc_feature: MA Experiment 20001560 PARAMETER Experiment Name: At_Drought_Soil_Dry_P Parameter: Plant Line Value: WS
  misc_feature: MA Experiment 20001560 PARAMETER Experiment Name: At_Drought_Soil_Dry_P Parameter: Post Timepoint (hr) Value: None
  misc_feature: MA Experiment 20001560 PARAMETER Experiment Name: At_Drought_Soil_Dry_P Parameter: Post-Treatment Value: None
  misc_feature: MA Experiment 20001560 PARAMETER Experiment Name: At_Drought_Soil_Dry_P Parameter: Timepoint (day) Value: 14
  misc_feature: MA Experiment 20001560 PARAMETER Experiment Name: At_Drought_Soil_Dry_P Parameter: Treatment Value: Drought vs. No Drought
  misc_feature: MA Experiment ID: 20001757 Result: Down-regulated in Transcription
  misc_feature: MA Experiment 20001757 PARAMETER Experiment Name: At_50mM_NH4NO3_L-to-H_P Parameter: Timepoint (hr) Value: 6
  misc_feature: MA Experiment 20001757 PARAMETER Experiment Name: At_50mM_NH4NO3_L-to-H_P Parameter: Tissue Value: Leaf
  misc_feature: MA Experiment 20001757 PARAMETER Experiment Name: At_50mM_NH4NO3_L-to-H_P Parameter: Treatment Value: 50mM NH4NO3 vs 100mM Mannitol
  misc_feature: MA Experiment ID: 20001904 Result: Up-regulated in Transcription
  misc_feature: MA Experiment 20001904 PARAMETER Experiment Name: At_Drought_Reproduction_P Parameter: Age (day) Value: 37
  misc_feature: MA Experiment 20001904 PARAMETER Experiment Name: At_Drought_Reproduction_P Parameter: Organism Value: A. thaliana
  misc_feature: MA Experiment 20001904 PARAMETER Experiment Name: At_Drought_Reproduction_P Parameter: Plant Line Value: WS
  misc_feature: MA Experiment 20001904 PARAMETER Experiment Name: At_Drought_Reproduction_P Parameter: Timepoint (day) Value: 7
  misc_feature: MA Experiment 20001904 PARAMETER Experiment Name: At_Drought_Reproduction_P Parameter: Tissue Value: Rosettes
  misc_feature: MA Experiment 20001904 PARAMETER Experiment Name: At_Drought_Reproduction_P Parameter: Treatment Value: Drought vs. No Drought
  misc_feature: MA Experiment ID: 20001905 Result: Up-regulated in Transcription
  misc_feature: MA Experiment 20001905 PARAMETER Experiment Name: At_Drought_Reproduction_P Parameter: Age (day) Value: 40
  misc_feature: MA Experiment 20001905 PARAMETER Experiment Name: At_Drought_Reproduction_P Parameter: Organism Value: A. thaliana
  misc_feature: MA Experiment 20001905 PARAMETER Experiment Name: At_Drought_Reproduction_P Parameter: Plant Line Value: WS
  misc_feature: MA Experiment 20001905 PARAMETER Experiment Name: At_Drought_Reproduction_P Parameter: Timepoint (day) Value: 10
  misc_feature: MA Experiment 20001905 PARAMETER Experiment Name: At_Drought_Reproduction_P Parameter: Tissue Value: Rosettes
  misc_feature: MA Experiment 20001905 PARAMETER Experiment Name: At_Drought_Reproduction_P Parameter: Treatment Value: Drought vs. No Drought
  misc_feature: MA Experiment ID: 20001906 Result: Up-regulated in Transcription
  misc_feature: MA Experiment 20001906 PARAMETER Experiment Name: At_Drought_Reproduction_P Parameter: Age (day) Value: 35
  misc_feature: MA Experiment 20001906 PARAMETER Experiment Name: At_Drought_Reproduction_P Parameter: Organism Value: A. thaliana
  misc_feature: MA Experiment 20001906 PARAMETER Experiment Name: At_Drought_Reproduction_P Parameter: Plant Line Value: WS
  misc_feature: MA Experiment 20001906 PARAMETER Experiment Name: At_Drought_Reproduction_P Parameter: Timepoint (day) Value: 5
  misc_feature: MA Experiment 20001906 PARAMETER Experiment Name: At_Drought_Reproduction_P Parameter: Tissue Value: Siliques
  misc_feature: MA Experiment 20001906 PARAMETER Experiment Name: At_Drought_Reproduction_P Parameter: Treatment Value: Drought vs. No Drought
  misc_feature: MA Experiment ID: 20001911 Result: Up-regulated in Transcription
  misc_feature: MA Experiment 20001911 PARAMETER Experiment Name: At_Drought_Reproduction_P Parameter: Age (day) Value: 40
  misc_feature: MA Experiment 20001911 PARAMETER Experiment Name: At_Drought_Reproduction_P Parameter: Organism Value: A. thaliana
  misc_feature: MA Experiment 20001911 PARAMETER Experiment Name: At_Drought_Reproduction_P Parameter: Plant Line Value: WS
  misc_feature: MA Experiment 20001911 PARAMETER Experiment Name: At_Drought_Reproduction_P Parameter: Timepoint (day) Value: 10
  misc_feature: MA Experiment 20001911 PARAMETER Experiment Name: At_Drought_Reproduction_P Parameter: Tissue Value: Flowers
  misc_feature: MA Experiment 20001911 PARAMETER Experiment Name: At_Drought_Reproduction_P Parameter: Treatment Value: Drought vs. No Drought
gatttctgatctttgccctcttttcataagatagttagggttttagtcttttgtgtaataattcattgatcatgaacaagggagaagaaggaggagaagacaaggaagtggtttctcttcaaactctgagtaagaaaatggatgattttgcaaaagctagagattgggagaagtatcacagtccaaggaatctccttcttgctatggtgggtgaagtgggagagctatcagagatattccaatggaaaggagaagtagcaagaggatgtccagattggaaagaagaagagaaagtccatcttggagaagagttatcagatgttttgttgtatttggtgaggctttcggatgcgtgtggtgtcgatttaggcaaagccgctctgcgcaagatcgagcttaatgctattaagtatccagttcccaaaaagactgatgatcattgtgttggtgatggtgaagattcaagcagcaagattaagttgaatgaagaaaactaatctctcttattagtggttttgtgagtaagtttattgtgggtattttcttgttatgaagtaggagcatgatcaagaacatataatcttcgaaggcctctaattatatttcagatg

SEQ ID NO: 99368 - protein, 141 aa, Arabidopsis thaliana; identical to SEQ ID NO: 30288
  peptide (1)..(141): Ceres Seq. ID no. 13602734
  misc_feature (1)..(141): Homolog of NCBI NO: 30687841 NR Description: expressed protein [Arabidopsis thaliana] contains similarity to unknown [Arabidopsis thaliana] >gi|28393817|gb|AAO42317.1| unknown
  misc_feature (14)..(120): Homolog of NCBI NO: 32482945 NR Description: OSJNBb0072M01.10 [Oryza sativa (japonica
  misc_feature (1)..(115): Homolog of NCBI NO: 32352194 NR Description: hypothetical protein [Oryza sativa (japonica
  misc_feature (15)..(118): Homolog of NCBI NO: 33468615 NR Description: SI:zC150A22.2 (novel protein) [Danio rerio]
  misc_feature (15)..(124): Homolog of NCBI NO: 20302079 NR Description: RS21-C6 protein [Rattus norvegicus]
  misc_feature (15)..(124): Homolog of NCBI NO: 12963573 NR Description: RIKEN cDNA 2410015N17 [Mus musculus]
  misc_feature (3)..(115): Homolog of NCBI NO: 13129100 NR Description: hypothetical protein MGC5627 [Homo sapiens] unnamed protein product [Homo sapiens] Unknown (protein for MGC:5627) [Homo sapiens]
  misc_feature (16)..(124): Homolog of NCBI NO: 34877104 NR Description: similar to RS21-C6 protein [Rattus norvegicus]
  misc_feature (15)..(124): Homolog of NCBI NO: 34864617 NR Description: similar to RS21-C6 protein [Rattus norvegicus]
  misc_feature (10)..(117): Homolog of NCBI NO: 34495748 NR Description: conserved hypothetical protein [Chromobacterium ATCC 12472] >gi|34101603|gb|AAQ57972.1| conserved hypothetical

SEQ ID NO: 99369 - protein, 119 aa, Arabidopsis thaliana; identical to SEQ ID NO: 30289
  peptide (1)..(119): Ceres Seq. ID no. 13602735
  misc_feature (1)..(119): Homolog of NCBI NO: 30687841 NR Description: expressed protein [Arabidopsis thaliana] contains similarity to unknown [Arabidopsis thaliana] >gi|28393817|gb|AAO42317.1| unknown
  misc_feature (1)..(98): Homolog of NCBI NO: 32482945 NR Description: OSJNBb0072M01.10 [Oryza sativa (japonica
  misc_feature (1)..(93): Homolog of NCBI NO: 32352194 NR Description: hypothetical protein [Oryza sativa (japonica
  misc_feature (1)..(96): Homolog of NCBI NO: 33468615 NR Description: SI:zC150A22.2 (novel protein) [Danio rerio]
  misc_feature (1)..(102): Homolog of NCBI NO: 20302079 NR Description: RS21-C6 protein [Rattus norvegicus]
  misc_feature (1)..(102): Homolog of NCBI NO: 12963573 NR Description: RIKEN cDNA 2410015N17 [Mus musculus]
  misc_feature (1)..(93): Homolog of NCBI NO: 13129100 NR Description: hypothetical protein MGC5627 [Homo sapiens] unnamed protein product [Homo sapiens] Unknown (protein for MGC:5627) [Homo sapiens]
  misc_feature (1)..(102): Homolog of NCBI NO: 34877104 NR Description: similar to RS21-C6 protein [Rattus norvegicus]
  misc_feature (1)..(102): Homolog of NCBI NO: 34864617 NR Description: similar to RS21-C6 protein [Rattus norvegicus]
  misc_feature (1)..(95): Homolog of NCBI NO: 34495748 NR Description: conserved hypothetical protein [Chromobacterium ATCC 12472] >gi|34101603|gb|AAQ57972.1| conserved hypothetical

SEQ ID NO: 99370 - protein, 97 aa, Arabidopsis thaliana; identical to SEQ ID NO: 30290
  peptide (1)..(97): Ceres Seq. ID no. 13602736
  misc_feature (1)..(97): Homolog of NCBI NO: 30687841 NR Description: expressed protein [Arabidopsis thaliana] contains similarity to unknown [Arabidopsis thaliana] >gi|28393817|gb|AAO42317.1| unknown
  misc_feature (1)..(76): Homolog of NCBI NO: 32482945 NR Description: OSJNBb0072M01.10 [Oryza sativa (japonica
  misc_feature (1)..(71): Homolog of NCBI NO: 32352194 NR Description: hypothetical protein [Oryza sativa (japonica
  misc_feature (1)..(74): Homolog of NCBI NO: 33468615 NR Description: SI:zC150A22.2 (novel protein) [Danio rerio]
  misc_feature (1)..(80): Homolog of NCBI NO: 20302079 NR Description: RS21-C6 protein [Rattus norvegicus]
  misc_feature (1)..(80): Homolog of NCBI NO: 12963573 NR Description: RIKEN cDNA 2410015N17 [Mus musculus]
  misc_feature (1)..(71): Homolog of NCBI NO: 13129100 NR Description: hypothetical protein MGC5627 [Homo sapiens] unnamed protein product [Homo sapiens] Unknown (protein for MGC:5627) [Homo sapiens]
  misc_feature (1)..(80): Homolog of NCBI NO: 34877104 NR Description: similar to RS21-C6 protein [Rattus norvegicus]
  misc_feature (1)..(80): Homolog of NCBI NO: 34864617 NR Description: similar to RS21-C6 protein [Rattus norvegicus]
  misc_feature (1)..(73): Homolog of NCBI NO: 34495748 NR Description: conserved hypothetical protein [Chromobacterium ATCC 12472] >gi|34101603|gb|AAQ57972.1| conserved hypothetical

SEQ ID NO: 99371 - DNA, 1080 bp, Arabidopsis thaliana
  misc_feature (1)..(1080): Ceres Seq. ID no. 13602741
  misc_feature: MA Experiment ID: 108462 Result: Up-regulated in Transcription
  misc_feature: MA Experiment 108462 PARAMETER Experiment Name: At_Germinating_Seeds_cDNA_P Parameter: Age (day) Value: 2 vs. 0
  misc_feature: MA Experiment 108462 PARAMETER Experiment Name: At_Germinating_Seeds_cDNA_P Parameter: Tissue Value: Germinating Seeds
  misc_feature: MA Experiment ID: 108463 Result: Up-regulated in Transcription
  misc_feature: MA Experiment 108463 PARAMETER Experiment Name: At_Germinating_Seeds_cDNA_P Parameter: Age (day) Value: 3 vs. 0
  misc_feature: MA Experiment 108463 PARAMETER Experiment Name: At_Germinating_Seeds_cDNA_P Parameter: Tissue Value: Germinating Seeds
  misc_feature: MA Experiment ID: 108464 Result: Up-regulated in Transcription
  misc_feature: MA Experiment 108464 PARAMETER Experiment Name: At_Germinating_Seeds_cDNA_P Parameter: Age (day) Value: 4 vs. 0
  misc_feature: MA Experiment 108464 PARAMETER Experiment Name: At_Germinating_Seeds_cDNA_P Parameter: Tissue Value: Germinating Seeds
  misc_feature: MA Experiment ID: 108469 Result: Up-regulated in Transcription
  misc_feature: MA Experiment ID: 108488 Result: Down-regulated in Transcription
  misc_feature: MA Experiment ID: 108489 Result: Down-regulated in Transcription
  misc_feature: MA Experiment ID: 108576 Result: Up-regulated in Transcription
  misc_feature: MA Experiment 108576 PARAMETER Experiment Name: At_42deg_Heat_cDNA_P Parameter: Temperature (deg C) Value: 42 vs. 22
  misc_feature: MA Experiment 108576 PARAMETER Experiment Name: At_42deg_Heat_cDNA_P Parameter: Timepoint (hr) Value: 1
  misc_feature: MA Experiment 108576 PARAMETER Experiment Name: At_42deg_Heat_cDNA_P Parameter: Tissue Value: Aerial
  misc_feature: MA Experiment ID: 108577 Result: Up-regulated in Transcription
  misc_feature: MA Experiment 108577 PARAMETER Experiment Name: At_42deg_Heat_cDNA_P Parameter: Temperature (deg C) Value: 42 vs. 22
  misc_feature: MA Experiment 108577 PARAMETER Experiment Name: At_42deg_Heat_cDNA_P Parameter: Timepoint (hr) Value: 6
  misc_feature: MA Experiment 108577 PARAMETER Experiment Name: At_42deg_Heat_cDNA_P Parameter: Tissue Value: Aerial
  misc_feature: MA Experiment ID: 108595 Result: Up-regulated in Transcription
  misc_feature: MA Experiment 108595 PARAMETER Experiment Name: At_Ler-pi_Ovule_cDNA_P Parameter: Plant Line Value: null
  misc_feature: MA Experiment ID: 20000089 Result: Up-regulated in Transcription
  misc_feature: MA Experiment ID: 20000093 Result: Up-regulated in Transcription
  misc_feature: MA Experiment 20000093 PARAMETER Experiment Name: At_42deg_Heat_cDNA_P Parameter: Temperature (deg C) Value: 42 vs. 22
  misc_feature: MA Experiment 20000093 PARAMETER Experiment Name: At_42deg_Heat_cDNA_P Parameter: Timepoint (hr) Value: 0.5
  misc_feature: MA Experiment 20000093 PARAMETER Experiment Name: At_42deg_Heat_cDNA_P Parameter: Tissue Value: Aerial
  misc_feature: MA Experiment ID: 20000111 Result: Up-regulated in Transcription
  misc_feature: MA Experiment 20000111 PARAMETER Experiment Name: At_42deg_Heat_cDNA_P Parameter: Temperature (deg C) Value: 42 vs. 22
  misc_feature: MA Experiment 20000111 PARAMETER Experiment Name: At_42deg_Heat_cDNA_P Parameter: Timepoint (hr) Value: 6
  misc_feature: MA Experiment 20000111 PARAMETER Experiment Name: At_42deg_Heat_cDNA_P Parameter: Tissue Value: Aerial
  misc_feature: MA Experiment ID: 20000113 Result: Up-regulated in Transcription
  misc_feature: MA Experiment 20000113 PARAMETER Experiment Name: At_42deg_Heat_cDNA_P Parameter: Temperature (deg C) Value: 42 vs. 22
  misc_feature: MA Experiment 20000113 PARAMETER Experiment Name: At_42deg_Heat_cDNA_P Parameter: Timepoint (hr) Value: 8
  misc_feature: MA Experiment 20000113 PARAMETER Experiment Name: At_42deg_Heat_cDNA_P Parameter: Tissue Value: Aerial
  misc_feature: MA Experiment ID: 20000144 Result: Up-regulated in Transcription
  misc_feature: MA Experiment 20000144 PARAMETER Experiment Name: At_42deg_Heat_cDNA_P Parameter: Temperature (deg C) Value: 42 vs. 22
  misc_feature: MA Experiment 20000144 PARAMETER Experiment Name: At_42deg_Heat_cDNA_P Parameter: Timepoint (hr) Value: 1
  misc_feature: MA Experiment 20000144 PARAMETER Experiment Name: At_42deg_Heat_cDNA_P Parameter: Tissue Value: Aerial
  misc_feature: MA Experiment ID: 20000179 Result: Up-regulated in Transcription
  misc_feature: MA Experiment 20000179 PARAMETER Experiment Name: At_Germinating_Seeds_P Parameter: Age (hr) Value: 6 vs. 0
  misc_feature: MA Experiment 20000179 PARAMETER Experiment Name: At_Germinating_Seeds_P Parameter: Tissue Value: Germinating Seeds
  misc_feature: MA Experiment ID: 20000180 Result: Up-regulated in Transcription
  misc_feature: MA Experiment 20000180 PARAMETER Experiment Name: At_Germinating_Seeds_P Parameter: Age (hr) Value: 24 vs. 0
  misc_feature: MA Experiment 20000180 PARAMETER Experiment Name: At_Germinating_Seeds_P Parameter: Tissue Value: Germinating Seeds
  misc_feature: MA Experiment ID: 20000495 Result: Down-regulated in Transcription
  misc_feature: MA Experiment 20000495 PARAMETER Experiment Name: At_Guard_Cells_P Parameter: Harvest Date Value: 8/2/2002
  misc_feature: MA Experiment 20000495 PARAMETER Experiment Name: At_Guard_Cells_P Parameter: Organism Value: A. thaliana
  misc_feature: MA Experiment 20000495 PARAMETER Experiment Name: At_Guard_Cells_P Parameter: Tissue Value: Guard Cells vs. Leaves
  misc_feature: MA Experiment ID: 20000496 Result: Down-regulated in Transcription
  misc_feature: MA Experiment 20000496 PARAMETER Experiment Name: At_Guard_Cells_P Parameter: Harvest Date Value: 7/19/2002
  misc_feature: MA Experiment 20000496 PARAMETER Experiment Name: At_Guard_Cells_P Parameter: Organism Value: Canola
  misc_feature: MA Experiment 20000496 PARAMETER Experiment Name: At_Guard_Cells_P Parameter: Tissue Value: Guard Cells vs. Leaves
  misc_feature: MA Experiment ID: 20000794 Result: Down-regulated in Transcription
  misc_feature: MA Experiment 20000794 PARAMETER Experiment Name: At_Petals_P Parameter: Age (day) Value: 23-25 days
  misc_feature: MA Experiment 20000794 PARAMETER Experiment Name: At_Petals_P Parameter: Plant Line Value: WS
  misc_feature: MA Experiment 20000794 PARAMETER Experiment Name: At_Petals_P Parameter: Tissue Value: Petals vs. Whole plant
  misc_feature: MA Experiment ID: 20001451 Result: Down-regulated in Transcription
  misc_feature: MA Experiment 20001451 PARAMETER Experiment Name: At_Far-red-induction_P Parameter: Age (day) Value: 7
  misc_feature: MA Experiment 20001451 PARAMETER Experiment Name: At_Far-red-induction_P Parameter: Light Value: Far-red vs. White
  misc_feature: MA Experiment 20001451 PARAMETER Experiment Name: At_Far-red-induction_P Parameter: Organism Value: A. thaliana
  misc_feature: MA Experiment 20001451 PARAMETER Experiment Name: At_Far-red-induction_P Parameter: Plant Line Value: Columbia
  misc_feature: MA Experiment 20001451 PARAMETER Experiment Name: At_Far-red-induction_P Parameter: Timepoint (hr) Value: 24
  misc_feature: MA Experiment 20001451 PARAMETER Experiment Name: At_Far-red-induction_P Parameter: Tissue Value: Whole Plant
  misc_feature: MA Experiment ID: 20001905 Result: Down-regulated in Transcription
  misc_feature: MA Experiment 20001905 PARAMETER Experiment Name: At_Drought_Reproduction_P Parameter: Age (day) Value: 40
  misc_feature: MA Experiment 20001905 PARAMETER Experiment Name: At_Drought_Reproduction_P Parameter: Organism Value: A. thaliana
  misc_feature: MA Experiment 20001905 PARAMETER Experiment Name: At_Drought_Reproduction_P Parameter: Plant Line Value: WS
  misc_feature: MA Experiment 20001905 PARAMETER Experiment Name: At_Drought_Reproduction_P Parameter: Timepoint (day) Value: 10
  misc_feature: MA Experiment 20001905 PARAMETER Experiment Name: At_Drought_Reproduction_P Parameter: Tissue Value: Rosettes
  misc_feature: MA Experiment 20001905 PARAMETER Experiment Name: At_Drought_Reproduction_P Parameter: Treatment Value: Drought vs. No Drought
  misc_feature: MA Experiment ID: 20001911 Result: Down-regulated in Transcription
  misc_feature: MA Experiment 20001911 PARAMETER Experiment Name: At_Drought_Reproduction_P Parameter: Age (day) Value: 40
  misc_feature: MA Experiment 20001911 PARAMETER Experiment Name: At_Drought_Reproduction_P Parameter: Organism Value: A. thaliana
  misc_feature: MA Experiment 20001911 PARAMETER Experiment Name: At_Drought_Reproduction_P Parameter: Plant Line Value: WS
  misc_feature: MA Experiment 20001911 PARAMETER Experiment Name: At_Drought_Reproduction_P Parameter: Timepoint (day) Value: 10
  misc_feature: MA Experiment 20001911 PARAMETER Experiment Name: At_Drought_Reproduction_P Parameter: Tissue Value: Flowers
  misc_feature: MA Experiment 20001911 PARAMETER Experiment Name: At_Drought_Reproduction_P Parameter: Treatment Value: Drought vs. No Drought
aaaaggctccggctttatcattctcagaccatcatcactaagcagtaagtaagcactataatcgcagaagatagataaaatggaagtagggtttctgggtttgggaatcatgggaaaagccatgtcaatgaatctattgaagaatggattcaaagtcactgtatggaacagaacactctccaagtgtgatgagcttgtggagcatggtgcatcagtatgtgagagtccagctgaagtaatcaagaaatgcaaatacactattgctatgctctctgatccttgtgctgctctttcggttgttttcgataaaggcggtgttttggagcagatatgtgaaggaaaaggttatatcgatatgtcgactgttgatgcagagacttctttgaagatcaatgaggcaatcaccgggaagggtggtcggttcgtagaaggtccggtttcaggtagcaaaaagccagctgaagatggccaactcattatccttgctgctggtgacaaggcactctttgaggaatcaatcccagcttttgatgtcttggggaagagatcgttttacttgggacaagttggaaacggagctaaaatgaagctaatagtgaacatgataatgggaagcatgatgaatgcattctctgaggggcttgtattggctgacaagagtggacttagctctgacactcttttggatattctggatctgggagcaatgactaacccgatgttcaaggggaaaggaccttcaatgaacaagagtagttacccaccagcatttccattgaaacatcagcagaaagacatgaggctagctcttgctcttggcgatgaaaacgcggtttccatgcctgtagccgcggctgcaaacgaggcttttaagaaggcgagaagcttgggactaggagatctcgacttctctgctgtgattgaagctgtgaaattctcccgcgaatagcaaactgtttcaaaacatccactcatttggattggctgagatactgaaatcattgttatcttcccaaatagagatttactcatttggccaaacacacattttactccttcaccaaataaaaagtcttaacc

SEQ ID NO: 99372 - protein, 289 aa, Arabidopsis thaliana
  peptide (1)..(289): Ceres Seq. ID no. 13602742
  misc_feature (2)..(162): Pfam Name: NAD binding domain of 6-phosphogluconate dehydrogenase Pfam Description: NAD binding domain of 6-phosphogluconate
  misc_feature (1)..(289): Homolog of NCBI NO: 18404556 NR Description: gamma hydroxybutyrate dehydrogenase [Arabidopsis
  misc_feature (1)..(289): Homolog of NCBI NO: 15375068 NR Description: gamma hydroxybutyrate dehydrogenase [Arabidopsis
  misc_feature (1)..(234): Homolog of NCBI NO: 15146314 NR Description: AT3g25530/MWL2_15 [Arabidopsis thaliana]
  misc_feature (1)..(285): Homolog of NCBI NO: 29368238 NR Description: gamma hydroxybutyrate dehydrogenase-like protein
  misc_feature (1)..(288): Homolog of NCBI NO: 18394513 NR Description: expressed protein [Arabidopsis thaliana] unknown protein [Arabidopsis thaliana] unknown [Arabidopsis thaliana] >gi|30984568|gb|AAP42747.1|
  misc_feature (4)..(285): Homolog of NCBI NO: 23054597 NR Description: hypothetical protein [Geobacter metallireducens]
  misc_feature (71)..(288): Homolog of NCBI NO: 8778467 NR Description: F1L3.35 [Arabidopsis thaliana]
  misc_feature (1)..(71): Homolog of NCBI NO: 8778467 NR Description: F1L3.35 [Arabidopsis thaliana]
  misc_feature (4)..(285): Homolog of NCBI NO: 39996474 NR Description: 3-hydroxyisobutyrate dehydrogenase family protein
  misc_feature (1)..(283): Homolog of NCBI NO: 13277568 NR Description: Similar to RIKEN cDNA 3930401K13 gene [Homo
MEVGFLGLGIMGKAMSMNLLKNGFKVTVWNRTLSKCDELVEHGASVCESPAEVIKKCKYTIAMLSDPCAALSVVFDKGGVLEQICEGKGYIDMSTVDAETSLKINEAITGKGGRFVEGPVSGSKKPAEDGQLIILAAGDKALFEESIPAFDVLGKRSFYLGQVGNGAKMKLIVNMIMGSMMNAFSEGLVLADKSGLSSDTLLDILDLGAMTNPMFKGKGPSMNKSSYPPAFPLKHQQKDMRLALALGDENAVSMPVAAAANEAFKKARSLGLGDLDFSAVIEAVKFSRE

SEQ ID NO: 99373 - protein, 279 aa, Arabidopsis thaliana
  peptide (1)..(279): Ceres Seq. ID no. 13602743
  misc_feature (1)..(152): Pfam Name: NAD binding domain of 6-phosphogluconate dehydrogenase Pfam Description: NAD binding domain of 6-phosphogluconate
  misc_feature (1)..(279): Homolog of NCBI NO: 18404556 NR Description: gamma hydroxybutyrate dehydrogenase [Arabidopsis
  misc_feature (1)..(279): Homolog of NCBI NO: 15375068 NR Description: gamma hydroxybutyrate dehydrogenase [Arabidopsis
  misc_feature (1)..(224): Homolog of NCBI NO: 15146314 NR Description: AT3g25530/MWL2_15 [Arabidopsis thaliana]
  misc_feature (1)..(275): Homolog of NCBI NO: 29368238 NR Description: gamma hydroxybutyrate dehydrogenase-like protein
  misc_feature (1)..(278): Homolog of NCBI NO: 18394513 NR Description: expressed protein [Arabidopsis thaliana] unknown protein [Arabidopsis thaliana] unknown [Arabidopsis thaliana] >gi|30984568|gb|AAP42747.1|
  misc_feature (1)..(275): Homolog of NCBI NO: 23054597 NR Description: hypothetical protein [Geobacter metallireducens]
  misc_feature (61)..(278): Homolog of NCBI NO: 8778467 NR Description: F1L3.35 [Arabidopsis thaliana]
  misc_feature (1)..(61): Homolog of NCBI NO: 8778467 NR Description: F1L3.35 [Arabidopsis thaliana]
  misc_feature (1)..(275): Homolog of NCBI NO: 39996474 NR Description: 3-hydroxyisobutyrate dehydrogenase family protein
  misc_feature (1)..(273): Homolog of NCBI NO: 13277568 NR Description: Similar to RIKEN cDNA 3930401K13 gene [Homo
MGKAMSMNLLKNGFKVTVWNRTLSKCDELVEHGASVCESPAEVIKKCKYTIAMLSDPCAALSVVFDKGGVLEQICEGKGYIDMSTVDAETSLKINEAITGKGGRFVEGPVSGSKKPAEDGQLIILAAGDKALFEESIPAFDVLGKRSFYLGQVGNGAKMKLIVNMIMGSMMNAFSEGLVLADKSGLSSDTLLDILDLGAMTNPMFKGKGPSMNKSSYPPAFPLKHQQKDMRLALALGDENAVSMPVAAAANEAFKKARSLGLGDLDFSAVIEAVKFSRE

SEQ ID NO: 99374 - protein, 275 aa, Arabidopsis thaliana
  peptide (1)..(275): Ceres Seq. ID no. 13602744
  misc_feature (1)..(148): Pfam Name: NAD binding domain of 6-phosphogluconate dehydrogenase Pfam Description: NAD binding domain of 6-phosphogluconate
  misc_feature (1)..(275): Homolog of NCBI NO: 18404556 NR Description: gamma hydroxybutyrate dehydrogenase [Arabidopsis
  misc_feature (1)..(275): Homolog of NCBI NO: 15375068 NR Description: gamma hydroxybutyrate dehydrogenase [Arabidopsis
  misc_feature (1)..(220): Homolog of NCBI NO: 15146314 NR Description: AT3g25530/MWL2_15 [Arabidopsis thaliana]
  misc_feature (1)..(271): Homolog of NCBI NO: 29368238 NR Description: gamma hydroxybutyrate dehydrogenase-like protein
  misc_feature (1)..(274): Homolog of NCBI NO: 18394513 NR Description: expressed protein [Arabidopsis thaliana] unknown protein [Arabidopsis thaliana] unknown [Arabidopsis thaliana] >gi|30984568|gb|AAP42747.1|
  misc_feature (1)..(271): Homolog of NCBI NO: 23054597 NR Description: hypothetical protein [Geobacter metallireducens]
  misc_feature (57)..(274): Homolog of NCBI NO: 8778467 NR Description: F1L3.35 [Arabidopsis thaliana]
  misc_feature (1)..(57): Homolog of NCBI NO: 8778467 NR Description: F1L3.35 [Arabidopsis thaliana]
  misc_feature (1)..(271): Homolog of NCBI NO: 39996474 NR Description: 3-hydroxyisobutyrate dehydrogenase family protein
  misc_feature (1)..(269): Homolog of NCBI NO: 13277568 NR Description: Similar to RIKEN cDNA 3930401K13 gene [Homo
MSMNLLKNGFKVTVWNRTLSKCDELVEHGASVCESPAEVIKKCKYTIAMLSDPCAALSVVFDKGGVLEQICEGKGYIDMSTVDAETSLKINEAITGKGGRFVEGPVSGSKKPAEDGQLIILAAGDKALFEESIPAFDVLGKRSFYLGQVGNGAKMKLIVNMIMGSMMNAFSEGLVLADKSGLSSDTLLDILDLGAMTNPMFKGKGPSMNKSSYPPAFPLKHQQKDMRLALALGDENAVSMPVAAAANEAFKKARSLGLGDLDFSAVIEAVKFSRE

SEQ ID NO: 99375 - DNA, 893 bp, Arabidopsis thaliana
  misc_feature (1)..(893): Ceres Seq. ID no. 13602745
  misc_feature: MA Experiment ID: 108434 Result: Up-regulated in Transcription
  misc_feature: MA Experiment 108434 PARAMETER Experiment Name: At_Root_Tips_cDNA_P Parameter: Tissue Value: Root Tips
  misc_feature: MA Experiment ID: 108573 Result: Down-regulated in Transcription
  misc_feature: MA Experiment 108573 PARAMETER Experiment Name: At_Drought_cDNA_P Parameter: Timepoint (hr) Value: 6
  misc_feature: MA Experiment 108573 PARAMETER Experiment Name: At_Drought_cDNA_P Parameter: Tissue Value: Aerial
  misc_feature: MA Experiment 108573 PARAMETER Experiment Name: At_Drought_cDNA_P Parameter: Treatment Value: Drought vs. No Drought
  misc_feature: MA Experiment ID: 108595 Result: Down-regulated in Transcription
  misc_feature: MA Experiment 108595 PARAMETER Experiment Name: At_Ler-pi_Ovule_cDNA_P Parameter: Plant Line Value: null
  misc_feature: MA Experiment ID: 20000111 Result: Down-regulated in Transcription
  misc_feature: MA Experiment 20000111 PARAMETER Experiment Name: At_42deg_Heat_cDNA_P Parameter: Temperature (deg C) Value: 42 vs. 22
  misc_feature: MA Experiment 20000111 PARAMETER Experiment Name: At_42deg_Heat_cDNA_P Parameter: Timepoint (hr) Value: 6
  misc_feature: MA Experiment 20000111 PARAMETER Experiment Name: At_42deg_Heat_cDNA_P Parameter: Tissue Value: Aerial
  misc_feature: MA Experiment ID: 20000179 Result: Up-regulated in Transcription
  misc_feature: MA Experiment 20000179 PARAMETER Experiment Name: At_Germinating_Seeds_P Parameter: Age (hr) Value: 6 vs. 0
  misc_feature: MA Experiment 20000179 PARAMETER Experiment Name: At_Germinating_Seeds_P Parameter: Tissue Value: Germinating Seeds
  misc_feature: MA Experiment ID: 20000180 Result: Up-regulated in Transcription
  misc_feature: MA Experiment 20000180 PARAMETER Experiment Name: At_Germinating_Seeds_P Parameter: Age (hr) Value: 24 vs. 0
  misc_feature: MA Experiment 20000180 PARAMETER Experiment Name: At_Germinating_Seeds_P Parameter: Tissue Value: Germinating Seeds
  misc_feature: MA Experiment ID: 20000227 Result: Up-regulated in Transcription
  misc_feature: MA Experiment 20000227 PARAMETER Experiment Name: At_Root-Tips-vs-Tops_P Parameter: Tissue Value: Root Tips vs. Root Tops
gtcgtcgtcatcatcaacaattcgaatctgaaatctgcaattcacgagaagaagtttttttttgtaacaatggcgaatccaattcaagagattattgagaaacaagttctaacggtagcgaaagctatggaggataagatagacgacgagatagcgtctctggaaaagcttgatgaagatgatttggaagttttgagagagaggagattgaagcagatgaagaaaatggcggagaagaagaaacggtggatgagtattggacatggtgaatactctgagattcattctgagaaagatttcttctccgttgttaaatctagtgaacgcgtcgtttgtcacttctaccgtgagaattggccctgtaaagtgatggataaacacatgagcatattggcaaagcaacacattgagacacgtttcgtgaagatccaagctgagaaaagtccattcttggctgagaggcttaagattgttgttcttcccactcttgccctcattaagaacactaaagtcgatgattatgtggttgggttcaatgaactgggagggaaagatgattttagcacagaagatcttgaagagagaatagccagagcgcaagtgatccattacgagggagaatcatctcttaaacaaaagtctacaacacaagtcagaaggaacgtgaggcagagtgctcgttcagattctgactccgaataaatcccttttcttatcaaaggtttgttcgtttgtatcctcttgttagttgtaatacttgcaattcatcgttttgatgatcaaaatcaatgttgatcgttagattgatgaacatgcaatatctagaatactacattgatgttttatatgttacctagtgagagtgttggaatgaccaaagtctttttgagttt

SEQ ID NO: 99376 - protein, 233 aa, Arabidopsis thaliana
  peptide (1)..(233): Ceres Seq. ID no. 13602746
  misc_feature (24)..(233): Homolog of NCBI NO: 18404574 NR Description: expressed protein [Arabidopsis thaliana] gene_id:MWL2.25~similar to unknown protein~sp|O64628 [Arabidopsis
  misc_feature (24)..(233): Homolog of NCBI NO: 21594045 NR Description: putative ATP binding protein [Arabidopsis
  misc_feature (24)..(233): Homolog of NCBI NO: 15224267 NR Description: ATP binding protein -related [Arabidopsis >gi|5902677|sp|O64628|14P_ARATH Protein At2g18990
  misc_feature (76)..(233): Homolog of NCBI NO: 26452365 NR Description: unknown protein [Arabidopsis thaliana]
  misc_feature (28)..(233): Homolog of NCBI NO: 40253924 NR Description: putative ATP binding protein associated with cell
  misc_feature (28)..(233): Homolog of NCBI NO: 28277604 NR Description: Similar to ATP binding protein associated with
  misc_feature (30)..(233): Homolog of NCBI NO: 25286717 NR Description: ATP binding protein associated with cell [Mus musculus] >gi|12833213|dbj|BAB22438.1| unnamed protein [Mus musculus] >gi|12839124|dbj|BAB24440.1| unnamed protein
  misc_feature (23)..(233): Homolog of NCBI NO: 32450365 NR Description: Unknown (protein for MGC:64546) [Xenopus laevis]
  misc_feature (23)..(233): Homolog of NCBI NO: 27924448 NR Description: Similar to ATP binding protein associated with
  misc_feature (30)..(233): Homolog of NCBI NO: 25282435 NR Description: ES cell-related protein; ATP binding protein
VVVIINNSNLKSAIHEKKFFFVTMANPIQEIIEKQVLTVAKAMEDKIDDEIASLEKLDEDDLEVLRERRLKQMKKMAEKKKRWMSIGHGEYSEIHSEKDFFSVVKSSERVVCHFYRENWPCKVMDKHMSILAKQHIETRFVKIQAEKSPFLAERLKIVVLPTLALIKNTKVDDYVVGFNELGGKDDFSTEDLEERIARAQVIHYEGESSLKQKSTTQVRRNVRQSARSDSDSE

SEQ ID NO: 99377 - protein, 210 aa, Arabidopsis thaliana
  peptide (1)..(210): Ceres Seq. ID no. 13602747
  misc_feature (1)..(210): Homolog of NCBI NO: 18404574 NR Description: expressed protein [Arabidopsis thaliana] gene_id:MWL2.25~similar to unknown protein~sp|O64628 [Arabidopsis
  misc_feature (1)..(210): Homolog of NCBI NO: 21594045 NR Description: putative ATP binding protein [Arabidopsis
  misc_feature (1)..(210): Homolog of NCBI NO: 15224267 NR Description: ATP binding protein -related [Arabidopsis >gi|5902677|sp|O64628|14P_ARATH Protein At2g18990
  misc_feature (53)..(210): Homolog of NCBI NO: 26452365 NR Description: unknown protein [Arabidopsis thaliana]
  misc_feature (5)..(210): Homolog of NCBI NO: 40253924 NR Description: putative ATP binding protein associated with cell
  misc_feature (5)..(210): Homolog of NCBI NO: 28277604 NR Description: Similar to ATP binding protein associated with
  misc_feature (7)..(210): Homolog of NCBI NO: 25286717 NR Description: ATP binding protein associated with cell [Mus musculus] >gi|12833213|dbj|BAB22438.1| unnamed protein [Mus musculus] >gi|12839124|dbj|BAB24440.1| unnamed protein
  misc_feature (1)..(210): Homolog of NCBI NO: 32450365 NR Description: Unknown (protein for MGC:64546) [Xenopus laevis]
  misc_feature (1)..(210): Homolog of NCBI NO: 27924448 NR Description: Similar to ATP binding protein associated with
  misc_feature (7)..(210): Homolog of NCBI NO: 25282435 NR Description: ES cell-related protein; ATP binding protein
MANPIQEIIEKQVLTVAKAMEDKIDDEIASLEKLDEDDLEVLRERRLKQMKKMAEKKKRWMSIGHGEYSEIHSEKDFFSVVKSSERVVCHFYRENWPCKVMDKHMSILAKQHIETRFVKIQAEKSPFLAERLKIVVLPTLALIKNTKVDDYVVGFNELGGKDDFSTEDLEERIARAQVIHYEGESSLKQKSTTQVRRNVRQSARSDSDSE

SEQ ID NO: 99378 - protein, 191 aa, Arabidopsis thaliana
  peptide (1)..(191): Ceres Seq. ID no. 13602748
  misc_feature (1)..(191): Homolog of NCBI NO: 18404574 NR Description: expressed protein [Arabidopsis thaliana] gene_id:MWL2.25~similar to unknown protein~sp|O64628 [Arabidopsis
  misc_feature (1)..(191): Homolog of NCBI NO: 21594045 NR Description: putative ATP binding protein [Arabidopsis
  misc_feature (1)..(191): Homolog of NCBI NO: 15224267 NR Description: ATP binding protein -related [Arabidopsis >gi|5902677|sp|O64628|14P_ARATH Protein At2g18990
  misc_feature (34)..(191): Homolog of NCBI NO: 26452365 NR Description: unknown protein [Arabidopsis thaliana]
  misc_feature (1)..(191): Homolog of NCBI NO: 40253924 NR Description: putative ATP binding protein associated with cell
  misc_feature (1)..(191): Homolog of NCBI NO: 28277604 NR Description: Similar to ATP binding protein associated with
  misc_feature (1)..(191): Homolog of NCBI NO: 25286717 NR Description: ATP binding protein associated with cell [Mus musculus] >gi|12833213|dbj|BAB22438.1| unnamed protein [Mus musculus] >gi|12839124|dbj|BAB24440.1| unnamed protein
  misc_feature (1)..(191): Homolog of NCBI NO: 32450365 NR Description: Unknown (protein for MGC:64546) [Xenopus laevis]
  misc_feature (1)..(191): Homolog of NCBI NO: 27924448 NR Description: Similar to ATP binding protein associated with
  misc_feature (1)..(191): Homolog of NCBI NO: 25282435 NR Description: ES cell-related protein; ATP binding protein
MEDKIDDEIASLEKLDEDDLEVLRERRLKQMKKMAEKKKRWMSIGHGEYSEIHSEKDFFSVVKSSERVVCHFYRENWPCKVMDKHMSILAKQHIETRFVKIQAEKSPFLAERLKIVVLPTLALIKNTKVDDYVVGFNELGGKDDFSTEDLEERIARAQVIHYEGESSLKQKSTTQVRRNVRQSARSDSDSE

SEQ ID NO: 99379 - DNA, 949 bp, Arabidopsis thaliana
  misc_feature (1)..(949): Ceres Seq. ID no. 13602761
  misc_feature: MA Experiment ID: 108434 Result: Down-regulated in Transcription
  misc_feature: MA Experiment 108434 PARAMETER Experiment Name: At_Root_Tips_cDNA_P Parameter: Tissue Value: Root Tips
  misc_feature: MA Experiment ID: 108461 Result: Up-regulated in Transcription
  misc_feature: MA Experiment 108461 PARAMETER Experiment Name: At_Germinating_Seeds_cDNA_P Parameter: Age (day) Value: 1 vs. 0
  misc_feature: MA Experiment 108461 PARAMETER Experiment Name: At_Germinating_Seeds_cDNA_P Parameter: Tissue Value: Germinating Seeds
  misc_feature: MA Experiment ID: 108462 Result: Up-regulated in Transcription
  misc_feature: MA Experiment 108462 PARAMETER Experiment Name: At_Germinating_Seeds_cDNA_P Parameter: Age (day) Value: 2 vs. 0
  misc_feature: MA Experiment 108462 PARAMETER Experiment Name: At_Germinating_Seeds_cDNA_P Parameter: Tissue Value: Germinating Seeds
  misc_feature: MA Experiment ID: 108463 Result: Up-regulated in Transcription
  misc_feature: MA Experiment 108463 PARAMETER Experiment Name: At_Germinating_Seeds_cDNA_P Parameter: Age (day) Value: 3 vs. 0
  misc_feature: MA Experiment 108463 PARAMETER Experiment Name: At_Germinating_Seeds_cDNA_P Parameter: Tissue Value: Germinating Seeds
  misc_feature: MA Experiment ID: 108464 Result: Up-regulated in Transcription
  misc_feature: MA Experiment 108464 PARAMETER Experiment Name: At_Germinating_Seeds_cDNA_P Parameter: Age (day) Value: 4 vs. 0
  misc_feature: MA Experiment 108464 PARAMETER Experiment Name: At_Germinating_Seeds_cDNA_P Parameter: Tissue Value: Germinating Seeds
  misc_feature: MA Experiment ID: 108569 Result: Up-regulated in Transcription
  misc_feature: MA Experiment 108569 PARAMETER Experiment Name: At_0.001%_MeJA__cDNA_P Parameter: Timepoint (hr) Value: 6
  misc_feature: MA Experiment 108569 PARAMETER Experiment Name: At_0.001%_MeJA__cDNA_P Parameter: Tissue Value: Aerial
  misc_feature: MA Experiment 108569 PARAMETER Experiment Name: At_0.001%_MeJA__cDNA_P Parameter: Treatment Value: 0.001% MeJA vs. No Treatment
  misc_feature: MA Experiment ID: 108572 Result: Up-regulated in Transcription
  misc_feature: MA Experiment 108572 PARAMETER Experiment Name: At_Drought_cDNA_P Parameter: Timepoint (hr) Value: 1
  misc_feature: MA Experiment 108572 PARAMETER Experiment Name: At_Drought_cDNA_P Parameter: Tissue Value: Aerial
  misc_feature: MA Experiment 108572 PARAMETER Experiment Name: At_Drought_cDNA_P Parameter: Treatment Value: Drought vs. No Drought
  misc_feature: MA Experiment ID: 108573 Result: Up-regulated in Transcription
  misc_feature: MA Experiment 108573 PARAMETER Experiment Name: At_Drought_cDNA_P Parameter: Timepoint (hr) Value: 6
  misc_feature: MA Experiment 108573 PARAMETER Experiment Name: At_Drought_cDNA_P Parameter: Tissue Value: Aerial
  misc_feature: MA Experiment 108573 PARAMETER Experiment Name: At_Drought_cDNA_P Parameter: Treatment Value: Drought vs. No Drought
  misc_feature: MA Experiment ID: 108574 Result: Up-regulated in Transcription
  misc_feature: MA Experiment 108574 PARAMETER Experiment Name: At_Wounding__cDNA_P Parameter: Timepoint (hr) Value: 1
  misc_feature: MA Experiment 108574 PARAMETER Experiment Name: At_Wounding__cDNA_P Parameter: Tissue Value: Aerial
  misc_feature: MA Experiment 108574 PARAMETER Experiment Name: At_Wounding__cDNA_P Parameter: Treatment Value: Wounding vs. No Wounding
  misc_feature: MA Experiment ID: 108585 Result: Up-regulated in Transcription
  misc_feature: MA Experiment 108585 PARAMETER Experiment Name: At_5mM_NaNP_cDNA_P Parameter: Timepoint (hr) Value: 6
  misc_feature: MA Experiment 108585 PARAMETER Experiment Name: At_5mM_NaNP_cDNA_P Parameter: Tissue Value: Aerial
  misc_feature: MA Experiment 108585 PARAMETER Experiment Name: At_5mM_NaNP_cDNA_P Parameter: Treatment Value: null
  misc_feature: MA Experiment ID: 108595 Result: Up-regulated in Transcription
  misc_feature: MA Experiment 108595 PARAMETER Experiment Name: At_Ler-pi_Ovule_cDNA_P Parameter: Plant Line Value: null
  misc_feature: MA Experiment ID: 108667 Result: Up-regulated in Transcription
  misc_feature: MA Experiment 108667 PARAMETER Experiment Name: At_2mM_SA_cDNA_P Parameter: Plant Line Value: WS
  misc_feature: MA Experiment 108667 PARAMETER Experiment Name: At_2mM_SA_cDNA_P Parameter: Timepoint (hr) Value: 1
  misc_feature: MA Experiment 108667 PARAMETER Experiment Name: At_2mM_SA_cDNA_P Parameter: Treatment Value: 2mM SA vs. No Treatment
  misc_feature: MA Experiment ID: 108668 Result: Up-regulated in Transcription
  misc_feature: MA Experiment 108668 PARAMETER Experiment Name: At_2mM_SA_cDNA_P Parameter: Plant Line Value: WS
  misc_feature: MA Experiment 108668 PARAMETER Experiment Name: At_2mM_SA_cDNA_P Parameter: Timepoint (hr) Value: 6
  misc_feature: MA Experiment 108668 PARAMETER Experiment Name: At_2mM_SA_cDNA_P Parameter: Treatment Value: 2mM SA vs. No Treatment
  misc_feature: MA Experiment ID: 20000071 Result: Up-regulated in Transcription
  misc_feature: MA Experiment 20000071 PARAMETER Experiment Name: At_100uM_ABA_Mutants_cDNA_P Parameter: Plant Line Value: CS8104
  misc_feature: MA Experiment 20000071 PARAMETER Experiment Name: At_100uM_ABA_Mutants_cDNA_P Parameter: Timepoint (hr) Value: 6
  misc_feature: MA Experiment 20000071 PARAMETER Experiment Name: At_100uM_ABA_Mutants_cDNA_P Parameter: Tissue Value: Aerial
  misc_feature: MA Experiment 20000071 PARAMETER Experiment Name: At_100uM_ABA_Mutants_cDNA_P Parameter: Treatment Value: 100uM ABA vs. No Treatment
  misc_feature: MA Experiment ID: 20000072 Result: Up-regulated in Transcription
  misc_feature: MA Experiment 20000072 PARAMETER Experiment Name: At_100uM_ABA_Mutants_cDNA_P Parameter: Plant Line Value: CS8105
  misc_feature: MA Experiment 20000072 PARAMETER Experiment Name: At_100uM_ABA_Mutants_cDNA_P Parameter: Timepoint (hr) Value: 6
  misc_feature: MA Experiment 20000072 PARAMETER Experiment Name: At_100uM_ABA_Mutants_cDNA_P Parameter: Tissue Value: Aerial
  misc_feature: MA Experiment 20000072 PARAMETER Experiment Name: At_100uM_ABA_Mutants_cDNA_P Parameter: Treatment Value: 100uM ABA vs. No Treatment
  misc_feature: MA Experiment ID: 20000111 Result: Down-regulated in Transcription
  misc_feature: MA Experiment 20000111 PARAMETER Experiment Name: At_42deg_Heat_cDNA_P Parameter: Temperature (deg C) Value: 42 vs. 22
  misc_feature: MA Experiment 20000111 PARAMETER Experiment Name: At_42deg_Heat_cDNA_P Parameter: Timepoint (hr) Value: 6
  misc_feature: MA Experiment 20000111 PARAMETER Experiment Name: At_42deg_Heat_cDNA_P Parameter: Tissue Value: Aerial
  misc_feature: MA Experiment ID: 20000112 Result: Down-regulated in Transcription
  misc_feature: MA Experiment 20000112 PARAMETER Experiment Name: At_42deg_Heat_cDNA_P Parameter: Temperature (deg C) Value: 42 vs. 22
  misc_feature: MA Experiment 20000112 PARAMETER Experiment Name: At_42deg_Heat_cDNA_P Parameter: Timepoint (hr) Value: 2
  misc_feature: MA Experiment 20000112 PARAMETER Experiment Name: At_42deg_Heat_cDNA_P Parameter: Tissue Value: Aerial
  misc_feature: MA Experiment ID: 20000113 Result: Down-regulated in Transcription
  misc_feature: MA Experiment 20000113 PARAMETER Experiment Name: At_42deg_Heat_cDNA_P Parameter: Temperature (deg C) Value: 42 vs. 22
  misc_feature: MA Experiment 20000113 PARAMETER Experiment Name: At_42deg_Heat_cDNA_P Parameter: Timepoint (hr) Value: 8
  misc_feature: MA Experiment 20000113 PARAMETER Experiment Name: At_42deg_Heat_cDNA_P Parameter: Tissue Value: Aerial
  misc_feature: MA Experiment ID: 20000144 Result: Down-regulated in Transcription
  misc_feature: MA Experiment 20000144 PARAMETER Experiment Name: At_42deg_Heat_cDNA_P Parameter: Temperature (deg C) Value: 42 vs. 22
  misc_feature: MA Experiment 20000144 PARAMETER Experiment Name: At_42deg_Heat_cDNA_P Parameter: Timepoint (hr) Value: 1
  misc_feature: MA Experiment 20000144 PARAMETER Experiment Name: At_42deg_Heat_cDNA_P Parameter: Tissue Value: Aerial
  misc_feature: MA Experiment ID: 20000224 Result: Up-regulated in Transcription
  misc_feature: MA Experiment ID: 20000307 Result: Up-regulated in Transcription
  misc_feature: MA Experiment 20000307 PARAMETER Experiment Name: At_Germinating_Seeds_Sub_P Parameter: Age (hr) Value: 24 vs. 0
  misc_feature: MA Experiment 20000307 PARAMETER Experiment Name: At_Germinating_Seeds_Sub_P Parameter: Organism Value: A. thaliana
  misc_feature: MA Experiment 20000307 PARAMETER Experiment Name: At_Germinating_Seeds_Sub_P Parameter: Plant Line Value: WS
  misc_feature: MA Experiment 20000307 PARAMETER Experiment Name: At_Germinating_Seeds_Sub_P Parameter: Tissue Value: Germinating Seeds
  misc_feature: MA Experiment ID: 20000328 Result: Down-regulated in Transcription
  misc_feature: MA Experiment 20000328 PARAMETER Experiment Name: At_42deg_Heat_Sub_P Parameter: Age (day) Value: 14
  misc_feature: MA Experiment 20000328 PARAMETER Experiment Name: At_42deg_Heat_Sub_P Parameter: Organism Value: A. thaliana
  misc_feature: MA Experiment 20000328 PARAMETER Experiment Name: At_42deg_Heat_Sub_P Parameter: Plant Line Value: WS
  misc_feature: MA Experiment 20000328 PARAMETER Experiment Name: At_42deg_Heat_Sub_P Parameter: Temperature (deg C) Value: 42 vs. 22
  misc_feature: MA Experiment 20000328 PARAMETER Experiment Name: At_42deg_Heat_Sub_P Parameter: Timepoint (hr) Value: 6
  misc_feature: MA Experiment 20000328 PARAMETER Experiment Name: At_42deg_Heat_Sub_P Parameter: Tissue Value: Aerial
  misc_feature: MA Experiment ID: 20000346 Result: Up-regulated in Transcription
  misc_feature: MA Experiment 20000346 PARAMETER Experiment Name: At_2mM_SA_Sub_P Parameter: Age (day) Value: 14
  misc_feature: MA Experiment 20000346 PARAMETER Experiment Name: At_2mM_SA_Sub_P Parameter: Organism Value: A. thaliana
  misc_feature: MA Experiment 20000346 PARAMETER Experiment Name: At_2mM_SA_Sub_P Parameter: Plant Line Value: WS
  misc_feature: MA Experiment 20000346 PARAMETER Experiment Name: At_2mM_SA_Sub_P Parameter: Timepoint (hr) Value: 1
  misc_feature: MA Experiment 20000346 PARAMETER Experiment Name: At_2mM_SA_Sub_P Parameter: Tissue Value: Aerial
  misc_feature: MA Experiment 20000346 PARAMETER Experiment Name: At_2mM_SA_Sub_P Parameter: Treatment Value: 2mM SA vs. No Treatment
  misc_feature: MA Experiment ID: 20000347 Result: Up-regulated in Transcription
  misc_feature: MA Experiment 20000347 PARAMETER Experiment Name: At_2mM_SA_Sub_P Parameter: Age (day) Value: 14
  misc_feature: MA Experiment 20000347 PARAMETER Experiment Name: At_2mM_SA_Sub_P Parameter: Organism Value: A. thaliana
  misc_feature: MA Experiment 20000347 PARAMETER Experiment Name: At_2mM_SA_Sub_P Parameter: Plant Line Value: WS
  misc_feature: MA Experiment 20000347 PARAMETER Experiment Name: At_2mM_SA_Sub_P Parameter: Timepoint (hr) Value: 6
  misc_feature: MA Experiment 20000347 PARAMETER Experiment Name: At_2mM_SA_Sub_P Parameter: Tissue Value: Aerial
  misc_feature: MA Experiment 20000347 PARAMETER Experiment Name: At_2mM_SA_Sub_P Parameter: Treatment Value: 2mM SA vs. No Treatment
  misc_feature: MA Experiment ID: 20000348 Result: Up-regulated in Transcription
  misc_feature: MA Experiment 20000348 PARAMETER Experiment Name: At_100uM_ABA_Sub_P Parameter: Age (day) Value: 14
  misc_feature: MA Experiment 20000348 PARAMETER Experiment Name: At_100uM_ABA_Sub_P Parameter: Organism Value: A. thaliana
  misc_feature: MA Experiment 20000348 PARAMETER Experiment Name: At_100uM_ABA_Sub_P Parameter: Plant Line Value: WS
  misc_feature: MA Experiment 20000348 PARAMETER Experiment Name: At_100uM_ABA_Sub_P Parameter: Timepoint (hr) Value: 1
  misc_feature: MA Experiment 20000348 PARAMETER Experiment Name: At_100uM_ABA_Sub_P Parameter: Tissue Value: Aerial
  misc_feature: MA Experiment 20000348 PARAMETER Experiment Name: At_100uM_ABA_Sub_P Parameter: Treatment Value: 100uM ABA vs. No Treatment
  misc_feature: MA Experiment ID: 20000355 Result: Down-regulated in Transcription
  misc_feature: MA Experiment 20000355 PARAMETER Experiment Name: At_Siliques_Sub_P Parameter: Age (day) Value: 21
  misc_feature: MA Experiment 20000355 PARAMETER Experiment Name: At_Siliques_Sub_P Parameter: Organism Value: A. thaliana
  misc_feature: MA Experiment 20000355 PARAMETER Experiment Name: At_Siliques_Sub_P Parameter: Plant Line Value: WS
  misc_feature: MA Experiment 20000355 PARAMETER Experiment Name: At_Siliques_Sub_P Parameter: Tissue Value: Less Than 5mm Siliques vs. Whole Plant
  misc_feature: MA Experiment ID: 20000440 Result: Down-regulated in Transcription
  misc_feature: MA Experiment 20000440 PARAMETER Experiment Name: At_Closed-Flower__Sub_P Parameter: Tissue Value: Closed Flower vs. Whole Plant
  misc_feature: MA Experiment ID: 20000634 Result: Up-regulated in Transcription
  misc_feature: MA Experiment 20000634 PARAMETER Experiment Name: At_10percent_PEG_Sub_P Parameter: Age (day) Value: 12
  misc_feature: MA Experiment 20000634 PARAMETER Experiment Name: At_10percent_PEG_Sub_P Parameter: Organism Value: A. thaliana
  misc_feature: MA Experiment 20000634 PARAMETER Experiment Name: At_10percent_PEG_Sub_P Parameter: Plant Line Value: WS
  misc_feature: MA Experiment 20000634 PARAMETER Experiment Name: At_10percent_PEG_Sub_P Parameter: Timepoint (day) Value: 12
  misc_feature: MA Experiment 20000634 PARAMETER Experiment Name: At_10percent_PEG_Sub_P Parameter: Tissue Value: Whole Plant
  misc_feature: MA Experiment 20000634 PARAMETER Experiment Name: At_10percent_PEG_Sub_P Parameter: Treatment Value: 10% PEG vs. No Treatment
attaaaaccaaagatcaatctcttcttaatagtcaatcatatatcaaaaaatttaaactcttcttgatcaatggcttcttcttctgctgctatgtctcttgaatccatctctatgacaactctcaacaatctctctcgtaatcatcaatctcaccgcagttctcttcttggtttctcaagatctttccaaaaccttggaatctcatctaacggtccagatttctcctcccgatcaagatctactacttccaagaacctcaacgttactcgagctttcttctggaattggggcaagaagaccgaaaactccagaccaagtaagatccaagaactaaacgtgtatgagctcaacgaaggagatagaaacagtccagcagttcttaaactcggcaagaaaccaacagagctttgtctcggagatctcgtcccattcacaaacaaactctacaccggcgatctcaagaaacgcgtgggaatcacggcaggtctctgcgttttgatccaacacgttcctgaaaagagcggtgacagattcgaagctagttacagcttctactttggtgactatggtcacttgtctgtacaaggacaatacttgacttatgaagacacgttcctcgctgtcactggtggctctggaatctttgaaggtgcgtacggacaggttaagcttcgtcagcttgtgtatccgacaaaactgttctacactttttaccttaaagggttagctaatgatttaccgctggagcttactggaacggcggttacgccgtcgaaggatgtgaaaccggcaccggaagctaaggcgatggagcctagtggagttataagtaactttactaattaagtaattagctgtttaatagttgttttgttttgtaatagaatattttgatgagttgtgtgaggttagttaatgatgtgttgagggaataaagtatttattttg

SEQ ID NO: 99380 - protein, 258 aa, Arabidopsis thaliana; identical to SEQ ID NO: 26683
  peptide (1)..(258): Ceres Seq. ID no. 13602762
  misc_feature (78)..(258): Pfam Name: Allene oxide cyclase Pfam Description: Allene oxide cyclase
  misc_feature (1)..(258): Homolog of NCBI NO: 18404658 NR Description: allene oxide cyclase family [Arabidopsis >gi|7939564|dbj|BAA95765.1| gene_id:K13N2.12~pir||S57813~similar unknown protein [Arabidopsis thaliana]
  misc_feature (1)..(258): Homolog of NCBI NO: 15222241 NR Description: allene oxide cyclase family [Arabidopsis >gi|16323065|gb|AAL15267.1| At1g13280/T6J4_23 [Arabidopsis >gi|22655330|gb|AAM98257.1| At1g13280/T6J4_23 [Arabidopsis
  misc_feature (4)..(258): Homolog of NCBI NO: 18404656 NR Description: allene oxide cyclase family [Arabidopsis >gi|7939563|dbj|BAA95764.1| gene_id:K13N2.11~pir||S57813~similar unknown protein [Arabidopsis thaliana]
  misc_feature (1)..(258): Homolog of NCBI NO: 15230874 NR Description: allene oxide cyclase family [Arabidopsis >gi|7939562|dbj|BAA95763.1| gene_id:K13N2.10~pir||S57813~similar
  misc_feature (5)..(258): Homolog of NCBI NO: 15320414 NR Description: ERD12 protein [Arabidopsis thaliana]
  misc_feature (82)..(258): Homolog of NCBI NO: 25518012 NR Description: T6J4.4 protein - Arabidopsis thaliana
  misc_feature (1)..(258): Homolog of NCBI NO: 40644132 NR Description: allene oxide cyclase [Medicago truncatula]
  misc_feature (52)..(258): Homolog of NCBI NO: 21727906 NR Description: allene oxide cyclase [Oryza sativa (japonica
  misc_feature (1)..(258): Homolog of NCBI NO: 16416376 NR Description: mangrin [Bruguiera sexangula]
  misc_feature (1)..(258): Homolog of NCBI NO: 40644130 NR Description: allene oxide cyclase [Nicotiana tabacum]

SEQ ID NO: 99381 - protein, 251 aa, Arabidopsis thaliana; identical to SEQ ID NO: 26684
  peptide (1)..(251): Ceres Seq. ID no. 13602763
  misc_feature (71)..(251): Pfam Name: Allene oxide cyclase Pfam Description: Allene oxide cyclase
  misc_feature (1)..(251): Homolog of NCBI NO: 18404658 NR Description: allene oxide cyclase family [Arabidopsis >gi|7939564|dbj|BAA95765.1| gene_id:K13N2.12~pir||S57813~similar unknown protein [Arabidopsis thaliana]
  misc_feature (1)..(251): Homolog of NCBI NO: 15222241 NR Description: allene oxide cyclase family [Arabidopsis >gi|16323065|gb|AAL15267.1| At1g13280/T6J4_23 [Arabidopsis >gi|22655330|gb|AAM98257.1| At1g13280/T6J4_23 [Arabidopsis
  misc_feature (1)..(251): Homolog of NCBI NO: 18404656 NR Description: allene oxide cyclase family [Arabidopsis >gi|7939563|dbj|BAA95764.1| gene_id:K13N2.11~pir||S57813~similar unknown protein [Arabidopsis thaliana]
  misc_feature (1)..(251): Homolog of NCBI NO: 15230874 NR Description: allene oxide cyclase family [Arabidopsis >gi|7939562|dbj|BAA95763.1| gene_id:K13N2.10~pir||S57813~similar
  misc_feature (1)..(251): Homolog of NCBI NO: 15320414 NR Description: ERD12 protein [Arabidopsis thaliana]
  misc_feature (75)..(251): Homolog of NCBI NO: 25518012 NR Description: T6J4.4 protein - Arabidopsis thaliana
  misc_feature (1)..(251): Homolog of NCBI NO: 40644132 NR Description: allene oxide cyclase [Medicago truncatula]
  misc_feature (45)..(251): Homolog of NCBI NO: 21727906 NR Description: allene oxide cyclase [Oryza sativa (japonica
  misc_feature (1)..(251): Homolog of NCBI NO: 16416376 NR Description: mangrin [Bruguiera sexangula]
  misc_feature (1)..(251): Homolog of NCBI NO: 40644130 NR Description: allene oxide cyclase [Nicotiana tabacum]

SEQ ID NO: 99382 - protein, 244 aa, Arabidopsis thaliana; identical to SEQ ID NO: 26685
  peptide (1)..(244): Ceres Seq. ID no. 13602764
  misc_feature (64)..(244): Pfam Name: Allene oxide cyclase Pfam Description: Allene oxide cyclase
  misc_feature (1)..(244): Homolog of NCBI NO: 18404658 NR Description: allene oxide cyclase family [Arabidopsis >gi|7939564|dbj|BAA95765.1| gene_id:K13N2.12~pir||S57813~similar unknown protein [Arabidopsis thaliana]
  misc_feature (1)..(244): Homolog of NCBI NO: 15222241 NR Description: allene oxide cyclase family [Arabidopsis >gi|16323065|gb|AAL15267.1| At1g13280/T6J4_23 [Arabidopsis >gi|22655330|gb|AAM98257.1| At1g13280/T6J4_23 [Arabidopsis
  misc_feature (1)..(244): Homolog of NCBI NO: 18404656 NR Description: allene oxide cyclase family [Arabidopsis >gi|7939563|dbj|BAA95764.1| gene_id:K13N2.11~pir||S57813~similar unknown protein [Arabidopsis thaliana]
  misc_feature (1)..(244): Homolog of NCBI NO: 15230874 NR Description: allene oxide cyclase family [Arabidopsis >gi|7939562|dbj|BAA95763.1| gene_id:K13N2.10~pir||S57813~similar
  misc_feature (1)..(244): Homolog of NCBI NO: 15320414 NR Description: ERD12 protein [Arabidopsis thaliana]
  misc_feature (68)..(244): Homolog of NCBI NO: 25518012 NR Description: T6J4.4 protein - Arabidopsis thaliana
  misc_feature (1)..(244): Homolog of NCBI NO: 40644132 NR Description: allene oxide cyclase [Medicago truncatula]
  misc_feature (38)..(244): Homolog of NCBI NO: 21727906 NR Description: allene oxide cyclase [Oryza sativa (japonica
  misc_feature (1)..(244): Homolog of NCBI NO: 16416376 NR Description: mangrin [Bruguiera sexangula]
  misc_feature (1)..(244): Homolog of NCBI NO: 40644130 NR Description: allene oxide cyclase [Nicotiana tabacum]

SEQ ID NO: 99383 - DNA, 1302 bp, Arabidopsis thaliana
  misc_feature (1)..(1302): Ceres Seq. ID no. 13602772
  misc_feature: MA Experiment ID: 20000171 Result: Down-regulated in Transcription
  misc_feature: MA Experiment 20000171 PARAMETER Experiment Name: At_42deg_Heat_P Parameter: Age (day) Value: 14
  misc_feature: MA Experiment 20000171 PARAMETER Experiment Name: At_42deg_Heat_P Parameter: Organism Value: A. thaliana
  misc_feature: MA Experiment 20000171 PARAMETER Experiment Name: At_42deg_Heat_P Parameter: Plant Line Value: WS
  misc_feature: MA Experiment 20000171 PARAMETER Experiment Name: At_42deg_Heat_P Parameter: Temperature (deg C) Value: 42 vs. 22
  misc_feature: MA Experiment 20000171 PARAMETER Experiment Name: At_42deg_Heat_P Parameter: Timepoint (hr) Value: 1
  misc_feature: MA Experiment 20000171 PARAMETER Experiment Name: At_42deg_Heat_P Parameter: Tissue Value: Aerial
  misc_feature: MA Experiment ID: 20000173 Result: Down-regulated in Transcription
  misc_feature: MA Experiment 20000173 PARAMETER Experiment Name: At_42deg_Heat_P Parameter: Age (day) Value: 14
  misc_feature: MA Experiment 20000173 PARAMETER Experiment Name: At_42deg_Heat_P Parameter: Organism Value: A. thaliana
  misc_feature: MA Experiment 20000173 PARAMETER Experiment Name: At_42deg_Heat_P Parameter: Plant Line Value: WS
  misc_feature: MA Experiment 20000173 PARAMETER Experiment Name: At_42deg_Heat_P Parameter: Temperature (deg C) Value: 42 vs. 22
  misc_feature: MA Experiment 20000173 PARAMETER Experiment Name: At_42deg_Heat_P Parameter: Timepoint (hr) Value: 6
  misc_feature: MA Experiment 20000173 PARAMETER Experiment Name: At_42deg_Heat_P Parameter: Tissue Value: Aerial
  misc_feature: MA Experiment ID: 20000185 Result: Up-regulated in Transcription
  misc_feature: MA Experiment 20000185 PARAMETER Experiment Name: At_Roots__P Parameter: Age (day) Value: 7 vs. 21
  misc_feature: MA Experiment 20000185 PARAMETER Experiment Name: At_Roots__P Parameter: Organism Value: A. thaliana
  misc_feature: MA Experiment 20000185 PARAMETER Experiment Name: At_Roots__P Parameter: Tissue Value: Roots vs. Whole Plant
  misc_feature: MA Experiment ID: 20000227 Result: Up-regulated in Transcription
  misc_feature: MA Experiment 20000227 PARAMETER Experiment Name: At_Root-Tips-vs-Tops_P Parameter: Tissue Value: Root Tips vs. Root Tops
  misc_feature: MA Experiment ID: 20000234 Result: Up-regulated in Transcription
  misc_feature: MA Experiment 20000234 PARAMETER Experiment Name: At_Siliques_P Parameter: Age (day) Value: 21
  misc_feature: MA Experiment 20000234 PARAMETER Experiment Name: At_Siliques_P Parameter: Organism Value: A. thaliana
  misc_feature: MA Experiment 20000234 PARAMETER Experiment Name: At_Siliques_P Parameter: Plant Line Value: WS
  misc_feature: MA Experiment 20000234 PARAMETER Experiment Name: At_Siliques_P Parameter: Tissue Value: Less Than 5mm Siliques vs. Whole Plant
  misc_feature: MA Experiment ID: 20000235 Result: Up-regulated in Transcription
  misc_feature: MA Experiment 20000235 PARAMETER Experiment Name: At_Siliques_P Parameter: Age (day) Value: 21
  misc_feature: MA Experiment 20000235 PARAMETER Experiment Name: At_Siliques_P Parameter: Organism Value: A. thaliana
  misc_feature: MA Experiment 20000235 PARAMETER Experiment Name: At_Siliques_P Parameter: Plant Line Value: WS
  misc_feature: MA Experiment 20000235 PARAMETER Experiment Name: At_Siliques_P Parameter: Tissue Value: 5-10mm Siliques vs. Whole Plant
  misc_feature: MA Experiment ID: 20000437 Result: Down-regulated in Transcription
  misc_feature: MA Experiment 20000437 PARAMETER Experiment Name: At_Drought_P Parameter: Age (day) Value: 8
  misc_feature: MA Experiment 20000437 PARAMETER Experiment Name: At_Drought_P Parameter: Organism Value: A. thaliana
  misc_feature: MA Experiment 20000437 PARAMETER Experiment Name: At_Drought_P Parameter: Plant Line Value: WS
  misc_feature: MA Experiment 20000437 PARAMETER Experiment Name: At_Drought_P Parameter: Timepoint (hr) Value: 24
  misc_feature: MA Experiment 20000437 PARAMETER Experiment Name: At_Drought_P Parameter: Tissue Value: Whole Plant
  misc_feature: MA Experiment 20000437 PARAMETER Experiment Name: At_Drought_P Parameter: Treatment Value: Drought vs. No Drought
  misc_feature: MA Experiment ID: 20000439 Result: Up-regulated in Transcription
  misc_feature: MA Experiment 20000439 PARAMETER Experiment Name: At_Roots__P Parameter: Age (day) Value: 14 vs. 21
  misc_feature: MA Experiment 20000439 PARAMETER Experiment Name: At_Roots__P Parameter: Organism Value: A. thaliana
  misc_feature: MA Experiment 20000439 PARAMETER Experiment Name: At_Roots__P Parameter: Tissue Value: Roots vs. Whole Plant
  misc_feature: MA Experiment ID: 20000445 Result: Up-regulated in Transcription
  misc_feature: MA Experiment 20000445 PARAMETER Experiment Name: At_100uM_NAA__P Parameter: Age (day) Value: 14
  misc_feature: MA Experiment 20000445 PARAMETER Experiment Name: At_100uM_NAA__P Parameter: Organism Value: A. thaliana
  misc_feature: MA Experiment 20000445 PARAMETER Experiment Name: At_100uM_NAA__P Parameter: Plant Line Value: WS
  misc_feature: MA Experiment 20000445 PARAMETER Experiment Name: At_100uM_NAA__P Parameter: Timepoint (hr) Value: 6
  misc_feature: MA Experiment 20000445 PARAMETER Experiment Name: At_100uM_NAA__P Parameter: Tissue Value: Aerial
  misc_feature: MA Experiment 20000445 PARAMETER Experiment Name: At_100uM_NAA__P Parameter: Treatment Value: 100uM NAA vs. No Treatment
  misc_feature: MA Experiment ID: 20000573 Result: Down-regulated in Transcription
  misc_feature: MA Experiment 20000573 PARAMETER Experiment Name: At_100uM_ABA_Mutants__P Parameter: Organism Value: A. thaliana
  misc_feature: MA Experiment 20000573 PARAMETER Experiment Name: At_100uM_ABA_Mutants__P Parameter: Plant Line Value: CS22 vs. Ler wt
  misc_feature: MA Experiment 20000573 PARAMETER Experiment Name: At_100uM_ABA_Mutants__P Parameter: Timepoint (hr) Value: N/A
  misc_feature: MA Experiment 20000573 PARAMETER Experiment Name: At_100uM_ABA_Mutants__P Parameter: Tissue Value: Whole Plant
  misc_feature: MA Experiment 20000573 PARAMETER Experiment Name: At_100uM_ABA_Mutants__P Parameter: Treatment Value: None
  misc_feature: MA Experiment ID: 20001248 Result: Up-regulated in Transcription
  misc_feature: MA Experiment 20001248 PARAMETER Experiment Name: At_Far-red-induction_P Parameter: Age (day) Value: 7
  misc_feature: MA Experiment 20001248 PARAMETER Experiment Name: At_Far-red-induction_P Parameter: Light Value: Far-red vs. White
  misc_feature: MA Experiment 20001248 PARAMETER Experiment Name: At_Far-red-induction_P Parameter: Organism Value: A. thaliana
  misc_feature: MA Experiment 20001248 PARAMETER Experiment Name: At_Far-red-induction_P Parameter: Plant Line Value: Columbia
  misc_feature: MA Experiment 20001248 PARAMETER Experiment Name: At_Far-red-induction_P Parameter: Timepoint (hr) Value: 4
  misc_feature: MA Experiment 20001248 PARAMETER Experiment Name: At_Far-red-induction_P Parameter: Tissue Value: Whole Plant
  misc_feature: MA Experiment ID: 20001450 Result: Up-regulated in Transcription
  misc_feature: MA Experiment 20001450 PARAMETER Experiment Name: At_Far-red-induction_P Parameter: Age (day) Value: 7
  misc_feature: MA Experiment 20001450 PARAMETER Experiment Name: At_Far-red-induction_P Parameter: Light Value: Far-red vs. White
  misc_feature: MA Experiment 20001450 PARAMETER Experiment Name: At_Far-red-induction_P Parameter: Organism Value: A. thaliana
  misc_feature: MA Experiment 20001450 PARAMETER Experiment Name: At_Far-red-induction_P Parameter: Plant Line Value: Columbia
  misc_feature: MA Experiment 20001450 PARAMETER Experiment Name: At_Far-red-induction_P Parameter: Timepoint (hr) Value: 8
  misc_feature: MA Experiment 20001450 PARAMETER Experiment Name: At_Far-red-induction_P Parameter: Tissue Value: Whole Plant
  misc_feature: MA Experiment ID: 20001556 Result: Down-regulated in Transcription
  misc_feature: MA Experiment 20001556 PARAMETER Experiment Name: At_Drought_Soil_Dry_P Parameter: Age (day) Value: 26
  misc_feature: MA Experiment 20001556 PARAMETER Experiment Name: At_Drought_Soil_Dry_P Parameter: Organism Value: A. thaliana
  misc_feature: MA Experiment 20001556 PARAMETER Experiment Name: At_Drought_Soil_Dry_P Parameter: Plant Line Value: WS
  misc_feature: MA Experiment 20001556 PARAMETER Experiment Name: At_Drought_Soil_Dry_P Parameter: Post Timepoint (hr) Value: None
  misc_feature: MA Experiment 20001556 PARAMETER Experiment Name: At_Drought_Soil_Dry_P Parameter: Post-Treatment Value: None
  misc_feature: MA Experiment 20001556 PARAMETER Experiment Name: At_Drought_Soil_Dry_P Parameter: Timepoint (day) Value: 12
  misc_feature: MA Experiment 20001556 PARAMETER Experiment Name: At_Drought_Soil_Dry_P Parameter: Treatment Value: Drought vs. No Drought
  misc_feature: MA Experiment ID: 20001557 Result: Up-regulated in Transcription
  misc_feature: MA Experiment 20001557 PARAMETER Experiment Name: At_Drought_Soil_Dry_P Parameter: Age (day) Value: 27
  misc_feature: MA Experiment 20001557 PARAMETER Experiment Name: At_Drought_Soil_Dry_P Parameter: Organism Value: A. thaliana
  misc_feature: MA Experiment 20001557 PARAMETER Experiment Name: At_Drought_Soil_Dry_P Parameter: Plant Line Value: WS
  misc_feature: MA Experiment 20001557 PARAMETER Experiment Name: At_Drought_Soil_Dry_P Parameter: Post Timepoint (hr) Value: 3
  misc_feature: MA Experiment 20001557 PARAMETER Experiment Name: At_Drought_Soil_Dry_P Parameter: Post-Treatment Value: Re-Water vs. No Drought
  misc_feature: MA Experiment 20001557 PARAMETER Experiment Name: At_Drought_Soil_Dry_P Parameter: Timepoint (day) Value: 13
  misc_feature: MA Experiment 20001557 PARAMETER Experiment Name: At_Drought_Soil_Dry_P Parameter: Treatment Value: Drought vs. No Drought
  misc_feature: MA Experiment ID: 20001560 Result: Up-regulated in Transcription
  misc_feature: MA Experiment 20001560 PARAMETER Experiment Name: At_Drought_Soil_Dry_P Parameter: Age (day) Value: 28
  misc_feature: MA Experiment 20001560 PARAMETER Experiment Name: At_Drought_Soil_Dry_P Parameter: Organism Value: A. thaliana
  misc_feature: MA Experiment 20001560 PARAMETER Experiment Name: At_Drought_Soil_Dry_P Parameter: Plant Line Value: WS
  misc_feature: MA Experiment 20001560 PARAMETER Experiment Name: At_Drought_Soil_Dry_P Parameter: Post Timepoint (hr) Value: None
  misc_feature: MA Experiment 20001560 PARAMETER Experiment Name: At_Drought_Soil_Dry_P Parameter: Post-Treatment Value: None
  misc_feature: MA Experiment 20001560 PARAMETER Experiment Name: At_Drought_Soil_Dry_P Parameter: Timepoint (day) Value: 14
  misc_feature: MA Experiment 20001560 PARAMETER Experiment Name: At_Drought_Soil_Dry_P Parameter: Treatment Value: Drought vs. No Drought
gttgtatttttgatagggaagaaaaaaaaacacaaaagcggcgttgatttttttagattttccgacaagatttctcgtgagaagatttgtctgaatctttctttcgaagaggttttgagttaatttcaaaatggttttggagaaaaaatctgcattgttggaagatttgataaagaaatgcggcggttgtgcggtggtcgacggtggtttcgctacccagcttgagattcacggcgccgccattaacgaccctttgtggagtgctgtttctctcatcaaaaatcctgagctcatcaaaagggttcacatggaatatttggaagctggtgcagacattgtggttacttcatcttatcaggctacgatcccggggtttctttctagaggtttatcaatagaagagagcgagtctttgcttcaaaagagtgtagaattagctgttgaagctcgtgatagattctgggagaaagtgagcaaggtttcaggacatagctataacagagctcttgtagctgcatctattggaagctatggtgcttatcttgctgatggctctgagtacagtggtcactatggtgagaatgtaagtttggataaactaaaggactttcacaggagaagacttcaagtcttagtggaagctggtcctgatcttcttgcttttgaaaccataccgaataaactcgaagctcaggcttgcgttgagcttttggaggaagagaaagtgcaaatcccagcatggatctgcttcacatctgtagatggtgagaaagctccatcaggagagagctttgaggaatgtcttgaacctcttaacaaaagcaacaatatttacgcagttggtattaactgcgcacctcctcaattcatcgaaaatctgattcgcaaattcgccaagctgacgaagaaagcaatcgttgtttacccgaatagcggagaggtttgggatggaaaagctaaacaatggctgccatcacaatgctttggtgatgatgaatttgagatgtttgcaacgaaatggcgtgaccttggagctaaactcatcggaggatgttgcaggactacaccttccaccattaacgctatctccagagatttgaaacgaagatgatttttcttcagggagaaaagactgaagattctttttcaactttttaactagcttgaccattgttagggctatctatctgttttctgttgttttcttgttgttcacgttttctttgtggtttgatgatatgtattcgtaaactaggccttgggcgttttcaatgtaatggcccataaaatattttctttatc

SEQ ID NO: 99384 - protein, 326 aa, Arabidopsis thaliana; identical to SEQ ID NO: 27663
  peptide (1)..(326): Ceres Seq. ID no. 13602773
  misc_feature (20)..(325): Pfam Name: Homocysteine S-methyltransferase Pfam Description: Homocysteine S-methyltransferase
  misc_feature (1)..(326): Homolog of NCBI NO: 15230929 NR Description: homocysteine S-methyltransferase AtHMT-1
  misc_feature (10)..(324): Homolog of NCBI NO: 22748320 NR Description: Putative homocysteine S-methyltransferase-1
  misc_feature (9)..(326): Homolog of NCBI NO: 10732785 NR Description: homocysteine S-methyltransferase-1 [Zea mays]
  misc_feature (2)..(323): Homolog of NCBI NO: 18403505 NR Description: selenocysteine methyltransferase -related thaliana] >gi|9279692|dbj|BAB01249.1| cysteine methyltransferase
  misc_feature (2)..(323): Homolog of NCBI NO: 21593147 NR Description: putative selenocysteine methyltransferase
  misc_feature (10)..(326): Homolog of NCBI NO: 15229396 NR Description: homocysteine S-methyltransferase AtHMT-2
  misc_feature (10)..(326): Homolog of NCBI NO: 25453566 NR Description: homocysteine S-methyltransferase (EC 2.1.1.10)
  misc_feature (14)..(325): Homolog of NCBI NO: 10732787 NR Description: homocysteine S-methyltransferase-2 [Zea mays]
  misc_feature (14)..(325): Homolog of NCBI NO: 10732789 NR Description: homocysteine S-methyltransferase-3 [Zea mays]
  misc_feature (10)..(324): Homolog of NCBI NO: 10732791 NR Description: homocysteine S-methyltransferase-4 [Zea mays]

SEQ ID NO: 99385 - protein, 267 aa, Arabidopsis thaliana; identical to SEQ ID NO: 27664
  peptide (1)..(267): Ceres Seq. ID no. 13602774
  misc_feature (1)..(266): Pfam Name: Homocysteine S-methyltransferase Pfam Description: Homocysteine S-methyltransferase
  misc_feature (1)..(267): Homolog of NCBI NO: 15230929 NR Description: homocysteine S-methyltransferase AtHMT-1
  misc_feature (1)..(265): Homolog of NCBI NO: 22748320 NR Description: Putative homocysteine S-methyltransferase-1
  misc_feature (1)..(267): Homolog of NCBI NO: 10732785 NR Description: homocysteine S-methyltransferase-1 [Zea mays]
  misc_feature (1)..(264): Homolog of NCBI NO: 18403505 NR Description: selenocysteine methyltransferase -related thaliana] >gi|9279692|dbj|BAB01249.1| cysteine methyltransferase
  misc_feature (1)..(264): Homolog of NCBI NO: 21593147 NR Description: putative selenocysteine methyltransferase
  misc_feature (1)..(267): Homolog of NCBI NO: 15229396 NR Description: homocysteine S-methyltransferase AtHMT-2
  misc_feature (1)..(267): Homolog of NCBI NO: 25453566 NR Description: homocysteine S-methyltransferase (EC 2.1.1.10)
  misc_feature (1)..(266): Homolog of NCBI NO: 10732787 NR Description: homocysteine S-methyltransferase-2 [Zea mays]
  misc_feature (1)..(266): Homolog of NCBI NO: 10732789 NR Description: homocysteine S-methyltransferase-3 [Zea mays]
  misc_feature (1)..(265): Homolog of NCBI NO: 10732791 NR Description: homocysteine S-methyltransferase-4 [Zea mays]

SEQ ID NO: 99386 - DNA, 1615 bp, Arabidopsis thaliana
  misc_feature (1)..(1615): Ceres Seq. ID no. 13602786
  misc_feature: MA Experiment ID: 108434 Result: Up-regulated in Transcription
  misc_feature: MA Experiment 108434 PARAMETER Experiment Name: At_Root_Tips_cDNA_P Parameter: Tissue Value: Root Tips
  misc_feature: MA Experiment ID: 20000112 Result: Down-regulated in Transcription
  misc_feature: MA Experiment 20000112 PARAMETER Experiment Name: At_42deg_Heat_cDNA_P Parameter: Temperature (deg C) Value: 42 vs. 22
  misc_feature: MA Experiment 20000112 PARAMETER Experiment Name: At_42deg_Heat_cDNA_P Parameter: Timepoint (hr) Value: 2
  misc_feature: MA Experiment 20000112 PARAMETER Experiment Name: At_42deg_Heat_cDNA_P Parameter: Tissue Value: Aerial
  misc_feature: MA Experiment ID: 20000113 Result: Down-regulated in Transcription
  misc_feature: MA Experiment 20000113 PARAMETER Experiment Name: At_42deg_Heat_cDNA_P Parameter: Temperature (deg C) Value: 42 vs. 22
  misc_feature: MA Experiment 20000113 PARAMETER Experiment Name: At_42deg_Heat_cDNA_P Parameter: Timepoint (hr) Value: 8
  misc_feature: MA Experiment 20000113 PARAMETER Experiment Name: At_42deg_Heat_cDNA_P Parameter: Tissue Value: Aerial
  misc_feature: MA Experiment ID: 20000184 Result: Up-regulated in Transcription
  misc_feature: MA Experiment 20000184 PARAMETER Experiment Name: At_Shoots__P Parameter: Age (day) Value: 7
  misc_feature: MA Experiment 20000184 PARAMETER Experiment Name: At_Shoots__P Parameter: Tissue Value: Shoots vs. Whole Plant
  misc_feature: MA Experiment ID: 20001451 Result: Down-regulated in Transcription
  misc_feature: MA Experiment 20001451 PARAMETER Experiment Name: At_Far-red-induction_P Parameter: Age (day) Value: 7
  misc_feature: MA Experiment 20001451 PARAMETER Experiment Name: At_Far-red-induction_P Parameter: Light Value: Far-red vs. White
  misc_feature: MA Experiment 20001451 PARAMETER Experiment Name: At_Far-red-induction_P Parameter: Organism Value: A. thaliana
  misc_feature: MA Experiment 20001451 PARAMETER Experiment Name: At_Far-red-induction_P Parameter: Plant Line Value: Columbia
  misc_feature: MA Experiment 20001451 PARAMETER Experiment Name: At_Far-red-induction_P Parameter: Timepoint (hr) Value: 24
  misc_feature: MA Experiment 20001451 PARAMETER Experiment Name: At_Far-red-induction_P Parameter: Tissue Value: Whole Plant
  misc_feature: MA Experiment ID: 20001911 Result: Down-regulated in Transcription
  misc_feature: MA Experiment 20001911 PARAMETER Experiment Name: At_Drought_Reproduction_P Parameter: Age (day) Value: 40
  misc_feature: MA Experiment 20001911 PARAMETER Experiment Name: At_Drought_Reproduction_P Parameter: Organism Value: A. thaliana
  misc_feature: MA Experiment 20001911 PARAMETER Experiment Name: At_Drought_Reproduction_P Parameter: Plant Line Value: WS
  misc_feature: MA Experiment 20001911 PARAMETER Experiment Name: At_Drought_Reproduction_P Parameter: Timepoint (day) Value: 10
  misc_feature: MA Experiment 20001911 PARAMETER Experiment Name: At_Drought_Reproduction_P Parameter: Tissue Value: Flowers
  misc_feature: MA Experiment 20001911 PARAMETER Experiment Name: At_Drought_Reproduction_P Parameter: Treatment Value: Drought vs. No Drought
agaattgcttctcttagtatttgctttcaccaacccactcgacggagtctccaacgccttcctcctcattctccactctcacaccaccaacttctgattccagatctcaacgatgcaaagctccgccgtattctccctctctccgtcgcttcctctcctaaaaccacgtcggctctctctccgccaccatcccataaccaccgccgcttcttcaagcgatctaaacgtttctccaaatgttgtctctattccttctttatctcgtcgatcttggcgtctcgcttcgtctgattcgcctctccgtgcttggtccggtgttccttctccgatctctcactccttagacacgaatcgtttcagaaccgccgctactgcagttcctgaaagtgctgaggaaggtgataacagtggtaaattgacgaaggttttggaacttggcttgttgttcgctatgtggtaccttttcaatatctacttcaacatctacaataaacaggttttgaaagctctacatgctccaatgactgtgactttggttcagtttgctgttggtagtgtgctcattactatcatgtgggttcttaacctgtacaagagaccaaagatcagtggtgctcagctagctgccatcttgccgcttgctgttgtgcacacacttggtaatctgtttacgaacatgagtcttgggaaagtttctgtttcctttactcacaccattaaagccatggagcctttcttctctgttttattgtctgctatgtttctcggggagaaacctactccatgggtactcggtgccattgtaccaattgttggtggagttgcacttgcttcaatttcggaggtctcattcaactgggctggattttcgagtgcaatggcatcaaacttgactaaccaatcccgtaatgtgctgagtaagaaagtcatggttaagaaagatgattctcttgacaacatcactctcttctcaattataacattgatgtctctcgttctgatggctcctgtgactttctttacggaaggcatcaagttcactccttcatacattcaatcagctggtgtgaatgttaaacaaatatatacaaagtctcttatcgctgcactctgcttccacgcataccagcaggtgtcgtacatgatattggcgagagtatcaccggttacacattctgtcggaaactgtgtgaaacgtgttgtggttattgtgagctctgtcatcttcttcaagacacccgtctcgcctgttaatgctttcggaactggaatcgcccttgcgggtgtcttcttatactccagagtgaagggtattaagccaaagccaaagactgcttaagcaaatatcggctaatacctaatgtcatatcactcccgcgctttggatttgtatacaatttctcgagctaaagttttcagatagatggttttattcttttgcgggttttttcacgaagtttcatcatccctttctaagcttttcgctgcagccatcggttctcttagagtttgttataagttctcttctgtgtctagacaaatgctaaactcttaaatttcttacagtttttccaagaataacttgtcaacacattctcattactgcttttagttt

SEQ ID NO: 99387 - protein, 408 aa, Arabidopsis thaliana; identical to SEQ ID NO: 34976
  peptide (1)..(408): Ceres Seq. ID no. 13602787
  misc_feature (117)..(242): Pfam Name: Integral membrane protein DUF6 Pfam Description: Integral membrane protein DUF6
  misc_feature (1)..(408): Homolog of NCBI NO: 15242801 NR Description: triose phosphate/phosphate translocator, putative thaliana] >gi|19423928|gb|AAL87271.1| putative translocator precursor protein [Arabidopsis thaliana]
  misc_feature (1)..(408): Homolog of NCBI NO: 1778141 NR Description: phosphate/phosphoenolpyruvate translocator
  misc_feature (1)..(408): Homolog of NCBI NO: 21554233 NR Description: phosphate/phosphoenolpyruvate translocator
  misc_feature (1)..(408): Homolog of NCBI NO: 7546829 NR Description: phosphate/phosphoenolpyruvate translocator
  misc_feature (1)..(408): Homolog of NCBI NO: 1706110 NR Description: Triose phosphate/phosphate translocator,
  misc_feature (1)..(407): Homolog of NCBI NO: 7489171 NR Description: phosphate/phosphoenolpyruvate translocator
  misc_feature (1)..(408): Homolog of NCBI NO: 9295275 NR Description: phosphoenolpyruvate/phosphate translocator
  misc_feature (1)..(408): Homolog of NCBI NO: 7489170 NR Description: phosphate/phosphoenolpyruvate translocator
  misc_feature (84)..(408): Homolog of NCBI NO: 13991929 NR Description: phosphoenolpyruvate/phosphate translocator [Oryza
  misc_feature (69)..(408): Homolog of NCBI NO: 7489742 NR Description: glucose-6-phosphate/phosphate-translocator

SEQ ID NO: 99388 - protein, 295 aa, Arabidopsis thaliana; identical to SEQ ID NO: 34977
  peptide (1)..(295): Ceres Seq. ID no. 13602788
  misc_feature (4)..(129): Pfam Name: Integral membrane protein DUF6 Pfam Description: Integral membrane protein DUF6
  misc_feature (1)..(295): Homolog of NCBI NO: 15242801 NR Description: triose phosphate/phosphate translocator, putative thaliana] >gi|19423928|gb|AAL87271.1| putative translocator precursor protein [Arabidopsis thaliana]
  misc_feature (1)..(295): Homolog of NCBI NO: 1778141 NR Description: phosphate/phosphoenolpyruvate translocator
  misc_feature (1)..(295): Homolog of NCBI NO: 21554233 NR Description: phosphate/phosphoenolpyruvate translocator
  misc_feature (1)..(295): Homolog of NCBI NO: 7546829 NR Description: phosphate/phosphoenolpyruvate translocator
  misc_feature (1)..(295): Homolog of NCBI NO: 1706110 NR Description: Triose phosphate/phosphate translocator,
  misc_feature (1)..(294): Homolog of NCBI NO: 7489171 NR Description: phosphate/phosphoenolpyruvate translocator
  misc_feature (1)..(295): Homolog of NCBI NO: 9295275 NR Description: phosphoenolpyruvate/phosphate translocator
  misc_feature (1)..(295): Homolog of NCBI NO: 7489170 NR Description: phosphate/phosphoenolpyruvate translocator
  misc_feature (1)..(295): Homolog of NCBI NO: 13991929 NR Description: phosphoenolpyruvate/phosphate translocator [Oryza
  misc_feature (1)..(295): Homolog of NCBI NO: 7489742 NR Description: glucose-6-phosphate/phosphate-translocator

SEQ ID NO: 99389 - protein, 272 aa, Arabidopsis thaliana; identical to SEQ ID NO: 34978
  peptide (1)..(272): Ceres Seq. ID no. 13602789
  misc_feature (1)..(106): Pfam Name: Integral membrane protein DUF6 Pfam Description: Integral membrane protein DUF6
  misc_feature (1)..(272): Homolog of NCBI NO: 15242801 NR Description: triose phosphate/phosphate translocator, putative thaliana] >gi|19423928|gb|AAL87271.1| putative translocator precursor protein [Arabidopsis thaliana]
  misc_feature (1)..(272): Homolog of NCBI NO: 1778141 NR Description: phosphate/phosphoenolpyruvate translocator
  misc_feature (1)..(272): Homolog of NCBI NO: 21554233 NR Description: phosphate/phosphoenolpyruvate translocator
  misc_feature (1)..(272): Homolog of NCBI NO: 7546829 NR Description: phosphate/phosphoenolpyruvate translocator
  misc_feature (1)..(272): Homolog of NCBI NO: 1706110 NR Description: Triose phosphate/phosphate translocator,
  misc_feature (1)..(271): Homolog of NCBI NO: 7489171 NR Description: phosphate/phosphoenolpyruvate translocator
  misc_feature (1)..(272): Homolog of NCBI NO: 9295275 NR Description: phosphoenolpyruvate/phosphate translocator
  misc_feature (1)..(272): Homolog of NCBI NO: 7489170 NR Description: phosphate/phosphoenolpyruvate translocator
  misc_feature (1)..(272): Homolog of NCBI NO: 13991929 NR Description: phosphoenolpyruvate/phosphate translocator [Oryza
  misc_feature (1)..(272): Homolog of NCBI NO: 7489742 NR Description: glucose-6-phosphate/phosphate-translocator

SEQ ID NO: 99390 - DNA, 1392 bp, Arabidopsis thaliana
  misc_feature (1)..(1392): Ceres Seq. ID no. 13602790
  misc_feature: MA Experiment ID: 108473 Result: Down-regulated in Transcription
  misc_feature: MA Experiment 108473 PARAMETER Experiment Name: At_Drought_Flowers_cDNA_P Parameter: Timepoint (hr) Value: 7 d
  misc_feature: MA Experiment 108473 PARAMETER Experiment Name: At_Drought_Flowers_cDNA_P Parameter: Tissue Value: Flower
  misc_feature: MA Experiment 108473 PARAMETER Experiment Name: At_Drought_Flowers_cDNA_P Parameter: Treatment Value: Drought vs. No Drought
  misc_feature: MA Experiment ID: 108501 Result: Down-regulated in Transcription
  misc_feature: MA Experiment 108501 PARAMETER Experiment Name: At_ap2_floral_buds_cDNA_P Parameter: Plant Line Value: ap2 (Ler.)
  misc_feature: MA Experiment 108501 PARAMETER Experiment Name: At_ap2_floral_buds_cDNA_P Parameter: Tissue Value: Closed Flower
  misc_feature: MA Experiment ID: 20000069 Result: Down-regulated in Transcription
  misc_feature: MA Experiment 20000069 PARAMETER Experiment Name: At_100uM_ABA_Mutants_cDNA_P Parameter: Plant Line Value: CS23
  misc_feature: MA Experiment 20000069 PARAMETER Experiment Name: At_100uM_ABA_Mutants_cDNA_P Parameter: Timepoint (hr) Value: 6
  misc_feature: MA Experiment 20000069 PARAMETER Experiment Name: At_100uM_ABA_Mutants_cDNA_P Parameter: Tissue Value: Aerial
  misc_feature: MA Experiment 20000069 PARAMETER Experiment Name: At_100uM_ABA_Mutants_cDNA_P Parameter: Treatment Value: 100uM ABA vs. No Treatment
  misc_feature: MA Experiment ID: 20000093 Result: Down-regulated in Transcription
  misc_feature: MA Experiment 20000093 PARAMETER Experiment Name: At_42deg_Heat_cDNA_P Parameter: Temperature (deg C) Value: 42 vs. 22
  misc_feature: MA Experiment 20000093 PARAMETER Experiment Name: At_42deg_Heat_cDNA_P Parameter: Timepoint (hr) Value: 0.5
  misc_feature: MA Experiment 20000093 PARAMETER Experiment Name: At_42deg_Heat_cDNA_P Parameter: Tissue Value: Aerial
  misc_feature: MA Experiment ID: 20000111 Result: Down-regulated in Transcription
  misc_feature: MA Experiment 20000111 PARAMETER Experiment Name: At_42deg_Heat_cDNA_P Parameter: Temperature (deg C) Value: 42 vs. 22
  misc_feature: MA Experiment 20000111 PARAMETER Experiment Name: At_42deg_Heat_cDNA_P Parameter: Timepoint (hr) Value: 6
  misc_feature: MA Experiment 20000111 PARAMETER Experiment Name: At_42deg_Heat_cDNA_P Parameter: Tissue Value: Aerial
  misc_feature: MA Experiment ID: 20000112 Result: Down-regulated in Transcription
  misc_feature: MA Experiment 20000112 PARAMETER Experiment Name: At_42deg_Heat_cDNA_P Parameter: Temperature (deg C) Value: 42 vs. 22
  misc_feature: MA Experiment 20000112 PARAMETER Experiment Name: At_42deg_Heat_cDNA_P Parameter: Timepoint (hr) Value: 2
  misc_feature: MA Experiment 20000112 PARAMETER Experiment Name: At_42deg_Heat_cDNA_P Parameter: Tissue Value: Aerial
  misc_feature: MA Experiment ID: 20000117 Result: Down-regulated in Transcription
  misc_feature: MA Experiment 20000117 PARAMETER Experiment Name: At_100uM_ABA_Mutants_cDNA_P Parameter: Plant Line Value: Columbia
  misc_feature: MA Experiment 20000117 PARAMETER Experiment Name: At_100uM_ABA_Mutants_cDNA_P Parameter: Timepoint (hr) Value: 6
  misc_feature: MA Experiment 20000117 PARAMETER Experiment Name: At_100uM_ABA_Mutants_cDNA_P Parameter: Tissue Value: Aerial
  misc_feature: MA Experiment 20000117 PARAMETER Experiment Name: At_100uM_ABA_Mutants_cDNA_P Parameter: Treatment Value: 100uM ABA vs. No Treatment
  misc_feature: MA Experiment ID: 20000185 Result: Down-regulated in Transcription
  misc_feature: MA Experiment 20000185 PARAMETER Experiment Name: At_Roots__P Parameter: Age (day) Value: 7 vs. 21
  misc_feature: MA Experiment 20000185 PARAMETER Experiment Name: At_Roots__P Parameter: Organism Value: A. thaliana
  misc_feature: MA Experiment 20000185 PARAMETER Experiment Name: At_Roots__P Parameter: Tissue Value: Roots vs. Whole Plant
  misc_feature: MA Experiment ID: 20000234 Result: Up-regulated in Transcription
  misc_feature: MA Experiment 20000234 PARAMETER Experiment Name: At_Siliques_P Parameter: Age (day) Value: 21
  misc_feature: MA Experiment 20000234 PARAMETER Experiment Name: At_Siliques_P Parameter: Organism Value: A. thaliana
  misc_feature: MA Experiment 20000234 PARAMETER Experiment Name: At_Siliques_P Parameter: Plant Line Value: WS
  misc_feature: MA Experiment 20000234 PARAMETER Experiment Name: At_Siliques_P Parameter: Tissue Value: Less Than 5mm Siliques vs. Whole Plant
  misc_feature: MA Experiment ID: 20000265 Result: Up-regulated in Transcription
  misc_feature: MA Experiment 20000265 PARAMETER Experiment Name: At_Open_Flower_P Parameter: Age (day) Value: 21
  misc_feature: MA Experiment 20000265 PARAMETER Experiment Name: At_Open_Flower_P Parameter: Plant Line Value: WS
  misc_feature: MA Experiment 20000265 PARAMETER Experiment Name: At_Open_Flower_P Parameter: Tissue Value: Closed Flower vs. Whole Plant
  misc_feature: MA Experiment ID: 20000286 Result: Up-regulated in Transcription
  misc_feature: MA Experiment 20000286 PARAMETER Experiment Name: At_Open_Flower_P Parameter: Age (day) Value: 21
  misc_feature: MA Experiment 20000286 PARAMETER Experiment Name: At_Open_Flower_P Parameter: Plant Line Value: WS
  misc_feature: MA Experiment 20000286 PARAMETER Experiment Name: At_Open_Flower_P Parameter: Tissue Value: Half Open vs. Whole Plant
  misc_feature: MA Experiment ID: 20000439 Result: Down-regulated in Transcription
  misc_feature: MA Experiment 20000439 PARAMETER Experiment Name: At_Roots__P Parameter: Age (day) Value: 14 vs. 21
  misc_feature: MA Experiment 20000439 PARAMETER Experiment Name: At_Roots__P Parameter: Organism Value: A. thaliana
  misc_feature: MA Experiment 20000439 PARAMETER Experiment Name: At_Roots__P Parameter: Tissue Value: Roots vs. Whole Plant
  misc_feature: MA Experiment ID: 20001248 Result: Down-regulated in Transcription
  misc_feature: MA Experiment 20001248 PARAMETER Experiment Name: At_Far-red-induction_P Parameter: Age (day) Value: 7
  misc_feature: MA Experiment 20001248 PARAMETER Experiment Name: At_Far-red-induction_P Parameter: Light Value: Far-red vs. White
  misc_feature: MA Experiment 20001248 PARAMETER Experiment Name: At_Far-red-induction_P Parameter: Organism Value: A. thaliana
  misc_feature: MA Experiment 20001248 PARAMETER Experiment Name: At_Far-red-induction_P Parameter: Plant Line Value: Columbia
  misc_feature: MA Experiment 20001248 PARAMETER Experiment Name: At_Far-red-induction_P Parameter: Timepoint (hr) Value: 4
  misc_feature: MA Experiment 20001248 PARAMETER Experiment Name: At_Far-red-induction_P Parameter: Tissue Value: Whole Plant
  misc_feature: MA Experiment ID: 20001450 Result: Down-regulated in Transcription
  misc_feature: MA Experiment 20001450 PARAMETER Experiment Name: At_Far-red-induction_P Parameter: Age (day) Value: 7
  misc_feature: MA Experiment 20001450 PARAMETER Experiment Name: At_Far-red-induction_P Parameter: Light Value: Far-red vs. White
  misc_feature: MA Experiment 20001450 PARAMETER Experiment Name: At_Far-red-induction_P Parameter: Organism Value: A. thaliana
  misc_feature: MA Experiment 20001450 PARAMETER Experiment Name: At_Far-red-induction_P Parameter: Plant Line Value: Columbia
  misc_feature: MA Experiment 20001450 PARAMETER Experiment Name: At_Far-red-induction_P Parameter: Timepoint (hr) Value: 8
  misc_feature: MA Experiment 20001450 PARAMETER Experiment Name: At_Far-red-induction_P Parameter: Tissue Value: Whole Plant
  misc_feature: MA Experiment ID: 20001451 Result: Down-regulated in Transcription
  misc_feature: MA Experiment 20001451 PARAMETER Experiment Name: At_Far-red-induction_P Parameter: Age (day) Value: 7
  misc_feature: MA Experiment 20001451 PARAMETER Experiment Name: At_Far-red-induction_P Parameter: Light Value: Far-red vs. White
  misc_feature: MA Experiment 20001451 PARAMETER Experiment Name: At_Far-red-induction_P Parameter: Organism Value: A. thaliana
  misc_feature: MA Experiment 20001451 PARAMETER Experiment Name: At_Far-red-induction_P Parameter: Plant Line Value: Columbia
  misc_feature: MA Experiment 20001451 PARAMETER Experiment Name: At_Far-red-induction_P Parameter: Timepoint (hr) Value: 24
  misc_feature: MA Experiment 20001451 PARAMETER Experiment Name: At_Far-red-induction_P Parameter: Tissue Value: Whole Plant
  misc_feature: MA Experiment ID: 20001555 Result: Down-regulated in Transcription
  misc_feature: MA Experiment 20001555 PARAMETER Experiment Name: At_Drought_Soil_Dry_P Parameter: Age (day) Value: 24
  misc_feature: MA Experiment 20001555 PARAMETER Experiment Name: At_Drought_Soil_Dry_P Parameter: Organism Value: A. thaliana
  misc_feature: MA Experiment 20001555 PARAMETER Experiment Name: At_Drought_Soil_Dry_P Parameter: Plant Line Value: WS
  misc_feature: MA Experiment 20001555 PARAMETER Experiment Name: At_Drought_Soil_Dry_P Parameter: Post Timepoint (hr) Value: None
  misc_feature: MA Experiment 20001555 PARAMETER Experiment Name: At_Drought_Soil_Dry_P Parameter: Post-Treatment Value: None
  misc_feature: MA Experiment 20001555 PARAMETER Experiment Name: At_Drought_Soil_Dry_P Parameter: Timepoint (day) Value: 10
  misc_feature: MA Experiment 20001555 PARAMETER Experiment Name: At_Drought_Soil_Dry_P Parameter: Treatment Value: Drought vs. No Drought
  misc_feature: MA Experiment ID: 20001556 Result: Down-regulated in Transcription
  misc_feature: MA Experiment 20001556 PARAMETER Experiment Name: At_Drought_Soil_Dry_P Parameter: Age (day) Value: 26
  misc_feature: MA Experiment 20001556 PARAMETER Experiment Name: At_Drought_Soil_Dry_P Parameter: Organism Value: A. thaliana
  misc_feature: MA Experiment 20001556 PARAMETER Experiment Name: At_Drought_Soil_Dry_P Parameter: Plant Line Value: WS
  misc_feature: MA Experiment 20001556 PARAMETER Experiment Name: At_Drought_Soil_Dry_P Parameter: Post Timepoint (hr) Value: None
  misc_feature: MA Experiment 20001556 PARAMETER Experiment Name: At_Drought_Soil_Dry_P Parameter: Post-Treatment Value: None
  misc_feature: MA Experiment 20001556 PARAMETER Experiment Name: At_Drought_Soil_Dry_P Parameter: Timepoint (day) Value: 12
  misc_feature: MA Experiment 20001556 PARAMETER Experiment Name: At_Drought_Soil_Dry_P Parameter: Treatment Value: Drought vs. No Drought
  misc_feature: MA Experiment ID: 20001557 Result: Down-regulated in Transcription
  misc_feature: MA Experiment 20001557 PARAMETER Experiment Name: At_Drought_Soil_Dry_P Parameter: Age (day) Value: 27
  misc_feature: MA Experiment 20001557 PARAMETER Experiment Name: At_Drought_Soil_Dry_P Parameter: Organism Value: A. thaliana
  misc_feature: MA Experiment 20001557 PARAMETER Experiment Name: At_Drought_Soil_Dry_P Parameter: Plant Line Value: WS
  misc_feature: MA Experiment 20001557 PARAMETER Experiment Name: At_Drought_Soil_Dry_P Parameter: Post Timepoint (hr) Value: 3
  misc_feature: MA Experiment 20001557 PARAMETER Experiment Name: At_Drought_Soil_Dry_P Parameter: Post-Treatment Value: Re-Water vs. No Drought
  misc_feature: MA Experiment 20001557 PARAMETER Experiment Name: At_Drought_Soil_Dry_P Parameter: Timepoint (day) Value: 13
  misc_feature: MA Experiment 20001557 PARAMETER Experiment Name: At_Drought_Soil_Dry_P Parameter: Treatment Value: Drought vs. No Drought
  misc_feature: MA Experiment ID: 20001559 Result: Down-regulated in Transcription
  misc_feature: MA Experiment 20001559 PARAMETER Experiment Name: At_Drought_Soil_Dry_P Parameter: Age (day) Value: 28
  misc_feature: MA Experiment 20001559 PARAMETER Experiment Name: At_Drought_Soil_Dry_P Parameter: Organism Value: A. thaliana
  misc_feature: MA Experiment 20001559 PARAMETER Experiment Name: At_Drought_Soil_Dry_P Parameter: Plant Line Value: WS
  misc_feature: MA Experiment 20001559 PARAMETER Experiment Name: At_Drought_Soil_Dry_P Parameter: Post Timepoint (hr) Value: 29
  misc_feature: MA Experiment 20001559 PARAMETER Experiment Name: At_Drought_Soil_Dry_P Parameter: Post-Treatment Value: Re-Water vs. No Drought
  misc_feature: MA Experiment 20001559 PARAMETER Experiment Name: At_Drought_Soil_Dry_P Parameter: Timepoint (day) Value: 14
  misc_feature: MA Experiment 20001559 PARAMETER Experiment Name: At_Drought_Soil_Dry_P Parameter: Treatment Value: Drought vs. No Drought
  misc_feature: MA Experiment ID: 20001773 Result: Up-regulated in Transcription
  misc_feature: MA Experiment 20001773 PARAMETER Experiment Name: At_Far-red-enriched-adult_P Parameter: Age (day) Value: 30
  misc_feature: MA Experiment 20001773 PARAMETER Experiment Name: At_Far-red-enriched-adult_P Parameter: Light Value: Far-red enriched vs. White
  misc_feature: MA Experiment 20001773 PARAMETER Experiment Name: At_Far-red-enriched-adult_P Parameter: Organism Value: A. thaliana
  misc_feature: MA Experiment 20001773 PARAMETER Experiment Name: At_Far-red-enriched-adult_P Parameter: Plant Line Value: Columbia
  misc_feature: MA Experiment 20001773 PARAMETER Experiment Name: At_Far-red-enriched-adult_P Parameter: Timepoint (hr) Value: 48
  misc_feature: MA Experiment 20001773 PARAMETER Experiment Name: At_Far-red-enriched-adult_P Parameter: Tissue Value: Aerial
  misc_feature: MA Experiment ID: 20001906 Result: Down-regulated in Transcription
  misc_feature: MA Experiment 20001906 PARAMETER Experiment Name: At_Drought_Reproduction_P Parameter: Age (day) Value: 35
  misc_feature: MA Experiment 20001906 PARAMETER Experiment Name: At_Drought_Reproduction_P Parameter: Organism Value: A. thaliana
  misc_feature: MA Experiment 20001906 PARAMETER Experiment Name: At_Drought_Reproduction_P Parameter: Plant Line Value: WS
  misc_feature: MA Experiment 20001906 PARAMETER Experiment Name: At_Drought_Reproduction_P Parameter: Timepoint (day) Value: 5
  misc_feature: MA Experiment 20001906 PARAMETER Experiment Name: At_Drought_Reproduction_P Parameter: Tissue Value: Siliques
  misc_feature: MA Experiment 20001906 PARAMETER Experiment Name: At_Drought_Reproduction_P Parameter: Treatment Value: Drought vs. No Drought
acattctcatttcatagcaaaacaccaaaacagagttcacagaaacatattcaaagatttttcacaaatattaccattttaaatctataaacaatgacgaactcggtggctaagttggcactactagggttttgcattctgcaagtgacgagcttacttgttccgcaagcaaatgctagggctttccttgtgtttggagattctctcgttgacaatggtaacaatgactttcttgctaccactgctcgtgccgataattacccttatggtatcgatttcccaactcatcgtcctacgggccgtttctccaatggtctaaacattccagatctcatcagtgaacatttgggtcaagagtctccaatgccgtaccttagtccaatgctgaagaaggacaaactcttaaggggagctaacttcgcctccgcgggtattggaatccttaacgacaccggaatccagtttctgaatattattaggatcacaaagcagctagagtacttcgagcagtacaaggttcgagtaagcgggttggtcggagaagaagagatgaatcggctcgtgaacggagctcttgtcctaataacacttggaggcaatgatttcgtcaacaactactacttggtccctttctctgcaagatctcgtcaattctctcttcctgactacgttgtctttgtcatttctgaataccgcaaagtcttacggaaaatgtacgatttgggtgctcgacgtgtccttgtgactggaacaggaccaatgggttgcgtcccggccgagctggcgcaacgtagccgcaacggcgagtgtgctaccgaactccaacgagccgcgtcactattcaacccacaactaattcaaatgataacagacctcaacaacgaagttggatcttcggccttcattgccgctaatactcaacaaatgcacatggacttcattagcgacccacaagcatatggattcgtcacgtcgaaggtggcttgttgtggacaagggccgtacaatgggatagggctatgcactccattatcaaatctttgcccaaacagagatctctttgccttttgggatccttttcacccatcagaaaaagcaagtagaatcatagctcaacaaatcctcaatggctctcctgaatacatgcatcccatgaatcttagcaccatcctcaccgttgattccatgacctaagcttctattcctcatctatcccaaatccactttatgctttgtttttgttttgcctttctcgtttattatatatttttacattggcactttaattagtttccttgagttatgttgtgagttttgtgttgttcatcaataattagtcaccaattgtgagctgagaagtaatattcaacaatcttacgaatgttcactatc

SEQ ID NO: 99391 - protein, 366 aa, Arabidopsis thaliana; identical to SEQ ID NO: 22813
  peptide (1)..(366): Ceres Seq. ID no. 13602791
  misc_feature (31)..(343): Pfam Name: GDSL-like Lipase/Acylhydrolase Pfam Description: GDSL-like Lipase/Acylhydrolase
  misc_feature (1)..(366): Homolog of NCBI NO: 15242808 NR Description: GDSL-motif lipase/hydrolase protein [Arabidopsis
  misc_feature (11)..(364): Homolog of NCBI NO: 15229265 NR Description: GDSL-motif lipase/hydrolase protein [Arabidopsis
  misc_feature (25)..(366): Homolog of NCBI NO: 28071322 NR Description: P0705A05.30 [Oryza sativa (japonica
  misc_feature (9)..(363): Homolog of NCBI NO: 32489520 NR Description: OSJNBa0043L24.11 [Oryza sativa (japonica
  misc_feature (1)..(364): Homolog of NCBI NO: 37535146 NR Description: putative early nodulin gene (Enod) related
  misc_feature (24)..(364): Homolog of NCBI NO: 22758315 NR Description: putative early nodulin gene (Enod) related
  misc_feature (16)..(364): Homolog of NCBI NO: 15235421 NR Description: GDSL-motif lipase/hydrolase protein [Arabidopsis
  misc_feature (1)..(362): Homolog of NCBI NO: 15238814 NR Description: GDSL-motif lipase/hydrolase protein [Arabidopsis
  misc_feature (18)..(190): Homolog of NCBI NO: 37789825 NR Description: putative GDSL-motif lipase [Vitis vinifera]
  misc_feature (30)..(359): Homolog of NCBI NO: 15227849 NR Description: GDSL-motif lipase/hydrolase protein [Arabidopsis

SEQ ID NO: 99392 - protein, 276 aa, Arabidopsis thaliana; identical to SEQ ID NO: 22814
  peptide (1)..(276): Ceres Seq. ID no. 13602792
  misc_feature (1)..(253): Pfam Name: GDSL-like Lipase/Acylhydrolase Pfam Description: GDSL-like Lipase/Acylhydrolase
  misc_feature (1)..(276): Homolog of NCBI NO: 15242808 NR Description: GDSL-motif lipase/hydrolase protein [Arabidopsis
  misc_feature (1)..(274): Homolog of NCBI NO: 15229265 NR Description: GDSL-motif lipase/hydrolase protein [Arabidopsis
  misc_feature (1)..(276): Homolog of NCBI NO: 28071322 NR Description: P0705A05.30 [Oryza sativa (japonica
  misc_feature (1)..(273): Homolog of NCBI NO: 32489520 NR Description: OSJNBa0043L24.11 [Oryza sativa (japonica
  misc_feature (1)..(274): Homolog of NCBI NO: 37535146 NR Description: putative early nodulin gene (Enod) related
  misc_feature (1)..(274): Homolog of NCBI NO: 22758315 NR Description: putative early nodulin gene (Enod) related
  misc_feature (1)..(274): Homolog of NCBI NO: 15235421 NR Description: GDSL-motif lipase/hydrolase protein [Arabidopsis
  misc_feature (1)..(272): Homolog of NCBI NO: 15238814 NR Description: GDSL-motif lipase/hydrolase protein [Arabidopsis
  misc_feature (1)..(100): Homolog of NCBI NO: 37789825 NR Description: putative GDSL-motif lipase [Vitis vinifera]
  misc_feature (1)..(269): Homolog of NCBI NO: 15227849 NR Description: GDSL-motif lipase/hydrolase protein [Arabidopsis

SEQ ID NO: 99393 - protein, 270 aa, Arabidopsis thaliana; identical to SEQ ID NO: 22815
  peptide (1)..(270): Ceres Seq. ID no. 13602793
  misc_feature (1)..(247): Pfam Name: GDSL-like Lipase/Acylhydrolase Pfam Description: GDSL-like Lipase/Acylhydrolase
  misc_feature (1)..(270): Homolog of NCBI NO: 15242808 NR Description: GDSL-motif lipase/hydrolase protein [Arabidopsis
  misc_feature (1)..(268): Homolog of NCBI NO: 15229265 NR Description: GDSL-motif lipase/hydrolase protein [Arabidopsis
  misc_feature (1)..(270): Homolog of NCBI NO: 28071322 NR Description: P0705A05.30 [Oryza sativa (japonica
  misc_feature (1)..(267): Homolog of NCBI NO: 32489520 NR Description: OSJNBa0043L24.11 [Oryza sativa (japonica
  misc_feature (1)..(268): Homolog of NCBI NO: 37535146 NR Description: putative early nodulin gene (Enod) related
  misc_feature (1)..(268): Homolog of NCBI NO: 22758315 NR Description: putative early nodulin gene (Enod) related
  misc_feature (1)..(268): Homolog of NCBI NO: 15235421 NR Description: GDSL-motif lipase/hydrolase protein [Arabidopsis
  misc_feature (1)..(266): Homolog of NCBI NO: 15238814 NR Description: GDSL-motif lipase/hydrolase protein [Arabidopsis
  misc_feature (1)..(94): Homolog of NCBI NO: 37789825 NR Description: putative GDSL-motif lipase [Vitis vinifera]
  misc_feature (1)..(263): Homolog of NCBI NO: 15227849 NR Description: GDSL-motif lipase/hydrolase protein [Arabidopsis

SEQ ID NO: 99394 - DNA, 738 bp, Arabidopsis thaliana
  misc_feature (1)..(738): Ceres Seq. ID no. 13602794
  misc_feature: MA Experiment ID: 108501 Result: Up-regulated in Transcription
  misc_feature: MA Experiment 108501 PARAMETER Experiment Name: At_ap2_floral_buds_cDNA_P Parameter: Plant Line Value: ap2 (Ler.)
  misc_feature: MA Experiment 108501 PARAMETER Experiment Name: At_ap2_floral_buds_cDNA_P Parameter: Tissue Value: Closed Flower
  misc_feature: MA Experiment ID: 20000234 Result: Up-regulated in Transcription
  misc_feature: MA Experiment 20000234 PARAMETER Experiment Name: At_Siliques_P Parameter: Age (day) Value: 21
  misc_feature: MA Experiment 20000234 PARAMETER Experiment Name: At_Siliques_P Parameter: Organism Value: A. thaliana
  misc_feature: MA Experiment 20000234 PARAMETER Experiment Name: At_Siliques_P Parameter: Plant Line Value: WS
  misc_feature: MA Experiment 20000234 PARAMETER Experiment Name: At_Siliques_P Parameter: Tissue Value: Less Than 5mm Siliques vs. Whole Plant
  misc_feature: MA Experiment ID: 20000235 Result: Up-regulated in Transcription
  misc_feature: MA Experiment 20000235 PARAMETER Experiment Name: At_Siliques_P Parameter: Age (day) Value: 21
  misc_feature: MA Experiment 20000235 PARAMETER Experiment Name: At_Siliques_P Parameter: Organism Value: A. thaliana
  misc_feature: MA Experiment 20000235 PARAMETER Experiment Name: At_Siliques_P Parameter: Plant Line Value: WS
  misc_feature: MA Experiment 20000235 PARAMETER Experiment Name: At_Siliques_P Parameter: Tissue Value: 5-10mm Siliques vs. Whole Plant
tctctctctctctctctctcataatacatagaggagaataaaaaaatgatgtgtttccaaaacttcaaagttcgtaaattctttacgtcgaggaactccggtaaagtatctccagacaccgtctcaaaatcagcggagaacagattgtggaaagaatttcaagaaaaagatgacgttctgaagatccatgtgagatcgtggttaccttcgccggaaaatattttccggtgggaagccaccgttaacggcccggtgggttgcccttacgaaaaaggagtcttcaccgtctctgttcacatcccacccaaatatccttatgaaccacccaaaatcacattcaagactaagatttttcatcctaatataagcgaaattggagaaatctttgttgatatattgggatcacgatggtcatcagccttgaccattaacttggtgttgctctctatatgttcgattttatcgaacccggttgaaccgttattggttagcaatcatgccgcgagactgtaccagaaagaccggaaagcttacgagaaagttgcgcgagaatggactttgaagtatgcaaagggatgattagttgttctcaagtttttttgatgtctattgcgattaaactatatgacttctgttttgtttcgtcagtttagtgtcgtgtaaggtcgtttactaccgagagattgaatacaatagttgtctttgtattcaagacgtcagcagctgctaaaccttgtt

SEQ ID NO: 99395 - protein, 177 aa, Arabidopsis thaliana
  peptide (1)..(177): Ceres Seq. ID no. 13602795
  misc_feature (1)..(177): Homolog of NCBI NO: 18403085 NR Description: ubiquitin-conjugating enzyme, putative
  misc_feature (1)..(177): Homolog of NCBI NO: 21555293 NR Description: E2, ubiquitin-conjugating enzyme, putative
  misc_feature (30)..(177): Homolog of NCBI NO: 2668744 NR Description: ubiquitin conjugating enzyme [Zea mays]
  misc_feature (30)..(177): Homolog of NCBI NO: 34909292 NR Description: ubiquitin conjugating enzyme [Oryza sativa
  misc_feature (30)..(177): Homolog of NCBI NO: 464981 NR Description: Ubiquitin-conjugating enzyme E2-17 kDa ligase) (Ubiquitin carrier protein) >gi|388207|gb|AAA34125.1|
  misc_feature (30)..(177): Homolog of NCBI NO: 28569263 NR Description: ubiquitin-conjugating enzyme E2 [Gossypium
  misc_feature (54)..(177): Homolog of NCBI NO: 18398206 NR Description: ubiquitin-conjugating enzyme 11 (UBC11)
  misc_feature (30)..(177): Homolog of NCBI NO: 30025160 NR Description: ubiquitin-conjugating enzyme [Hordeum vulgare]
  misc_feature (30)..(177): Homolog of NCBI NO: 30693863 NR Description: ubiquitin-conjugating enzyme 8 (UBC8)
  misc_feature (30)..(177): Homolog of NCBI NO: 30693871 NR Description: ubiquitin-conjugating enzyme 8 (UBC8)
MMCFQNFKVRKFFTSRNSGKVSPDTVSKSAENRLWKEFQEKDDVLKIHVRSWLPSPENIFRWEATVNGPVGCPYEKGVFTVSVHIPPKYPYEPPKITFKTKIFHPNISEIGEIFVDILGSRWSSALTINLVLLSICSILSNPVEPLLVSNHAARLYQKDRKAYEKVAREWTLKYAKG

SEQ ID NO: 99396 - protein, 176 aa, Arabidopsis thaliana
  peptide (1)..(176): Ceres Seq. ID no. 13602796
  misc_feature (1)..(176): Homolog of NCBI NO: 18403085 NR Description: ubiquitin-conjugating enzyme, putative
  misc_feature (1)..(176): Homolog of NCBI NO: 21555293 NR Description: E2, ubiquitin-conjugating enzyme, putative
  misc_feature (29)..(176): Homolog of NCBI NO: 2668744 NR Description: ubiquitin conjugating enzyme [Zea mays]
  misc_feature (29)..(176): Homolog of NCBI NO: 34909292 NR Description: ubiquitin conjugating enzyme [Oryza sativa
  misc_feature (29)..(176): Homolog of NCBI NO: 464981 NR Description: Ubiquitin-conjugating enzyme E2-17 kDa ligase) (Ubiquitin carrier protein) >gi|388207|gb|AAA34125.1|
  misc_feature (29)..(176): Homolog of NCBI NO: 28569263 NR Description: ubiquitin-conjugating enzyme E2 [Gossypium
  misc_feature (53)..(176): Homolog of NCBI NO: 18398206 NR Description: ubiquitin-conjugating enzyme 11 (UBC11)
  misc_feature (29)..(176): Homolog of NCBI NO: 30025160 NR Description: ubiquitin-conjugating enzyme [Hordeum vulgare]
  misc_feature (29)..(176): Homolog of NCBI NO: 30693863 NR Description: ubiquitin-conjugating enzyme 8 (UBC8)
  misc_feature (29)..(176): Homolog of NCBI NO: 30693871 NR Description: ubiquitin-conjugating enzyme 8 (UBC8)
MCFQNFKVRKFFTSRNSGKVSPDTVSKSAENRLWKEFQEKDDVLKIHVRSWLPSPENIFRWEATVNGPVGCPYEKGVFTVSVHIPPKYPYEPPKITFKTKIFHPNISEIGEIFVDILGSRWSSALTINLVLLSICSILSNPVEPLLVSNHAARLYQKDRKAYEKVAREWTLKYAKG

SEQ ID NO: 99397 - DNA, 1131 bp, Arabidopsis thaliana
  misc_feature (1)..(1131): Ceres Seq. ID no. 13602805
  misc_feature: MA Experiment ID: 108577 Result: Down-regulated in Transcription
  misc_feature: MA Experiment 108577 PARAMETER Experiment Name: At_42deg_Heat_cDNA_P Parameter: Temperature (deg C) Value: 42 vs. 22
  misc_feature: MA Experiment 108577 PARAMETER Experiment Name: At_42deg_Heat_cDNA_P Parameter: Timepoint (hr) Value: 6
  misc_feature: MA Experiment 108577 PARAMETER Experiment Name: At_42deg_Heat_cDNA_P Parameter: Tissue Value: Aerial
  misc_feature: MA Experiment ID: 20000113 Result: Down-regulated in Transcription
  misc_feature: MA Experiment 20000113 PARAMETER Experiment Name: At_42deg_Heat_cDNA_P Parameter: Temperature (deg C) Value: 42 vs. 22
  misc_feature: MA Experiment 20000113 PARAMETER Experiment Name: At_42deg_Heat_cDNA_P Parameter: Timepoint (hr) Value: 8
  misc_feature: MA Experiment 20000113 PARAMETER Experiment Name: At_42deg_Heat_cDNA_P Parameter: Tissue Value: Aerial
  misc_feature: MA Experiment ID: 20000180 Result: Up-regulated in Transcription
  misc_feature: MA Experiment 20000180 PARAMETER Experiment Name: At_Germinating_Seeds_P Parameter: Age (hr) Value: 24 vs. 0
  misc_feature: MA Experiment 20000180 PARAMETER Experiment Name: At_Germinating_Seeds_P Parameter: Tissue Value: Germinating Seeds
  misc_feature: MA Experiment ID: 20000224 Result: Up-regulated in Transcription
  misc_feature: MA Experiment ID: 20000437 Result: Up-regulated in Transcription
  misc_feature: MA Experiment 20000437 PARAMETER Experiment Name: At_Drought_P Parameter: Age (day) Value: 8
  misc_feature: MA Experiment 20000437 PARAMETER Experiment Name: At_Drought_P Parameter: Organism Value: A. thaliana
  misc_feature: MA Experiment 20000437 PARAMETER Experiment Name: At_Drought_P Parameter: Plant Line Value: WS
  misc_feature: MA Experiment 20000437 PARAMETER Experiment Name: At_Drought_P Parameter: Timepoint (hr) Value: 24
  misc_feature: MA Experiment 20000437 PARAMETER Experiment Name: At_Drought_P Parameter: Tissue Value: Whole Plant
  misc_feature: MA Experiment 20000437 PARAMETER Experiment Name: At_Drought_P Parameter: Treatment Value: Drought vs. No Drought
tttttgaatttggttttatatataacaatctggatccgccaccgtcgaattaatctccggaaagctcgtcgaaagatgtcgatgggaggcgacacgacgtgggttgggaagaagccgatcagacgcatcggtggattatctgatgctctctctatcgcctccgatctcggtttcgccgtcgctcctcctccgtcgcaggaagaattacaaagctttgcgtcttcgaatggggaaagaggtgatgatttgataagggtattgagagagttatctgttgttcaaaggaaaattgcagacttgcaggtcgagcttcaagggaggaaggatgataaaaatgtggcgcatttgactcatgttggtgaaatgcaaaagaaaatcgagactttgtcaaggattactcaaatattgaaagatgttatacaaaacaaggatcgcatcattgctcgtctccaacaaccttattcgctagattgcattccagttgaagcagaatatcagaaacaattctcagagttgctaatgaaagccgccagtgattatggcgccttaacagcatccgtgtctgattttcagtggagccaaaactttaaagaacctccttcagtctggggggaaatgctgcgtccaatacctgtggcactagcgtcatgcacgagattctttgaggccatgtctgcgatgagagaatcattcgcgactcttcaagagcttcgagttggtaactctgcagtttctttaccaacaacaccaggaggtaacgaaatgacacatagagactcagattgtgtgactccacctcaagggaggatagagtcaagcttcgacgatttagctgttcataaaacaaggagacaaaacaatgatcaaaatgaagaagaagaagaagaagaagaagaagaagatggtaataacaatgggaaccggagactatcttggcctccttctgtaaaaaagagtagcgtttaaacagttgcttttgtctttgcttgagctttttaatatcgatcgtgttttgtttcatcagcattagtgttctttatggatttacttatttctatttgatagtctttgagtgaaacttaaaacagtgtatattttgttaacactggttttcatggtccatgtgactat

SEQ ID NO: 99398 - protein, 321 aa, Arabidopsis thaliana
  peptide (1)..(321): Ceres Seq. ID no. 13602806
  misc_feature (26)..(321): Homolog of NCBI NO: 18403146 NR Description: expressed protein [Arabidopsis thaliana] At2g32980/T21L14.8 [Arabidopsis thaliana] expressed protein [Arabidopsis thaliana]
  misc_feature (26)..(321): Homolog of NCBI NO: 21593334 NR Description: unknown [Arabidopsis thaliana]
  misc_feature (108)..(321): Homolog of NCBI NO: 7452463 NR Description: hypothetical protein At2g32980 [imported] -
  misc_feature (37)..(275): Homolog of NCBI NO: 40253396 NR Description: unknown protein [Oryza sativa (japonica
  misc_feature (26)..(101): Homolog of NCBI NO: 7452463 NR Description: hypothetical protein At2g32980 [imported] -
FLNLVLYITIWIRHRRINLRKARRKMSMGGDTTWVGKKPIRRIGGLSDALSIASDLGFAVAPPPSQEELQSFASSNGERGDDLIRVLRELSVVQRKIADLQVELQGRKDDKNVAHLTHVGEMQKKIETLSRITQILKDVIQNKDRIIARLQQPYSLDCIPVEAEYQKQFSELLMKAASDYGALTASVSDFQWSQNFKEPPSVWGEMLRPIPVALASCTRFFEAMSAMRESFATLQELRVGNSAVSLPTTPGGNEMTHRDSDCVTPPQGRIESSFDDLAVHKTRRQNNDQNEEEEEEEEEEDGNNNGNRRLSWPPSVKKSSV

SEQ ID NO: 99399 - protein, 296 aa, Arabidopsis thaliana; identical to SEQ ID NO: 24348
  peptide (1)..(296): Ceres Seq. ID no. 13602807
  misc_feature (1)..(296): Homolog of NCBI NO: 18403146 NR Description: expressed protein [Arabidopsis thaliana] At2g32980/T21L14.8 [Arabidopsis thaliana] expressed protein [Arabidopsis thaliana]
  misc_feature (1)..(296): Homolog of NCBI NO: 21593334 NR Description: unknown [Arabidopsis thaliana]
  misc_feature (83)..(296): Homolog of NCBI NO: 7452463 NR Description: hypothetical protein At2g32980 [imported] -
  misc_feature (12)..(250): Homolog of NCBI NO: 40253396 NR Description: unknown protein [Oryza sativa (japonica
  misc_feature (1)..(76): Homolog of NCBI NO: 7452463 NR Description: hypothetical protein At2g32980 [imported] -

SEQ ID NO: 99400 - protein, 294 aa, Arabidopsis thaliana; identical to SEQ ID NO: 24349
  peptide (1)..(294): Ceres Seq. ID no. 13602808
  misc_feature (1)..(294): Homolog of NCBI NO: 18403146 NR Description: expressed protein [Arabidopsis thaliana] At2g32980/T21L14.8 [Arabidopsis thaliana] expressed protein [Arabidopsis thaliana]
  misc_feature (1)..(294): Homolog of NCBI NO: 21593334 NR Description: unknown [Arabidopsis thaliana]
  misc_feature (81)..(294): Homolog of NCBI NO: 7452463 NR Description: hypothetical protein At2g32980 [imported] -
  misc_feature (10)..(248): Homolog of NCBI NO: 40253396 NR Description: unknown protein [Oryza sativa (japonica
  misc_feature (1)..(74): Homolog of NCBI NO: 7452463 NR Description: hypothetical protein At2g32980 [imported] -

SEQ ID NO: 99401 - DNA, 1301 bp, Arabidopsis thaliana
  misc_feature (1)..(1301): Ceres Seq. ID no. 13602809
  misc_feature: MA Experiment ID: 108462 Result: Down-regulated in Transcription
  misc_feature: MA Experiment 108462 PARAMETER Experiment Name: At_Germinating_Seeds_cDNA_P Parameter: Age (day) Value: 2 vs. 0
  misc_feature: MA Experiment 108462 PARAMETER Experiment Name: At_Germinating_Seeds_cDNA_P Parameter: Tissue Value: Germinating Seeds
  misc_feature: MA Experiment ID: 108463 Result: Down-regulated in Transcription
  misc_feature: MA Experiment 108463 PARAMETER Experiment Name: At_Germinating_Seeds_cDNA_P Parameter: Age (day) Value: 3 vs. 0
  misc_feature: MA Experiment 108463 PARAMETER Experiment Name: At_Germinating_Seeds_cDNA_P Parameter: Tissue Value: Germinating Seeds
  misc_feature: MA Experiment ID: 108464 Result: Down-regulated in Transcription
  misc_feature: MA Experiment 108464 PARAMETER Experiment Name: At_Germinating_Seeds_cDNA_P Parameter: Age (day) Value: 4 vs. 0
  misc_feature: MA Experiment 108464 PARAMETER Experiment Name: At_Germinating_Seeds_cDNA_P Parameter: Tissue Value: Germinating Seeds
  misc_feature: MA Experiment ID: 108473 Result: Down-regulated in Transcription
  misc_feature: MA Experiment 108473 PARAMETER Experiment Name: At_Drought_Flowers_cDNA_P Parameter: Timepoint (hr) Value: 7 d
  misc_feature: MA Experiment 108473 PARAMETER Experiment Name: At_Drought_Flowers_cDNA_P Parameter: Tissue Value: Flower
  misc_feature: MA Experiment 108473 PARAMETER Experiment Name: At_Drought_Flowers_cDNA_P Parameter: Treatment Value: Drought vs. No Drought
  misc_feature: MA Experiment ID: 108561 Result: Down-regulated in Transcription
  misc_feature: MA Experiment 108561 PARAMETER Experiment Name: At_100uM_ABA_cDNA_P Parameter: Timepoint (hr) Value: 6
  misc_feature: MA Experiment 108561 PARAMETER Experiment Name: At_100uM_ABA_cDNA_P Parameter: Tissue Value: Aerial
  misc_feature: MA Experiment 108561 PARAMETER Experiment Name: At_100uM_ABA_cDNA_P Parameter: Treatment Value: 100uM ABA vs. No Treatment
  misc_feature: MA Experiment ID: 108572 Result: Down-regulated in Transcription
  misc_feature: MA Experiment 108572 PARAMETER Experiment Name: At_Drought_cDNA_P Parameter: Timepoint (hr) Value: 1
  misc_feature: MA Experiment 108572 PARAMETER Experiment Name: At_Drought_cDNA_P Parameter: Tissue Value: Aerial
  misc_feature: MA Experiment 108572 PARAMETER Experiment Name: At_Drought_cDNA_P Parameter: Treatment Value: Drought vs. No Drought
  misc_feature: MA Experiment ID: 108573 Result: Down-regulated in Transcription
  misc_feature: MA Experiment 108573 PARAMETER Experiment Name: At_Drought_cDNA_P Parameter: Timepoint (hr) Value: 6
  misc_feature: MA Experiment 108573 PARAMETER Experiment Name: At_Drought_cDNA_P Parameter: Tissue Value: Aerial
  misc_feature: MA Experiment 108573 PARAMETER Experiment Name: At_Drought_cDNA_P Parameter: Treatment Value: Drought vs. No Drought
  misc_feature: MA Experiment ID: 108576 Result: Down-regulated in Transcription
  misc_feature: MA Experiment 108576 PARAMETER Experiment Name: At_42deg_Heat_cDNA_P Parameter: Temperature (deg C) Value: 42 vs. 22
  misc_feature: MA Experiment 108576 PARAMETER Experiment Name: At_42deg_Heat_cDNA_P Parameter: Timepoint (hr) Value: 1
  misc_feature: MA Experiment 108576 PARAMETER Experiment Name: At_42deg_Heat_cDNA_P Parameter: Tissue Value: Aerial
  misc_feature: MA Experiment ID: 108577 Result: Down-regulated in Transcription
  misc_feature: MA Experiment 108577 PARAMETER Experiment Name: At_42deg_Heat_cDNA_P Parameter: Temperature (deg C) Value: 42 vs. 22
  misc_feature: MA Experiment 108577 PARAMETER Experiment Name: At_42deg_Heat_cDNA_P Parameter: Timepoint (hr) Value: 6
  misc_feature: MA Experiment 108577 PARAMETER Experiment Name: At_42deg_Heat_cDNA_P Parameter: Tissue Value: Aerial
  misc_feature: MA Experiment ID: 108585 Result: Down-regulated in Transcription
  misc_feature: MA Experiment 108585 PARAMETER Experiment Name: At_5mM_NaNP_cDNA_P Parameter: Timepoint (hr) Value: 6
  misc_feature: MA Experiment 108585 PARAMETER Experiment Name: At_5mM_NaNP_cDNA_P Parameter: Tissue Value: Aerial
  misc_feature: MA Experiment 108585 PARAMETER Experiment Name: At_5mM_NaNP_cDNA_P Parameter: Treatment Value: null
  misc_feature: MA Experiment ID: 108605 Result: Down-regulated in Transcription
  misc_feature: MA Experiment 108605 PARAMETER Experiment Name: At_100uM_ABA_cDNA_P Parameter: Timepoint (hr) Value: 6
  misc_feature: MA Experiment 108605 PARAMETER Experiment Name: At_100uM_ABA_cDNA_P Parameter: Tissue Value: Aerial
  misc_feature: MA Experiment 108605 PARAMETER Experiment Name: At_100uM_ABA_cDNA_P Parameter: Treatment Value: 100uM ABA vs. No Treatment
  misc_feature: MA Experiment ID: 108607 Result: Down-regulated in Transcription
  misc_feature: MA Experiment 108607 PARAMETER Experiment Name: At_100uM_ABA_cDNA_P Parameter: Timepoint (hr) Value: 4
  misc_feature: MA Experiment 108607 PARAMETER Experiment Name: At_100uM_ABA_cDNA_P Parameter: Tissue Value: Aerial
  misc_feature: MA Experiment 108607 PARAMETER Experiment Name: At_100uM_ABA_cDNA_P Parameter: Treatment Value: 100uM ABA vs. No Treatment
  misc_feature: MA Experiment ID: 108608 Result: Down-regulated in Transcription
  misc_feature: MA Experiment 108608 PARAMETER Experiment Name: At_100uM_ABA_cDNA_P Parameter: Timepoint (hr) Value: 1
  misc_feature: MA Experiment 108608 PARAMETER Experiment Name: At_100uM_ABA_cDNA_P Parameter: Tissue Value: Aerial
  misc_feature: MA Experiment 108608 PARAMETER Experiment Name: At_100uM_ABA_cDNA_P Parameter: Treatment Value: 100uM ABA vs. No Treatment
  misc_feature: MA Experiment ID: 108609 Result: Down-regulated in Transcription
  misc_feature: MA Experiment 108609 PARAMETER Experiment Name: At_100uM_ABA_cDNA_P Parameter: Timepoint (hr) Value: 24
  misc_feature: MA Experiment 108609 PARAMETER Experiment Name: At_100uM_ABA_cDNA_P Parameter: Tissue Value: Aerial
  misc_feature: MA Experiment 108609 PARAMETER Experiment Name: At_100uM_ABA_cDNA_P Parameter: Treatment Value: 100uM ABA vs. No Treatment
  misc_feature: MA Experiment ID: 20000069 Result: Down-regulated in Transcription
  misc_feature: MA Experiment 20000069 PARAMETER Experiment Name: At_100uM_ABA_Mutants_cDNA_P Parameter: Plant Line Value: CS23
  misc_feature: MA Experiment 20000069 PARAMETER Experiment Name: At_100uM_ABA_Mutants_cDNA_P Parameter: Timepoint (hr) Value: 6
  misc_feature: MA Experiment 20000069 PARAMETER Experiment Name: At_100uM_ABA_Mutants_cDNA_P Parameter: Tissue Value: Aerial
  misc_feature: MA Experiment 20000069 PARAMETER Experiment Name: At_100uM_ABA_Mutants_cDNA_P Parameter: Treatment Value: 100uM ABA vs. No Treatment
  misc_feature: MA Experiment ID: 20000070 Result: Down-regulated in Transcription
  misc_feature: MA Experiment 20000070 PARAMETER Experiment Name: At_100uM_ABA_Mutants_cDNA_P Parameter: Plant Line Value: CS24
  misc_feature: MA Experiment 20000070 PARAMETER Experiment Name: At_100uM_ABA_Mutants_cDNA_P Parameter: Timepoint (hr) Value: 6
  misc_feature: MA Experiment 20000070 PARAMETER Experiment Name: At_100uM_ABA_Mutants_cDNA_P Parameter: Tissue Value: Aerial
  misc_feature: MA Experiment 20000070 PARAMETER Experiment Name: At_100uM_ABA_Mutants_cDNA_P Parameter: Treatment Value: 100uM ABA vs. No Treatment
  misc_feature: MA Experiment ID: 20000086 Result: Down-regulated in Transcription
  misc_feature: MA Experiment 20000086 PARAMETER Experiment Name: At_100uM_ABA_Mutants_cDNA_P Parameter: Plant Line Value: CS22
  misc_feature: MA Experiment 20000086 PARAMETER Experiment Name: At_100uM_ABA_Mutants_cDNA_P Parameter: Timepoint (hr) Value: 6
  misc_feature: MA Experiment 20000086 PARAMETER Experiment Name: At_100uM_ABA_Mutants_cDNA_P Parameter: Tissue Value: Aerial
  misc_feature: MA Experiment 20000086 PARAMETER Experiment Name: At_100uM_ABA_Mutants_cDNA_P Parameter: Treatment Value: 100uM ABA vs. No Treatment
  misc_feature: MA Experiment ID: 20000087 Result: Down-regulated in Transcription
  misc_feature: MA Experiment 20000087 PARAMETER Experiment Name: At_100uM_ABA_Mutants_cDNA_P Parameter: Plant Line Value: WS
  misc_feature: MA Experiment 20000087 PARAMETER Experiment Name: At_100uM_ABA_Mutants_cDNA_P Parameter: Timepoint (hr) Value: 6
  misc_feature: MA Experiment 20000087 PARAMETER Experiment Name: At_100uM_ABA_Mutants_cDNA_P Parameter: Tissue Value: Aerial
  misc_feature: MA Experiment 20000087 PARAMETER Experiment Name: At_100uM_ABA_Mutants_cDNA_P Parameter: Treatment Value: 100uM ABA vs. No Treatment
  misc_feature: MA Experiment ID: 20000088 Result: Down-regulated in Transcription
  misc_feature: MA Experiment 20000088 PARAMETER Experiment Name: At_100uM_ABA_Mutants_cDNA_P Parameter: Plant Line Value: Landsberg
  misc_feature: MA Experiment 20000088 PARAMETER Experiment Name: At_100uM_ABA_Mutants_cDNA_P Parameter: Timepoint (hr) Value: 6
  misc_feature: MA Experiment 20000088 PARAMETER Experiment Name: At_100uM_ABA_Mutants_cDNA_P Parameter: Tissue Value: Aerial
  misc_feature: MA Experiment 20000088 PARAMETER Experiment Name: At_100uM_ABA_Mutants_cDNA_P Parameter: Treatment Value: 100uM ABA vs. No Treatment
  misc_feature: MA Experiment ID: 20000111 Result: Down-regulated in Transcription
  misc_feature: MA Experiment 20000111 PARAMETER Experiment Name: At_42deg_Heat_cDNA_P Parameter: Temperature (deg C) Value: 42 vs. 22
  misc_feature: MA Experiment 20000111 PARAMETER Experiment Name: At_42deg_Heat_cDNA_P Parameter: Timepoint (hr) Value: 6
  misc_feature: MA Experiment 20000111 PARAMETER Experiment Name: At_42deg_Heat_cDNA_P Parameter: Tissue Value: Aerial
  misc_feature: MA Experiment ID: 20000112 Result: Down-regulated in Transcription
  misc_feature: MA Experiment 20000112 PARAMETER Experiment Name: At_42deg_Heat_cDNA_P Parameter: Temperature (deg C) Value: 42 vs. 22
  misc_feature: MA Experiment 20000112 PARAMETER Experiment Name: At_42deg_Heat_cDNA_P Parameter: Timepoint (hr) Value: 2
  misc_feature: MA Experiment 20000112 PARAMETER Experiment Name: At_42deg_Heat_cDNA_P Parameter: Tissue Value: Aerial
  misc_feature: MA Experiment ID: 20000113 Result: Down-regulated in Transcription
  misc_feature: MA Experiment 20000113 PARAMETER Experiment Name: At_42deg_Heat_cDNA_P Parameter: Temperature (deg C) Value: 42 vs. 22
  misc_feature: MA Experiment 20000113 PARAMETER Experiment Name: At_42deg_Heat_cDNA_P Parameter: Timepoint (hr) Value: 8
  misc_feature: MA Experiment 20000113 PARAMETER Experiment Name: At_42deg_Heat_cDNA_P Parameter: Tissue Value: Aerial
  misc_feature: MA Experiment ID: 20000117 Result: Down-regulated in Transcription
  misc_feature: MA Experiment 20000117 PARAMETER Experiment Name: At_100uM_ABA_Mutants_cDNA_P Parameter: Plant Line Value: Columbia
  misc_feature: MA Experiment 20000117 PARAMETER Experiment Name: At_100uM_ABA_Mutants_cDNA_P Parameter: Timepoint (hr) Value: 6
  misc_feature: MA Experiment 20000117 PARAMETER Experiment Name: At_100uM_ABA_Mutants_cDNA_P Parameter: Tissue Value: Aerial
  misc_feature: MA Experiment 20000117 PARAMETER Experiment Name: At_100uM_ABA_Mutants_cDNA_P Parameter: Treatment Value: 100uM ABA vs. No Treatment
  misc_feature: MA Experiment ID: 20000182 Result: Down-regulated in Transcription
  misc_feature: MA Experiment 20000182 PARAMETER Experiment Name: At_2mM_SA_P Parameter: Age (day) Value: 14
  misc_feature: MA Experiment 20000182 PARAMETER Experiment Name: At_2mM_SA_P Parameter: Organism Value: A. thaliana
  misc_feature: MA Experiment 20000182 PARAMETER Experiment Name: At_2mM_SA_P Parameter: Plant Line Value: WS
  misc_feature: MA Experiment 20000182 PARAMETER Experiment Name: At_2mM_SA_P Parameter: Timepoint (hr) Value: 6
  misc_feature: MA Experiment 20000182 PARAMETER Experiment Name: At_2mM_SA_P Parameter: Tissue Value: Aerial
  misc_feature: MA Experiment 20000182 PARAMETER Experiment Name: At_2mM_SA_P Parameter: Treatment Value: 2mM SA vs. No Treatment
  misc_feature: MA Experiment ID: 20000224 Result: Up-regulated in Transcription
  misc_feature: MA Experiment ID: 20000436 Result: Down-regulated in Transcription
  misc_feature: MA Experiment 20000436 PARAMETER Experiment Name: At_Drought_P Parameter: Age (day) Value: 7
  misc_feature: MA Experiment 20000436 PARAMETER Experiment Name: At_Drought_P Parameter: Organism Value: A. thaliana
  misc_feature: MA Experiment 20000436 PARAMETER Experiment Name: At_Drought_P Parameter: Plant Line Value: WS
  misc_feature: MA Experiment 20000436 PARAMETER Experiment Name: At_Drought_P Parameter: Timepoint (hr) Value: 12
  misc_feature: MA Experiment 20000436 PARAMETER Experiment Name: At_Drought_P Parameter: Tissue Value: Whole Plant
  misc_feature: MA Experiment 20000436 PARAMETER Experiment Name: At_Drought_P Parameter: Treatment Value: Drought vs. No Drought
  misc_feature: MA Experiment ID: 20000453 Result: Down-regulated in Transcription
  misc_feature: MA Experiment 20000453 PARAMETER Experiment Name: At_100uM_ABA_P Parameter: Age (day) Value: 15
  misc_feature: MA Experiment 20000453 PARAMETER Experiment Name: At_100uM_ABA_P Parameter: Organism Value: A. thaliana
  misc_feature: MA Experiment 20000453 PARAMETER Experiment Name: At_100uM_ABA_P Parameter: Plant Line Value: WS
  misc_feature: MA Experiment 20000453 PARAMETER Experiment Name: At_100uM_ABA_P Parameter: Timepoint (hr) Value: 24
  misc_feature: MA Experiment 20000453 PARAMETER Experiment Name: At_100uM_ABA_P Parameter: Tissue Value: Aerial
  misc_feature: MA Experiment 20000453 PARAMETER Experiment Name: At_100uM_ABA_P Parameter: Treatment Value: 100uM ABA vs. No Treatment
  misc_feature: MA Experiment ID: 20001248 Result: Down-regulated in Transcription
  misc_feature: MA Experiment 20001248 PARAMETER Experiment Name: At_Far-red-induction_P Parameter: Age (day) Value: 7
  misc_feature: MA Experiment 20001248 PARAMETER Experiment Name: At_Far-red-induction_P Parameter: Light Value: Far-red vs. White
  misc_feature: MA Experiment 20001248 PARAMETER Experiment Name: At_Far-red-induction_P Parameter: Organism Value: A. thaliana
  misc_feature: MA Experiment 20001248 PARAMETER Experiment Name: At_Far-red-induction_P Parameter: Plant Line Value: Columbia
  misc_feature: MA Experiment 20001248 PARAMETER Experiment Name: At_Far-red-induction_P Parameter: Timepoint (hr) Value: 4
  misc_feature: MA Experiment 20001248 PARAMETER Experiment Name: At_Far-red-induction_P Parameter: Tissue Value: Whole Plant
  misc_feature: MA Experiment ID: 20001450 Result: Down-regulated in Transcription
  misc_feature: MA Experiment 20001450 PARAMETER Experiment Name: At_Far-red-induction_P Parameter: Age (day) Value: 7
  misc_feature: MA Experiment 20001450 PARAMETER Experiment Name: At_Far-red-induction_P Parameter: Light Value: Far-red vs. White
  misc_feature: MA Experiment 20001450 PARAMETER Experiment Name: At_Far-red-induction_P Parameter: Organism Value: A. thaliana
  misc_feature: MA Experiment 20001450 PARAMETER Experiment Name: At_Far-red-induction_P Parameter: Plant Line Value: Columbia
  misc_feature: MA Experiment 20001450 PARAMETER Experiment Name: At_Far-red-induction_P Parameter: Timepoint (hr) Value: 8
  misc_feature: MA Experiment 20001450 PARAMETER Experiment Name: At_Far-red-induction_P Parameter: Tissue Value: Whole Plant
  misc_feature: MA Experiment ID: 20001554 Result: Down-regulated in Transcription
  misc_feature: MA Experiment 20001554 PARAMETER Experiment Name: At_Drought_Soil_Dry_P Parameter: Age (day) Value: 21
  misc_feature: MA Experiment 20001554 PARAMETER Experiment Name: At_Drought_Soil_Dry_P Parameter: Organism Value: A. thaliana
  misc_feature: MA Experiment 20001554 PARAMETER Experiment Name: At_Drought_Soil_Dry_P Parameter: Plant Line Value: WS
  misc_feature: MA Experiment 20001554 PARAMETER Experiment Name: At_Drought_Soil_Dry_P Parameter: Post Timepoint (hr) Value: None
  misc_feature: MA Experiment 20001554 PARAMETER Experiment Name: At_Drought_Soil_Dry_P Parameter: Post-Treatment Value: None
  misc_feature: MA Experiment 20001554 PARAMETER Experiment Name: At_Drought_Soil_Dry_P Parameter: Timepoint (day) Value: 7
  misc_feature: MA Experiment 20001554 PARAMETER Experiment Name: At_Drought_Soil_Dry_P Parameter: Treatment Value: Drought vs. No Drought
  misc_feature: MA Experiment ID: 20001555 Result: Down-regulated in Transcription
  misc_feature: MA Experiment 20001555 PARAMETER Experiment Name: At_Drought_Soil_Dry_P Parameter: Age (day) Value: 24
  misc_feature: MA Experiment 20001555 PARAMETER Experiment Name: At_Drought_Soil_Dry_P Parameter: Organism Value: A. thaliana
  misc_feature: MA Experiment 20001555 PARAMETER Experiment Name: At_Drought_Soil_Dry_P Parameter: Plant Line Value: WS
  misc_feature: MA Experiment 20001555 PARAMETER Experiment Name: At_Drought_Soil_Dry_P Parameter: Post Timepoint (hr) Value: None
  misc_feature: MA Experiment 20001555 PARAMETER Experiment Name: At_Drought_Soil_Dry_P Parameter: Post-Treatment Value: None
  misc_feature: MA Experiment 20001555 PARAMETER Experiment Name: At_Drought_Soil_Dry_P Parameter: Timepoint (day) Value: 10
  misc_feature: MA Experiment 20001555 PARAMETER Experiment Name: At_Drought_Soil_Dry_P Parameter: Treatment Value: Drought vs. No Drought
  misc_feature: MA Experiment ID: 20001557 Result: Up-regulated in Transcription
  misc_feature: MA Experiment 20001557 PARAMETER Experiment Name: At_Drought_Soil_Dry_P Parameter: Age (day) Value: 27
  misc_feature: MA Experiment 20001557 PARAMETER Experiment Name: At_Drought_Soil_Dry_P Parameter: Organism Value: A. thaliana
  misc_feature: MA Experiment 20001557 PARAMETER Experiment Name: At_Drought_Soil_Dry_P Parameter: Plant Line Value: WS
  misc_feature: MA Experiment 20001557 PARAMETER Experiment Name: At_Drought_Soil_Dry_P Parameter: Post Timepoint (hr) Value: 3
  misc_feature: MA Experiment 20001557 PARAMETER Experiment Name: At_Drought_Soil_Dry_P Parameter: Post-Treatment Value: Re-Water vs. No Drought
  misc_feature: MA Experiment 20001557 PARAMETER Experiment Name: At_Drought_Soil_Dry_P Parameter: Timepoint (day) Value: 13
  misc_feature: MA Experiment 20001557 PARAMETER Experiment Name: At_Drought_Soil_Dry_P Parameter: Treatment Value: Drought vs. No Drought
  misc_feature: MA Experiment ID: 20001558 Result: Up-regulated in Transcription
  misc_feature: MA Experiment 20001558 PARAMETER Experiment Name: At_Drought_Soil_Dry_P Parameter: Age (day) Value: 27
  misc_feature: MA Experiment 20001558 PARAMETER Experiment Name: At_Drought_Soil_Dry_P Parameter: Organism Value: A. thaliana
  misc_feature: MA Experiment 20001558 PARAMETER Experiment Name: At_Drought_Soil_Dry_P Parameter: Plant Line Value: WS
  misc_feature: MA Experiment 20001558 PARAMETER Experiment Name: At_Drought_Soil_Dry_P Parameter: Post Timepoint (hr) Value: 6
  misc_feature: MA Experiment 20001558 PARAMETER Experiment Name: At_Drought_Soil_Dry_P Parameter: Post-Treatment Value: Re-Water vs. No Drought
  misc_feature: MA Experiment 20001558 PARAMETER Experiment Name: At_Drought_Soil_Dry_P Parameter: Timepoint (day) Value: 13
  misc_feature: MA Experiment 20001558 PARAMETER Experiment Name: At_Drought_Soil_Dry_P Parameter: Treatment Value: Drought vs. No Drought
  misc_feature: MA Experiment ID: 20001560 Result: Up-regulated in Transcription
  misc_feature: MA Experiment 20001560 PARAMETER Experiment Name: At_Drought_Soil_Dry_P Parameter: Age (day) Value: 28
  misc_feature: MA Experiment 20001560 PARAMETER Experiment Name: At_Drought_Soil_Dry_P Parameter: Organism Value: A. thaliana
  misc_feature: MA Experiment 20001560 PARAMETER Experiment Name: At_Drought_Soil_Dry_P Parameter: Plant Line Value: WS
  misc_feature: MA Experiment 20001560 PARAMETER Experiment Name: At_Drought_Soil_Dry_P Parameter: Post Timepoint (hr) Value: None
  misc_feature: MA Experiment 20001560 PARAMETER Experiment Name: At_Drought_Soil_Dry_P Parameter: Post-Treatment Value: None
  misc_feature: MA Experiment 20001560 PARAMETER Experiment Name: At_Drought_Soil_Dry_P Parameter: Timepoint (day) Value: 14
  misc_feature: MA Experiment 20001560 PARAMETER Experiment Name: At_Drought_Soil_Dry_P Parameter: Treatment Value: Drought vs. No Drought
  misc_feature: MA Experiment ID: 20001911 Result: Down-regulated in Transcription
  misc_feature: MA Experiment 20001911 PARAMETER Experiment Name: At_Drought_Reproduction_P Parameter: Age (day) Value: 40
  misc_feature: MA Experiment 20001911 PARAMETER Experiment Name: At_Drought_Reproduction_P Parameter: Organism Value: A. thaliana
  misc_feature: MA Experiment 20001911 PARAMETER Experiment Name: At_Drought_Reproduction_P Parameter: Plant Line Value: WS
  misc_feature: MA Experiment 20001911 PARAMETER Experiment Name: At_Drought_Reproduction_P Parameter: Timepoint (day) Value: 10
  misc_feature: MA Experiment 20001911 PARAMETER Experiment Name: At_Drought_Reproduction_P Parameter: Tissue Value: Flowers
  misc_feature: MA Experiment 20001911 PARAMETER Experiment Name: At_Drought_Reproduction_P Parameter: Treatment Value: Drought vs. No Drought
caaaattcccacaaaaatctttcctccaataacataacaaaacaactcttcttctacaacaaactatgttctgattttttagtttcttcttccacacaatacaaaagaaatggggttttattcactgaagcagcttttgttactttacatcatcatcatggctctgttctcagatctcaagctagcaaaatcttcttcaccagagtacacgaacctaatctacaaaggttgtgcaagacagagattatcagatccatctggtttatactcacaagctctctctgcaatgtatggcttattggttactcaatcaacgaaaacaagattctacaaaaccacaactggaacaacaagccaaacaagcgtcactggtcttttccagtgtagaggagatttaagtaacaacgactgttacaactgtgttagtcgtcttcctgttctctctggtaagctctgtggcaaaaccattgctgctagagttcagctctccggctgttatcttctctatgaaatctctggctttgcccaaatttcaggaatggagttgttattcaagacatgtgggaagaacaacgtcgccgggacaggattcgaacagagaagagacacagctttcggggtgatgcaaaacggcgtcgttcaaggtcacggcttctacgcaacgacatacgaatcggtttacgttttaggacaatgcgaaggcgatataggcgattcagattgtagcggttgcataaaaaacgcgttacagagagctcaagtcgaatgtggaagctcaatatctggtcagatatatcttcataagtgttttgtcggttatagtttctacccaaatggtgttcccaagagatcttctccttatcctagctctggctcttcgggttcttcttcttcttcatcttcttcaggaacaacaggcaaaacggtggcaataatagtaggaggaacagctggtgttggatttcttgtcatttgcttacttttcgtcaaaaacttgatgaagaagaaatatgacgattattgaaaataattaggatgaagacaacaaaatgagtcccaaccccgaaatggaggcaagcgttaatgtgaattccgaggtgcatgcaattaattgtgtcccgatttttatatttttcgaattgttagtttattgaatacagtatttttgagaggtggaaattgtggtgggatggatgaagaagagctgggaccattttaaaatgttagaagatggagaaagtactttcaatttatttttaaaaatgtaaatgaattatctcatttgaagttccttaagtact

SEQ ID NO: 99402 - protein, 304 aa, Arabidopsis thaliana
  peptide (1)..(304): Ceres Seq. ID no. 13602810
  misc_feature (86)..(140): Pfam Name: Domain of unknown function DUF26 Pfam Description: Domain of unknown function DUF26
  misc_feature (1)..(304): Homolog of NCBI NO: 18403243 NR Description: expressed protein [Arabidopsis thaliana] Unknown protein [Arabidopsis thaliana] unknown protein [Arabidopsis thaliana]
  misc_feature (1)..(267): Homolog of NCBI NO: 25408259 NR Description: hypothetical protein At2g33330 [imported] -
  misc_feature (12)..(304): Homolog of NCBI NO: 38566686 NR Description: At1g04520 [Arabidopsis thaliana]
  misc_feature (12)..(269): Homolog of NCBI NO: 15219740 NR Description: hypothetical protein [Arabidopsis thaliana]
  misc_feature (26)..(304): Homolog of NCBI NO: 30694417 NR Description: expressed protein [Arabidopsis thaliana]
  misc_feature (26)..(291): Homolog of NCBI NO: 26451089 NR Description: unknown protein [Arabidopsis thaliana]
  misc_feature (26)..(245): Homolog of NCBI NO: 9758557 NR Description: gb|AAB80651.1~gene_id:MRH10.9~similar to unknown
  misc_feature (23)..(299): Homolog of NCBI NO: 15229281 NR Description: hypothetical protein [Arabidopsis thaliana]
  misc_feature (23)..(295): Homolog of NCBI NO: 6721149 NR Description: hypothetical protein, 3' partial [Arabidopsis
  misc_feature (6)..(299): Homolog of NCBI NO: 30693130 NR Description: expressed protein [Arabidopsis thaliana]
MGFYSLKQLLLLYIIIMALFSDLKLAKSSSPEYTNLIYKGCARQRLSDPSGLYSQALSAMYGLLVTQSTKTRFYKTTTGTTSQTSVTGLFQCRGDLSNNDCYNCVSRLPVLSGKLCGKTIAARVQLSGCYLLYEISGFAQISGMELLFKTCGKNNVAGTGFEQRRDTAFGVMQNGVVQGHGFYATTYESVYVLGQCEGDIGDSDCSGCIKNALQRAQVECGSSISGQIYLHKCFVGYSFYPNGVPKRSSPYPSSGSSGSSSSSSSSGTTGKTVAIIVGGTAGVGFLVICLLFVKNLMKKKYDDY

SEQ ID NO: 99403 - protein, 288 aa, Arabidopsis thaliana
  peptide (1)..(288): Ceres Seq. ID no. 13602811
  misc_feature (70)..(124): Pfam Name: Domain of unknown function DUF26 Pfam Description: Domain of unknown function DUF26
  misc_feature (1)..(288): Homolog of NCBI NO: 18403243 NR Description: expressed protein [Arabidopsis thaliana] Unknown protein [Arabidopsis thaliana] unknown protein [Arabidopsis thaliana]
  misc_feature (1)..(251): Homolog of NCBI NO: 25408259 NR Description: hypothetical protein At2g33330 [imported] -
  misc_feature (1)..(288): Homolog of NCBI NO: 38566686 NR Description: At1g04520 [Arabidopsis thaliana]
  misc_feature (1)..(253): Homolog of NCBI NO: 15219740 NR Description: hypothetical protein [Arabidopsis thaliana]
  misc_feature (10)..(288): Homolog of NCBI NO: 30694417 NR Description: expressed protein [Arabidopsis thaliana]
  misc_feature (10)..(275): Homolog of NCBI NO: 26451089 NR Description: unknown protein [Arabidopsis thaliana]
  misc_feature (10)..(229): Homolog of NCBI NO: 9758557 NR Description: gb|AAB80651.1~gene_id:MRH10.9~similar to unknown
  misc_feature (7)..(283): Homolog of NCBI NO: 15229281 NR Description: hypothetical protein [Arabidopsis thaliana]
  misc_feature (7)..(279): Homolog of NCBI NO: 6721149 NR Description: hypothetical protein, 3' partial [Arabidopsis
  misc_feature (1)..(283): Homolog of NCBI NO: 30693130 NR Description: expressed protein [Arabidopsis thaliana]
MALFSDLKLAKSSSPEYTNLIYKGCARQRLSDPSGLYSQALSAMYGLLVTQSTKTRFYKTTTGTTSQTSVTGLFQCRGDLSNNDCYNCVSRLPVLSGKLCGKTIAARVQLSGCYLLYEISGFAQISGMELLFKTCGKNNVAGTGFEQRRDTAFGVMQNGVVQGHGFYATTYESVYVLGQCEGDIGDSDCSGCIKNALQRAQVECGSSISGQIYLHKCFVGYSFYPNGVPKRSSPYPSSGSSGSSSSSSSSGTTGKTVAIIVGGTAGVGFLVICLLFVKNLMKKKYDDY

SEQ ID NO: 99404 - protein, 245 aa, Arabidopsis thaliana; identical to SEQ ID NO: 23055
  peptide (1)..(245): Ceres Seq. ID no. 13602812
  misc_feature (27)..(81): Pfam Name: Domain of unknown function DUF26 Pfam Description: Domain of unknown function DUF26
  misc_feature (1)..(245): Homolog of NCBI NO: 18403243 NR Description: expressed protein [Arabidopsis thaliana] Unknown protein [Arabidopsis thaliana] unknown protein [Arabidopsis thaliana]
  misc_feature (1)..(208): Homolog of NCBI NO: 25408259 NR Description: hypothetical protein At2g33330 [imported] -
  misc_feature (1)..(245): Homolog of NCBI NO: 38566686 NR Description: At1g04520 [Arabidopsis thaliana]
  misc_feature (1)..(210): Homolog of NCBI NO: 15219740 NR Description: hypothetical protein [Arabidopsis thaliana]
  misc_feature (1)..(245): Homolog of NCBI NO: 30694417 NR Description: expressed protein [Arabidopsis thaliana]
  misc_feature (1)..(232): Homolog of NCBI NO: 26451089 NR Description: unknown protein [Arabidopsis thaliana]
  misc_feature (1)..(186): Homolog of NCBI NO: 9758557 NR Description: gb|AAB80651.1~gene_id:MRH10.9~similar to unknown
  misc_feature (1)..(240): Homolog of NCBI NO: 15229281 NR Description: hypothetical protein [Arabidopsis thaliana]
  misc_feature (1)..(236): Homolog of NCBI NO: 6721149 NR Description: hypothetical protein, 3' partial [Arabidopsis
  misc_feature (1)..(240): Homolog of NCBI NO: 30693130 NR Description: expressed protein [Arabidopsis thaliana]

SEQ ID NO: 99405 - DNA, 1555 bp, Arabidopsis thaliana
  misc_feature (1)..(1555): Ceres Seq. ID no. 13602813
  misc_feature: MA Experiment ID: 108595 Result: Up-regulated in Transcription
  misc_feature: MA Experiment 108595 PARAMETER Experiment Name: At_Ler-pi_Ovule_cDNA_P Parameter: Plant Line Value: null
  misc_feature: MA Experiment ID: 20000112 Result: Down-regulated in Transcription
  misc_feature: MA Experiment 20000112 PARAMETER Experiment Name: At_42deg_Heat_cDNA_P Parameter: Temperature (deg C) Value: 42 vs. 22
  misc_feature: MA Experiment 20000112 PARAMETER Experiment Name: At_42deg_Heat_cDNA_P Parameter: Timepoint (hr) Value: 2
  misc_feature: MA Experiment 20000112 PARAMETER Experiment Name: At_42deg_Heat_cDNA_P Parameter: Tissue Value: Aerial
  misc_feature: MA Experiment ID: 20000185 Result: Down-regulated in Transcription
  misc_feature: MA Experiment 20000185 PARAMETER Experiment Name: At_Roots__P Parameter: Age (day) Value: 7 vs. 21
  misc_feature: MA Experiment 20000185 PARAMETER Experiment Name: At_Roots__P Parameter: Organism Value: A. thaliana
  misc_feature: MA Experiment 20000185 PARAMETER Experiment Name: At_Roots__P Parameter: Tissue Value: Roots vs. Whole Plant
  misc_feature: MA Experiment ID: 20000234 Result: Up-regulated in Transcription
  misc_feature: MA Experiment 20000234 PARAMETER Experiment Name: At_Siliques_P Parameter: Age (day) Value: 21
  misc_feature: MA Experiment 20000234 PARAMETER Experiment Name: At_Siliques_P Parameter: Organism Value: A. thaliana
  misc_feature: MA Experiment 20000234 PARAMETER Experiment Name: At_Siliques_P Parameter: Plant Line Value: WS
  misc_feature: MA Experiment 20000234 PARAMETER Experiment Name: At_Siliques_P Parameter: Tissue Value: Less Than 5mm Siliques vs. Whole Plant
  misc_feature: MA Experiment ID: 20001451 Result: Up-regulated in Transcription
  misc_feature: MA Experiment 20001451 PARAMETER Experiment Name: At_Far-red-induction_P Parameter: Age (day) Value: 7
  misc_feature: MA Experiment 20001451 PARAMETER Experiment Name: At_Far-red-induction_P Parameter: Light Value: Far-red vs. White
  misc_feature: MA Experiment 20001451 PARAMETER Experiment Name: At_Far-red-induction_P Parameter: Organism Value: A. thaliana
  misc_feature: MA Experiment 20001451 PARAMETER Experiment Name: At_Far-red-induction_P Parameter: Plant Line Value: Columbia
  misc_feature: MA Experiment 20001451 PARAMETER Experiment Name: At_Far-red-induction_P Parameter: Timepoint (hr) Value: 24
  misc_feature: MA Experiment 20001451 PARAMETER Experiment Name: At_Far-red-induction_P Parameter: Tissue Value: Whole Plant
agatattttcaattaatgacatcttcttcttctcctttcactgcaaaaccgaaagcttgagactttgagattatgtctatgtcatcttcttcttcttccatcgatcacttcatcacctttcgtcatcttgatcttattctccactgtataaaatcagcgagattttaagggattgtgaaggtaccatcttaaacacaaaatgggtacttctactacagagagtgtggtggcgtgtgaattttgcggcgagagaacggcggttctgttttgtagagccgatacggcgaagctttgtttgccttgtgaccagcacgtgcactcggcgaaccttctctcgaggaagcatgttcgttctcagatctgtgataactgtagcaaagagccggtgtccgtacgttgcttcacagataatctcgtattgtgtcaggagtgtgattgggatgttcacggaagctgttcctcctccgcgacgcatgaacgctccgccgtggaagggttttcaggttgtccttcggttttggagcttgctgctgtgtggggaatcgatttaaagggtaagaagaaagaagatgacgaagacgaattgactaagaattttgggatggggttggattcgtggggttctggatctaacatcgttcaagaactgattgttccttatgatgtgtcttgcaaaaagcaaagctttagctttgggaggtctaagcaggtagtgtttgaacagcttgagttactgaagagaggcttcgttgaaggcgaaggagagattatggttccggagggaatcaatggcggaggaagcatttctcagccatctccgacgacgtcgtttacttctttgcttatgtctcaaagtctttgtggtaatggtatgcaatggaatgctactaatcatagcactggccagaacactcagatatgggattttaacttgggacagtcgaggaaccctgatgaacctagtccagtcgaaactaaaggctctactttcacattcaacaacgttactcatctcaagaacgatacccgaaccaccaatatgaatgctttcaaagagagttaccaggaggattccgtccactcaacttctaccaagggacaggaaacatctaagagcaacaatattcctgctgccattcactcgcataaaagttctaacgactcctgtggcttgcattgcacggaacatattgctattactagtaatagagccacaagattggtggcggtaacgaatgctgatctagagcagatggcacagaacagagataatgctatgcagcggtacaaggaaaagaagaaaacgcggagatatgataagaccataagatatgaaacgaggaaggcgagagccgagaccaggttgcgtgttaagggcagatttgtgaaagctacagatccttagatgtctctccacgttaggttttacatttgagatcctaagttaggaactttttttgttttttctactttcaactaccttgtaaatgtaaatgatcgatcttcagctgcataatgtgtggccagatttttgtaatttttacgtttaaccttc

SEQ ID NO: 99406 - protein, 401 aa, Arabidopsis thaliana
  peptide (1)..(401): Ceres Seq. ID no. 13602814
  misc_feature (7)..(54): Pfam Name: B-box zinc finger Pfam Description: B-box zinc finger
  misc_feature (1)..(401): Homolog of NCBI NO: 30685731 NR Description: CONSTANS B-box zinc finger family protein
  misc_feature (1)..(371): Homolog of NCBI NO: 17432968 NR Description: Zinc finger protein constans-like 9
  misc_feature (4)..(189): Homolog of NCBI NO: 15217814 NR Description: CONSTANS B-box zinc finger family protein
  misc_feature (222)..(400): Homolog of NCBI NO: 15217814 NR Description: CONSTANS B-box zinc finger family protein
  misc_feature (216)..(401): Homolog of NCBI NO: 22135884 NR Description: putative CONSTANS-like B-box zinc finger protein thaliana] >gi|30102924|gb|AAP21380.1| At2g33500 [Arabidopsis
  misc_feature (12)..(155): Homolog of NCBI NO: 38175538 NR Description: zinc-finger protein C60910-like [Oryza sativa
  misc_feature (268)..(398): Homolog of NCBI NO: 38175538 NR Description: zinc-finger protein C60910-like [Oryza sativa
  misc_feature (189)..(258): Homolog of NCBI NO: 38175538 NR Description: zinc-finger protein C60910-like [Oryza sativa
  misc_feature (12)..(117): Homolog of NCBI NO: 7489605 NR Description: zinc-finger protein S3574 [imported] - rice
  misc_feature (355)..(398): Homolog of NCBI NO: 7489605 NR Description: zinc-finger protein S3574 [imported] - rice
MGTSTTESVVACEFCGERTAVLFCRADTAKLCLPCDQHVHSANLLSRKHVRSQICDNCSKEPVSVRCFTDNLVLCQECDWDVHGSCSSSATHERSAVEGFSGCPSVLELAAVWGIDLKGKKKEDDEDELTKNFGMGLDSWGSGSNIVQELIVPYDVSCKKQSFSFGRSKQVVFEQLELLKRGFVEGEGEIMVPEGINGGGSISQPSPTTSFTSLLMSQSLCGNGMQWNATNHSTGQNTQIWDFNLGQSRNPDEPSPVETKGSTFTFNNVTHLKNDTRTTNMNAFKESYQEDSVHSTSTKGQETSKSNNIPAAIHSHKSSNDSCGLHCTEHIAITSNRATRLVAVTNADLEQMAQNRDNAMQRYKEKKKTRRYDKTIRYETRKARAETRLRVKGRFVKATDP

SEQ ID NO: 99407 - protein, 267 aa, Arabidopsis thaliana
  peptide (1)..(267): Ceres Seq. ID no. 13602815
  misc_feature (227)..(266): Pfam Name: CCT motif Pfam Description: CCT motif
  misc_feature (1)..(267): Homolog of NCBI NO: 30685731 NR Description: CONSTANS B-box zinc finger family protein
  misc_feature (1)..(237): Homolog of NCBI NO: 17432968 NR Description: Zinc finger protein constans-like 9
  misc_feature (1)..(55): Homolog of NCBI NO: 15217814 NR Description: CONSTANS B-box zinc finger family protein
  misc_feature (88)..(266): Homolog of NCBI NO: 15217814 NR Description: CONSTANS B-box zinc finger family protein
  misc_feature (82)..(267): Homolog of NCBI NO: 22135884 NR Description: putative CONSTANS-like B-box zinc finger protein thaliana] >gi|30102924|gb|AAP21380.1| At2g33500 [Arabidopsis
  misc_feature (1)..(21): Homolog of NCBI NO: 38175538 NR Description: zinc-finger protein C60910-like [Oryza sativa
  misc_feature (134)..(264): Homolog of NCBI NO: 38175538 NR Description: zinc-finger protein C60910-like [Oryza sativa
  misc_feature (55)..(124): Homolog of NCBI NO: 38175538 NR Description: zinc-finger protein C60910-like [Oryza sativa
  misc_feature (221)..(264): Homolog of NCBI NO: 7489605 NR Description: zinc-finger protein S3574 [imported] - rice
  misc_feature (222)..(267): Homolog of NCBI NO: 15227152 NR Description: CONSTANS B-box zinc finger family protein
MGLDSWGSGSNIVQELIVPYDVSCKKQSFSFGRSKQVVFEQLELLKRGFVEGEGEIMVPEGINGGGSISQPSPTTSFTSLLMSQSLCGNGMQWNATNHSTGQNTQIWDFNLGQSRNPDEPSPVETKGSTFTFNNVTHLKNDTRTTNMNAFKESYQEDSVHSTSTKGQETSKSNNIPAAIHSHKSSNDSCGLHCTEHIAITSNRATRLVAVTNADLEQMAQNRDNAMQRYKEKKKTRRYDKTIRYETRKARAETRLRVKGRFVKATDP

SEQ ID NO: 99408 - protein, 211 aa, Arabidopsis thaliana
  peptide (1)..(211): Ceres Seq. ID no. 13602816
  misc_feature (171)..(210): Pfam Name: CCT motif Pfam Description: CCT motif
  misc_feature (1)..(211): Homolog of NCBI NO: 30685731 NR Description: CONSTANS B-box zinc finger family protein
  misc_feature (1)..(181): Homolog of NCBI NO: 17432968 NR Description: Zinc finger protein constans-like 9
  misc_feature (32)..(210): Homolog of NCBI NO: 15217814 NR Description: CONSTANS B-box zinc finger family protein
  misc_feature (26)..(211): Homolog of NCBI NO: 22135884 NR Description: putative CONSTANS-like B-box zinc finger protein thaliana] >gi|30102924|gb|AAP21380.1| At2g33500 [Arabidopsis
  misc_feature (78)..(208): Homolog of NCBI NO: 38175538 NR Description: zinc-finger protein C60910-like [Oryza sativa
  misc_feature (1)..(68): Homolog of NCBI NO: 38175538 NR Description: zinc-finger protein C60910-like [Oryza sativa
  misc_feature (165)..(208): Homolog of NCBI NO: 7489605 NR Description: zinc-finger protein S3574 [imported] - rice
  misc_feature (166)..(211): Homolog of NCBI NO: 15227152 NR Description: CONSTANS B-box zinc finger family protein
  misc_feature (163)..(208): Homolog of NCBI NO: 15238918 NR Description: CONSTANS B-box zinc finger family protein
  misc_feature (8)..(208): Homolog of NCBI NO: 15231491 NR Description: CONSTANS B-box zinc finger family protein
MVPEGINGGGSISQPSPTTSFTSLLMSQSLCGNGMQWNATNHSTGQNTQIWDFNLGQSRNPDEPSPVETKGSTFTFNNVTHLKNDTRTTNMNAFKESYQEDSVHSTSTKGQETSKSNNIPAAIHSHKSSNDSCGLHCTEHIAITSNRATRLVAVTNADLEQMAQNRDNAMQRYKEKKKTRRYDKTIRYETRKARAETRLRVKGRFVKATDP

SEQ ID NO: 99409 - DNA, 1475 bp, Arabidopsis thaliana
  misc_feature (1)..(1475): Ceres Seq. ID no. 13602817
  misc_feature: MA Experiment ID: 108434 Result: Up-regulated in Transcription
  misc_feature: MA Experiment 108434 PARAMETER Experiment Name: At_Root_Tips_cDNA_P Parameter: Tissue Value: Root Tips
  misc_feature: MA Experiment ID: 108435 Result: Up-regulated in Transcription
  misc_feature: MA Experiment 108435 PARAMETER Experiment Name: At_stm_Mutants_cDNA_P Parameter: Plant Line Value: wt Landsburg vs stm
  misc_feature: MA Experiment 108435 PARAMETER Experiment Name: At_stm_Mutants_cDNA_P Parameter: Tissue Value: Shoot Apical Meristem Region
  misc_feature: MA Experiment ID: 108461 Result: Up-regulated in Transcription
  misc_feature: MA Experiment 108461 PARAMETER Experiment Name: At_Germinating_Seeds_cDNA_P Parameter: Age (day) Value: 1 vs. 0
  misc_feature: MA Experiment 108461 PARAMETER Experiment Name: At_Germinating_Seeds_cDNA_P Parameter: Tissue Value: Germinating Seeds
  misc_feature: MA Experiment ID: 20000179 Result: Up-regulated in Transcription
  misc_feature: MA Experiment 20000179 PARAMETER Experiment Name: At_Germinating_Seeds_P Parameter: Age (hr) Value: 6 vs. 0
  misc_feature: MA Experiment 20000179 PARAMETER Experiment Name: At_Germinating_Seeds_P Parameter: Tissue Value: Germinating Seeds
  misc_feature: MA Experiment ID: 20000265 Result: Up-regulated in Transcription
  misc_feature: MA Experiment 20000265 PARAMETER Experiment Name: At_Open_Flower_P Parameter: Age (day) Value: 21
  misc_feature: MA Experiment 20000265 PARAMETER Experiment Name: At_Open_Flower_P Parameter: Plant Line Value: WS
  misc_feature: MA Experiment 20000265 PARAMETER Experiment Name: At_Open_Flower_P Parameter: Tissue Value: Closed Flower vs. Whole Plant
  misc_feature: MA Experiment ID: 20000286 Result: Up-regulated in Transcription
  misc_feature: MA Experiment 20000286 PARAMETER Experiment Name: At_Open_Flower_P Parameter: Age (day) Value: 21
  misc_feature: MA Experiment 20000286 PARAMETER Experiment Name: At_Open_Flower_P Parameter: Plant Line Value: WS
  misc_feature: MA Experiment 20000286 PARAMETER Experiment Name: At_Open_Flower_P Parameter: Tissue Value: Half Open vs. Whole Plant
  misc_feature: MA Experiment ID: 20000437 Result: Down-regulated in Transcription
  misc_feature: MA Experiment 20000437 PARAMETER Experiment Name: At_Drought_P Parameter: Age (day) Value: 8
  misc_feature: MA Experiment 20000437 PARAMETER Experiment Name: At_Drought_P Parameter: Organism Value: A. thaliana
  misc_feature: MA Experiment 20000437 PARAMETER Experiment Name: At_Drought_P Parameter: Plant Line Value: WS
  misc_feature: MA Experiment 20000437 PARAMETER Experiment Name: At_Drought_P Parameter: Timepoint (hr) Value: 24
  misc_feature: MA Experiment 20000437 PARAMETER Experiment Name: At_Drought_P Parameter: Tissue Value: Whole Plant
  misc_feature: MA Experiment 20000437 PARAMETER Experiment Name: At_Drought_P Parameter: Treatment Value: Drought vs. No Drought
  misc_feature: MA Experiment ID: 20000495 Result: Up-regulated in Transcription
  misc_feature: MA Experiment 20000495 PARAMETER Experiment Name: At_Guard_Cells_P Parameter: Harvest Date Value: 8/2/2002
  misc_feature: MA Experiment 20000495 PARAMETER Experiment Name: At_Guard_Cells_P Parameter: Organism Value: A. thaliana
  misc_feature: MA Experiment 20000495 PARAMETER Experiment Name: At_Guard_Cells_P Parameter: Tissue Value: Guard Cells vs. Leaves
  misc_feature: MA Experiment ID: 20001450 Result: Down-regulated in Transcription
  misc_feature: MA Experiment 20001450 PARAMETER Experiment Name: At_Far-red-induction_P Parameter: Age (day) Value: 7
  misc_feature: MA Experiment 20001450 PARAMETER Experiment Name: At_Far-red-induction_P Parameter: Light Value: Far-red vs. White
  misc_feature: MA Experiment 20001450 PARAMETER Experiment Name: At_Far-red-induction_P Parameter: Organism Value: A. thaliana
  misc_feature: MA Experiment 20001450 PARAMETER Experiment Name: At_Far-red-induction_P Parameter: Plant Line Value: Columbia
  misc_feature: MA Experiment 20001450 PARAMETER Experiment Name: At_Far-red-induction_P Parameter: Timepoint (hr) Value: 8
  misc_feature: MA Experiment 20001450 PARAMETER Experiment Name: At_Far-red-induction_P Parameter: Tissue Value: Whole Plant
  misc_feature: MA Experiment ID: 20001458 Result: Up-regulated in Transcription
  misc_feature: MA Experiment 20001458 PARAMETER Experiment Name: At_50mM_NH4NO3_L-to-H_P Parameter: Age (day) Value: Undefined
  misc_feature: MA Experiment 20001458 PARAMETER Experiment Name: At_50mM_NH4NO3_L-to-H_P Parameter: Organism Value: Undefined
  misc_feature: MA Experiment 20001458 PARAMETER Experiment Name: At_50mM_NH4NO3_L-to-H_P Parameter: Plant Line Value: Undefined
  misc_feature: MA Experiment 20001458 PARAMETER Experiment Name: At_50mM_NH4NO3_L-to-H_P Parameter: Timepoint (hr) Value: 2
  misc_feature: MA Experiment 20001458 PARAMETER Experiment Name: At_50mM_NH4NO3_L-to-H_P Parameter: Tissue Value: Siliques
  misc_feature: MA Experiment 20001458 PARAMETER Experiment Name: At_50mM_NH4NO3_L-to-H_P Parameter: Treatment Value: 50mM NH4NO3 vs. 100mM Manitol
  misc_feature: MA Experiment ID: 20001556 Result: Down-regulated in Transcription
  misc_feature: MA Experiment 20001556 PARAMETER Experiment Name: At_Drought_Soil_Dry_P Parameter: Age (day) Value: 26
  misc_feature: MA Experiment 20001556 PARAMETER Experiment Name: At_Drought_Soil_Dry_P Parameter: Organism Value: A. thaliana
  misc_feature: MA Experiment 20001556 PARAMETER Experiment Name: At_Drought_Soil_Dry_P Parameter: Plant Line Value: WS
  misc_feature: MA Experiment 20001556 PARAMETER Experiment Name: At_Drought_Soil_Dry_P Parameter: Post Timepoint (hr) Value: None
  misc_feature: MA Experiment 20001556 PARAMETER Experiment Name: At_Drought_Soil_Dry_P Parameter: Post-Treatment Value: None
  misc_feature: MA Experiment 20001556 PARAMETER Experiment Name: At_Drought_Soil_Dry_P Parameter: Timepoint (day) Value: 12
  misc_feature: MA Experiment 20001556 PARAMETER Experiment Name: At_Drought_Soil_Dry_P Parameter: Treatment Value: Drought vs. No Drought
aaaaagttgcgaagctctctcattgagtaaactaacggctatattctctctgatattcaaaatttgctcgaagaaacgacgatggcagccgaaacgaaggttcaggtttcagatccagaggcagagtttcttaattcgaagcaggagactggatacgagtgggagcttttcaaggagaacgtccggccattgaagagaggtcgcaatgttggtattctcaaccacgctctcaaatctcactctgaccaccaattgagaaagaatctcatcgagaaacgcaggaatttgattgaagccattgatgagtatgaaggagatgaccctttatctccatggatagagtgtataaaatgggtacaagaggcttttccaccaggaggagaatgttcaggactgttagtgatatatgagcaatgtgttcgtaaattttggcactctgaacgttacaaggatgatcttcgttatcttaaagtctggttggaatatgcggagcattgcgctgatgcggaagtgatttacaagtttttggaggtcaatgagattggaaagacacatgctgtctactatatagcttatgctttgcacattgagtttaagaataaggtcaaaactgctaatgagatcttcaatcttggaatctctagggatgcaaagccagtggaaaagttgaatgacgcgtacaagaagtttatggtgagaacgatgagaaggtccaacacagctgatgaagaaccaaaggagaataatgacttaccgtcaagaagctttggcactttattgtccaggggagataataatgcaagaaggcaggcgttaggaagttctaacccacaagccaaaaagctaaagccaaatcaatcatccaagacaccttttgctatctacgcagatgcagtttcagacaccacatcagggaatcaaccagagtcagacaagtcaagaccagagtttggtagttggctcatgcttggaggcagagcagagaggaacaaagaaaacaattctttacctagaaaatgggcatcattcaaggttcctcagaaacccattgtgagaactgttgcagcagcatctgcttccacctttgaggtttttgtcgatgaagaagaatgtacagaagaggaagaagaaaagaagaagaatgatgaaactatctcatcatcatcaaacgttctgccccttaatggcggccgtgagataaaaaaagaaacagagctgctacgacagaaccctttaagacatttcccacccaacagcttcctacgatgatgatattggactttcttctctacacgatcttatggtttgagatttgagcttttgtctataaagctccttgtgtgtttttgcctatttggatttgtttttgtgatgtactgggatatactatcctactatgtaccatgatgtgcctttcatgttttgaaattaatgtgacttgtcttgtttcaatccttatatgatttgtttctcct

SEQ ID NO: 99410 - protein, 395 aa, Arabidopsis thaliana
  peptide (1)..(395): Ceres Seq. ID no. 13602818
  misc_feature (1)..(395): Homolog of NCBI NO: 18403316 NR Description: expressed protein [Arabidopsis thaliana]
  misc_feature (1)..(395): Homolog of NCBI NO: 21593781 NR Description: unknown [Arabidopsis thaliana]
  misc_feature (1)..(110): Homolog of NCBI NO: 25370767 NR Description: hypothetical protein At2g33560 [imported] -
  misc_feature (260)..(346): Homolog of NCBI NO: 25370767 NR Description: hypothetical protein At2g33560 [imported] -
  misc_feature (136)..(261): Homolog of NCBI NO: 25370767 NR Description: hypothetical protein At2g33560 [imported] -
  misc_feature (26)..(188): Homolog of NCBI NO: 5441887 NR Description: Similar to Arabidopsis thaliana BAC genomic
  misc_feature (26)..(387): Homolog of NCBI NO: 29725501 NR Description: spindle checkpoint protein BubR1 [Gallus gallus]
  misc_feature (22)..(341): Homolog of NCBI NO: 22128593 NR Description: spindle checkpoint protein BubR1 [Xenopus laevis]
  misc_feature (21)..(372): Homolog of NCBI NO: 28317135 NR Description: LD23835p [Drosophila melanogaster]
  misc_feature (24)..(322): Homolog of NCBI NO: 21619502 NR Description: MGC36092 protein [Mus musculus]
MAAETKVQVSDPEAEFLNSKQETGYEWELFKENVRPLKRGRNVGILNHALKSHSDHQLRKNLIEKRRNLIEAIDEYEGDDPLSPWIECIKWVQEAFPPGGECSGLLVIYEQCVRKFWHSERYKDDLRYLKVWLEYAEHCADAEVIYKFLEVNEIGKTHAVYYIAYALHIEFKNKVKTANEIFNLGISRDAKPVEKLNDAYKKFMVRTMRRSNTADEEPKENNDLPSRSFGTLLSRGDNNARRQALGSSNPQAKKLKPNQSSKTPFAIYADAVSDTTSGNQPESDKSRPEFGSWLMLGGRAERNKENNSLPRKWASFKVPQKPIVRTVAAASASTFEVFVDEEECTEEEEEKKKNDETISSSSNVLPLNGGREIKKETELLRQNPLRHFPPNSFLR

SEQ ID NO: 99411 - DNA, 1433 bp, Arabidopsis thaliana
  misc_feature (1)..(1433): Ceres Seq. ID no. 13602834
  misc_feature: MA Experiment ID: 108434 Result: Down-regulated in Transcription
  misc_feature: MA Experiment 108434 PARAMETER Experiment Name: At_Root_Tips_cDNA_P Parameter: Tissue Value: Root Tips
  misc_feature: MA Experiment ID: 108464 Result: Up-regulated in Transcription
  misc_feature: MA Experiment 108464 PARAMETER Experiment Name: At_Germinating_Seeds_cDNA_P Parameter: Age (day) Value: 4 vs. 0
  misc_feature: MA Experiment 108464 PARAMETER Experiment Name: At_Germinating_Seeds_cDNA_P Parameter: Tissue Value: Germinating Seeds
  misc_feature: MA Experiment ID: 108488 Result: Up-regulated in Transcription
  misc_feature: MA Experiment ID: 108605 Result: Up-regulated in Transcription
  misc_feature: MA Experiment 108605 PARAMETER Experiment Name: At_100uM_ABA_cDNA_P Parameter: Timepoint (hr) Value: 6
  misc_feature: MA Experiment 108605 PARAMETER Experiment Name: At_100uM_ABA_cDNA_P Parameter: Tissue Value: Aerial
  misc_feature: MA Experiment 108605 PARAMETER Experiment Name: At_100uM_ABA_cDNA_P Parameter: Treatment Value: 100uM ABA vs. No Treatment
  misc_feature: MA Experiment ID: 108607 Result: Up-regulated in Transcription
  misc_feature: MA Experiment 108607 PARAMETER Experiment Name: At_100uM_ABA_cDNA_P Parameter: Timepoint (hr) Value: 4
  misc_feature: MA Experiment 108607 PARAMETER Experiment Name: At_100uM_ABA_cDNA_P Parameter: Tissue Value: Aerial
  misc_feature: MA Experiment 108607 PARAMETER Experiment Name: At_100uM_ABA_cDNA_P Parameter: Treatment Value: 100uM ABA vs. No Treatment
  misc_feature: MA Experiment ID: 108609 Result: Up-regulated in Transcription
  misc_feature: MA Experiment 108609 PARAMETER Experiment Name: At_100uM_ABA_cDNA_P Parameter: Timepoint (hr) Value: 24
  misc_feature: MA Experiment 108609 PARAMETER Experiment Name: At_100uM_ABA_cDNA_P Parameter: Tissue Value: Aerial
  misc_feature: MA Experiment 108609 PARAMETER Experiment Name: At_100uM_ABA_cDNA_P Parameter: Treatment Value: 100uM ABA vs. No Treatment
  misc_feature: MA Experiment ID: 20000090 Result: Down-regulated in Transcription
  misc_feature: MA Experiment ID: 20000184 Result: Down-regulated in Transcription
  misc_feature: MA Experiment 20000184 PARAMETER Experiment Name: At_Shoots__P Parameter: Age (day) Value: 7
  misc_feature: MA Experiment 20000184 PARAMETER Experiment Name: At_Shoots__P Parameter: Tissue Value: Shoots vs. Whole Plant
  misc_feature: MA Experiment ID: 20000224 Result: Up-regulated in Transcription
  misc_feature: MA Experiment ID: 20000227 Result: Up-regulated in Transcription
  misc_feature: MA Experiment 20000227 PARAMETER Experiment Name: At_Root-Tips-vs-Tops_P Parameter: Tissue Value: Root Tips vs. Root Tops
  misc_feature: MA Experiment ID: 20000264 Result: Down-regulated in Transcription
  misc_feature: MA Experiment 20000264 PARAMETER Experiment Name: At_Open_Flower_P Parameter: Age (day) Value: 21
  misc_feature: MA Experiment 20000264 PARAMETER Experiment Name: At_Open_Flower_P Parameter: Plant Line Value: WS
  misc_feature: MA Experiment 20000264 PARAMETER Experiment Name: At_Open_Flower_P Parameter: Tissue Value: Open Flower vs. Whole Plant
  misc_feature: MA Experiment ID: 20000265 Result: Down-regulated in Transcription
  misc_feature: MA Experiment 20000265 PARAMETER Experiment Name: At_Open_Flower_P Parameter: Age (day) Value: 21
  misc_feature: MA Experiment 20000265 PARAMETER Experiment Name: At_Open_Flower_P Parameter: Plant Line Value: WS
  misc_feature: MA Experiment 20000265 PARAMETER Experiment Name: At_Open_Flower_P Parameter: Tissue Value: Closed Flower vs. Whole Plant
  misc_feature: MA Experiment ID: 20000286 Result: Down-regulated in Transcription
  misc_feature: MA Experiment 20000286 PARAMETER Experiment Name: At_Open_Flower_P Parameter: Age (day) Value: 21
  misc_feature: MA Experiment 20000286 PARAMETER Experiment Name: At_Open_Flower_P Parameter: Plant Line Value: WS
  misc_feature: MA Experiment 20000286 PARAMETER Experiment Name: At_Open_Flower_P Parameter: Tissue Value: Half Open vs. Whole Plant
  misc_feature: MA Experiment ID: 20000453 Result: Up-regulated in Transcription
  misc_feature: MA Experiment 20000453 PARAMETER Experiment Name: At_100uM_ABA_P Parameter: Age (day) Value: 15
  misc_feature: MA Experiment 20000453 PARAMETER Experiment Name: At_100uM_ABA_P Parameter: Organism Value: A. thaliana
  misc_feature: MA Experiment 20000453 PARAMETER Experiment Name: At_100uM_ABA_P Parameter: Plant Line Value: WS
  misc_feature: MA Experiment 20000453 PARAMETER Experiment Name: At_100uM_ABA_P Parameter: Timepoint (hr) Value: 24
  misc_feature: MA Experiment 20000453 PARAMETER Experiment Name: At_100uM_ABA_P Parameter: Tissue Value: Aerial
  misc_feature: MA Experiment 20000453 PARAMETER Experiment Name: At_100uM_ABA_P Parameter: Treatment Value: 100uM ABA vs. No Treatment
  misc_feature: MA Experiment ID: 20000573 Result: Up-regulated in Transcription
  misc_feature: MA Experiment 20000573 PARAMETER Experiment Name: At_100uM_ABA_Mutants__P Parameter: Organism Value: A. thaliana
  misc_feature: MA Experiment 20000573 PARAMETER Experiment Name: At_100uM_ABA_Mutants__P Parameter: Plant Line Value: CS22 vs. Ler wt
  misc_feature: MA Experiment 20000573 PARAMETER Experiment Name: At_100uM_ABA_Mutants__P Parameter: Timepoint (hr) Value: N/A
  misc_feature: MA Experiment 20000573 PARAMETER Experiment Name: At_100uM_ABA_Mutants__P Parameter: Tissue Value: Whole Plant
  misc_feature: MA Experiment 20000573 PARAMETER Experiment Name: At_100uM_ABA_Mutants__P Parameter: Treatment Value: None
  misc_feature: MA Experiment ID: 20000574 Result: Up-regulated in Transcription
  misc_feature: MA Experiment 20000574 PARAMETER Experiment Name: At_100uM_ABA_Mutants__P Parameter: Organism Value: A. thaliana
  misc_feature: MA Experiment 20000574 PARAMETER Experiment Name: At_100uM_ABA_Mutants__P Parameter: Plant Line Value: CS23 vs. Ler wt
  misc_feature: MA Experiment 20000574 PARAMETER Experiment Name: At_100uM_ABA_Mutants__P Parameter: Timepoint (hr) Value: N/A
  misc_feature: MA Experiment 20000574 PARAMETER Experiment Name: At_100uM_ABA_Mutants__P Parameter: Tissue Value: Whole Plant
  misc_feature: MA Experiment 20000574 PARAMETER Experiment Name: At_100uM_ABA_Mutants__P Parameter: Treatment Value: None
  misc_feature: MA Experiment ID: 20001247 Result: Up-regulated in Transcription
  misc_feature: MA Experiment 20001247 PARAMETER Experiment Name: At_Far-red-induction_P Parameter: Age (day) Value: 7
  misc_feature: MA Experiment 20001247 PARAMETER Experiment Name: At_Far-red-induction_P Parameter: Light Value: Far-red vs. White
  misc_feature: MA Experiment 20001247 PARAMETER Experiment Name: At_Far-red-induction_P Parameter: Organism Value: A. thaliana
  misc_feature: MA Experiment 20001247 PARAMETER Experiment Name: At_Far-red-induction_P Parameter: Plant Line Value: Columbia
  misc_feature: MA Experiment 20001247 PARAMETER Experiment Name: At_Far-red-induction_P Parameter: Timepoint (hr) Value: 1
  misc_feature: MA Experiment 20001247 PARAMETER Experiment Name: At_Far-red-induction_P Parameter: Tissue Value: Whole Plant
  misc_feature: MA Experiment ID: 20001451 Result: Up-regulated in Transcription
  misc_feature: MA Experiment 20001451 PARAMETER Experiment Name: At_Far-red-induction_P Parameter: Age (day) Value: 7
  misc_feature: MA Experiment 20001451 PARAMETER Experiment Name: At_Far-red-induction_P Parameter: Light Value: Far-red vs. White
  misc_feature: MA Experiment 20001451 PARAMETER Experiment Name: At_Far-red-induction_P Parameter: Organism Value: A. thaliana
  misc_feature: MA Experiment 20001451 PARAMETER Experiment Name: At_Far-red-induction_P Parameter: Plant Line Value: Columbia
  misc_feature: MA Experiment 20001451 PARAMETER Experiment Name: At_Far-red-induction_P Parameter: Timepoint (hr) Value: 24
  misc_feature: MA Experiment 20001451 PARAMETER Experiment Name: At_Far-red-induction_P Parameter: Tissue Value: Whole Plant
  misc_feature: MA Experiment ID: 20001556 Result: Down-regulated in Transcription
  misc_feature: MA Experiment 20001556 PARAMETER Experiment Name: At_Drought_Soil_Dry_P Parameter: Age (day) Value: 26
  misc_feature: MA Experiment 20001556 PARAMETER Experiment Name: At_Drought_Soil_Dry_P Parameter: Organism Value: A. thaliana
  misc_feature: MA Experiment 20001556 PARAMETER Experiment Name: At_Drought_Soil_Dry_P Parameter: Plant Line Value: WS
  misc_feature: MA Experiment 20001556 PARAMETER Experiment Name: At_Drought_Soil_Dry_P Parameter: Post Timepoint (hr) Value: None
  misc_feature: MA Experiment 20001556 PARAMETER Experiment Name: At_Drought_Soil_Dry_P Parameter: Post-Treatment Value: None
  misc_feature: MA Experiment 20001556 PARAMETER Experiment Name: At_Drought_Soil_Dry_P Parameter: Timepoint (day) Value: 12
  misc_feature: MA Experiment 20001556 PARAMETER Experiment Name: At_Drought_Soil_Dry_P Parameter: Treatment Value: Drought vs. No Drought
  misc_feature: MA Experiment ID: 20001558 Result: Up-regulated in Transcription
  misc_feature: MA Experiment 20001558 PARAMETER Experiment Name: At_Drought_Soil_Dry_P Parameter: Age (day) Value: 27
  misc_feature: MA Experiment 20001558 PARAMETER Experiment Name: At_Drought_Soil_Dry_P Parameter: Organism Value: A. thaliana
  misc_feature: MA Experiment 20001558 PARAMETER Experiment Name: At_Drought_Soil_Dry_P Parameter: Plant Line Value: WS
  misc_feature: MA Experiment 20001558 PARAMETER Experiment Name: At_Drought_Soil_Dry_P Parameter: Post Timepoint (hr) Value: 6
  misc_feature: MA Experiment 20001558 PARAMETER Experiment Name: At_Drought_Soil_Dry_P Parameter: Post-Treatment Value: Re-Water vs. No Drought
  misc_feature: MA Experiment 20001558 PARAMETER Experiment Name: At_Drought_Soil_Dry_P Parameter: Timepoint (day) Value: 13
  misc_feature: MA Experiment 20001558 PARAMETER Experiment Name: At_Drought_Soil_Dry_P Parameter: Treatment Value: Drought vs. No Drought
  misc_feature: MA Experiment ID: 20001560 Result: Up-regulated in Transcription
  misc_feature: MA Experiment 20001560 PARAMETER Experiment Name: At_Drought_Soil_Dry_P Parameter: Age (day) Value: 28
  misc_feature: MA Experiment 20001560 PARAMETER Experiment Name: At_Drought_Soil_Dry_P Parameter: Organism Value: A. thaliana
  misc_feature: MA Experiment 20001560 PARAMETER Experiment Name: At_Drought_Soil_Dry_P Parameter: Plant Line Value: WS
  misc_feature: MA Experiment 20001560 PARAMETER Experiment Name: At_Drought_Soil_Dry_P Parameter: Post Timepoint (hr) Value: None
  misc_feature: MA Experiment 20001560 PARAMETER Experiment Name: At_Drought_Soil_Dry_P Parameter: Post-Treatment Value: None
  misc_feature: MA Experiment 20001560 PARAMETER Experiment Name: At_Drought_Soil_Dry_P Parameter: Timepoint (day) Value: 14
  misc_feature: MA Experiment 20001560 PARAMETER Experiment Name: At_Drought_Soil_Dry_P Parameter: Treatment Value: Drought vs. No Drought
  misc_feature: MA Experiment ID: 20001905 Result: Down-regulated in Transcription
  misc_feature: MA Experiment 20001905 PARAMETER Experiment Name: At_Drought_Reproduction_P Parameter: Age (day) Value: 40
  misc_feature: MA Experiment 20001905 PARAMETER Experiment Name: At_Drought_Reproduction_P Parameter: Organism Value: A. thaliana
  misc_feature: MA Experiment 20001905 PARAMETER Experiment Name: At_Drought_Reproduction_P Parameter: Plant Line Value: WS
  misc_feature: MA Experiment 20001905 PARAMETER Experiment Name: At_Drought_Reproduction_P Parameter: Timepoint (day) Value: 10
  misc_feature: MA Experiment 20001905 PARAMETER Experiment Name: At_Drought_Reproduction_P Parameter: Tissue Value: Rosettes
  misc_feature: MA Experiment 20001905 PARAMETER Experiment Name: At_Drought_Reproduction_P Parameter: Treatment Value: Drought vs. No Drought
  misc_feature: MA Experiment ID: 20001906 Result: Down-regulated in Transcription
  misc_feature: MA Experiment 20001906 PARAMETER Experiment Name: At_Drought_Reproduction_P Parameter: Age (day) Value: 35
  misc_feature: MA Experiment 20001906 PARAMETER Experiment Name: At_Drought_Reproduction_P Parameter: Organism Value: A. thaliana
  misc_feature: MA Experiment 20001906 PARAMETER Experiment Name: At_Drought_Reproduction_P Parameter: Plant Line Value: WS
  misc_feature: MA Experiment 20001906 PARAMETER Experiment Name: At_Drought_Reproduction_P Parameter: Timepoint (day) Value: 5
  misc_feature: MA Experiment 20001906 PARAMETER Experiment Name: At_Drought_Reproduction_P Parameter: Tissue Value: Siliques
  misc_feature: MA Experiment 20001906 PARAMETER Experiment Name: At_Drought_Reproduction_P Parameter: Treatment Value: Drought vs. No Drought
atataaactcgaatccatcacaaagcctattcaagttaagagaaaagaaaaaaaaaaccgttcttggaagatgggtttcaaactcaactctcttttccttcttctttcgcttctcatactcacaatcttgtccggagccgaccaagccttggcttacgtcaagaaaccacatgtgagccaacgcaacaaaacggcgttagcagccgtcgccggaagaggaggaggaaaagagatgttgaaagggaggaagcagacgagtggttgtaacttgtttcaagggagatgggttttcgatgcttcttaccctttctacgattcatccacgtgccctttcatcgacggtgagttcgactgtctcaaattcggccgaccagacaaacagttccttaagtactcttggcagcctgattcatgcaccgtcccaaggtttgatggggaagcgtttttgaagaaatggagagggaaacgagtgatgttcgtgggtgactcactgagtctaaacatgtgggaatcgttggcatgtatgatacattcgtcggttccaaacactaagaccacttttctcaagcgaaccccactctcctctctcactttccaggaatatgacgtcacactattcctataccgaacaccatacctagtggacatctccaaagaaagtgtcgggcgtgtgcttaaccttggagccattgaagatggagctgatgcttggaaaaatatggacctcctcgtcttcaattcttggcactggtggactcacacaggagtacagtctcaagggtgggattttataagagatgggtcttcactgatgagagacatggaccgccttgatgctttcaacaaaggactcaccacttggggtcaatgggttgatcaaaatgttaatgtttcgcaaacccgagtcttcttccaaggcatttctcccactcactacatgggaagggaatggaacgagccgaggaaaacttgcaacgggcagatgcaaccgttgaccggatcaacatacccaggtggttcacttcctgcagcaagcattgtgtctcgagtattaagcacgatgagaacgcccgtttacttactcgacatcacaactctatctcaactgagaaaagatgctcatccatctacatatggaggcgatggcggaacggattgcagtcactggtgccttcctggcttgccggatacttggaaccagcttctctatgcagctctttcgatgtgaaagcttgactcaatacacacttgcatgtatattacattcttggcagtccaaaggggaaaaaaagaagaagaaacgactgacattttacttggagagaatttgaagattagaaagagtatatgacgataaagttgtaaagtgttttatattctttactcttgggtggttacaaatcataatctaatcgacttcgattgtgattacc

SEQ ID NO: 99412 - protein, 408 aa, Arabidopsis thaliana
  peptide (1)..(408): Ceres Seq. ID no. 13602835
  misc_feature (24)..(408): Homolog of NCBI NO: 18403435 NR Description: expressed protein [Arabidopsis thaliana] expressed protein [Arabidopsis thaliana]
  misc_feature (24)..(408): Homolog of NCBI NO: 18396930 NR Description: expressed protein [Arabidopsis thaliana] unknown protein [Arabidopsis thaliana]
  misc_feature (247)..(408): Homolog of NCBI NO: 25408325 NR Description: hypothetical protein At2g34070 [imported] -
  misc_feature (24)..(178): Homolog of NCBI NO: 25408325 NR Description: hypothetical protein At2g34070 [imported] -
  misc_feature (32)..(408): Homolog of NCBI NO: 25366741 NR Description: F28N24.24 protein - Arabidopsis thaliana
  misc_feature (23)..(406): Homolog of NCBI NO: 34911864 NR Description: OSJNBb0032K15.9 [Oryza sativa (japonica
  misc_feature (82)..(406): Homolog of NCBI NO: 18406003 NR Description: expressed protein [Arabidopsis thaliana]
  misc_feature (88)..(407): Homolog of NCBI NO: 21593142 NR Description: unknown [Arabidopsis thaliana]
  misc_feature (88)..(407): Homolog of NCBI NO: 28393769 NR Description: unknown protein [Arabidopsis thaliana]
  misc_feature (197)..(407): Homolog of NCBI NO: 34904010 NR Description: unnamed protein product [Oryza sativa (japonica group)] >gi|7523484|dbj|BAA94212.1| unnamed protein product
YKLESITKPIQVKRKEKKNRSWKMGFKLNSLFLLLSLLILTILSGADQALAYVKKPHVSQRNKTALAAVAGRGGGKEMLKGRKQTSGCNLFQGRWVFDASYPFYDSSTCPFIDGEFDCLKFGRPDKQFLKYSWQPDSCTVPRFDGEAFLKKWRGKRVMFVGDSLSLNMWESLACMIHSSVPNTKTTFLKRTPLSSLTFQEYDVTLFLYRTPYLVDISKESVGRVLNLGAIEDGADAWKNMDLLVFNSWHWWTHTGVQSQGWDFIRDGSSLMRDMDRLDAFNKGLTTWGQWVDQNVNVSQTRVFFQGISPTHYMGREWNEPRKTCNGQMQPLTGSTYPGGSLPAASIVSRVLSTMRTPVYLLDITTLSQLRKDAHPSTYGGDGGTDCSHWCLPGLPDTWNQLLYAALSM

SEQ ID NO: 99413 - protein, 385 aa, Arabidopsis thaliana; identical to SEQ ID NO: 35905
  peptide (1)..(385): Ceres Seq. ID no. 13602836
  misc_feature (1)..(385): Homolog of NCBI NO: 18403435 NR Description: expressed protein [Arabidopsis thaliana] expressed protein [Arabidopsis thaliana]
  misc_feature (1)..(385): Homolog of NCBI NO: 18396930 NR Description: expressed protein [Arabidopsis thaliana] unknown protein [Arabidopsis thaliana]
  misc_feature (224)..(385): Homolog of NCBI NO: 25408325 NR Description: hypothetical protein At2g34070 [imported] -
  misc_feature (1)..(155): Homolog of NCBI NO: 25408325 NR Description: hypothetical protein At2g34070 [imported] -
  misc_feature (9)..(385): Homolog of NCBI NO: 25366741 NR Description: F28N24.24 protein - Arabidopsis thaliana
  misc_feature (1)..(383): Homolog of NCBI NO: 34911864 NR Description: OSJNBb0032K15.9 [Oryza sativa (japonica
  misc_feature (59)..(383): Homolog of NCBI NO: 18406003 NR Description: expressed protein [Arabidopsis thaliana]
  misc_feature (65)..(384): Homolog of NCBI NO: 21593142 NR Description: unknown [Arabidopsis thaliana]
  misc_feature (65)..(384): Homolog of NCBI NO: 28393769 NR Description: unknown protein [Arabidopsis thaliana]
  misc_feature (174)..(384): Homolog of NCBI NO: 34904010 NR Description: unnamed protein product [Oryza sativa (japonica group)] >gi|7523484|dbj|BAA94212.1| unnamed protein product

SEQ ID NO: 99414 - protein, 331 aa, Arabidopsis thaliana; identical to SEQ ID NO: 35906
  peptide (1)..(331): Ceres Seq. ID no. 13602837
  misc_feature (1)..(331): Homolog of NCBI NO: 18403435 NR Description: expressed protein [Arabidopsis thaliana] expressed protein [Arabidopsis thaliana]
  misc_feature (1)..(331): Homolog of NCBI NO: 18396930 NR Description: expressed protein [Arabidopsis thaliana] unknown protein [Arabidopsis thaliana]
  misc_feature (170)..(331): Homolog of NCBI NO: 25408325 NR Description: hypothetical protein At2g34070 [imported] -
  misc_feature (1)..(101): Homolog of NCBI NO: 25408325 NR Description: hypothetical protein At2g34070 [imported] -
  misc_feature (1)..(331): Homolog of NCBI NO: 25366741 NR Description: F28N24.24 protein - Arabidopsis thaliana
  misc_feature (1)..(329): Homolog of NCBI NO: 34911864 NR Description: OSJNBb0032K15.9 [Oryza sativa (japonica
  misc_feature (5)..(329): Homolog of NCBI NO: 18406003 NR Description: expressed protein [Arabidopsis thaliana]
  misc_feature (11)..(330): Homolog of NCBI NO: 21593142 NR Description: unknown [Arabidopsis thaliana]
  misc_feature (11)..(330): Homolog of NCBI NO: 28393769 NR Description: unknown protein [Arabidopsis thaliana]
  misc_feature (120)..(330): Homolog of NCBI NO: 34904010 NR Description: unnamed protein product [Oryza sativa (japonica group)] >gi|7523484|dbj|BAA94212.1| unnamed protein product

SEQ ID NO: 99415 - DNA, 702 bp, Arabidopsis thaliana
  misc_feature (1)..(702): Ceres Seq. ID no. 13602838
  misc_feature: MA Experiment ID: 108461 Result: Down-regulated in Transcription
  misc_feature: MA Experiment 108461 PARAMETER Experiment Name: At_Germinating_Seeds_cDNA_P Parameter: Age (day) Value: 1 vs. 0
  misc_feature: MA Experiment 108461 PARAMETER Experiment Name: At_Germinating_Seeds_cDNA_P Parameter: Tissue Value: Germinating Seeds
  misc_feature: MA Experiment ID: 108462 Result: Down-regulated in Transcription
  misc_feature: MA Experiment 108462 PARAMETER Experiment Name: At_Germinating_Seeds_cDNA_P Parameter: Age (day) Value: 2 vs. 0
  misc_feature: MA Experiment 108462 PARAMETER Experiment Name: At_Germinating_Seeds_cDNA_P Parameter: Tissue Value: Germinating Seeds
  misc_feature: MA Experiment ID: 108463 Result: Down-regulated in Transcription
  misc_feature: MA Experiment 108463 PARAMETER Experiment Name: At_Germinating_Seeds_cDNA_P Parameter: Age (day) Value: 3 vs. 0
  misc_feature: MA Experiment 108463 PARAMETER Experiment Name: At_Germinating_Seeds_cDNA_P Parameter: Tissue Value: Germinating Seeds
  misc_feature: MA Experiment ID: 108464 Result: Down-regulated in Transcription
  misc_feature: MA Experiment 108464 PARAMETER Experiment Name: At_Germinating_Seeds_cDNA_P Parameter: Age (day) Value: 4 vs. 0
  misc_feature: MA Experiment 108464 PARAMETER Experiment Name: At_Germinating_Seeds_cDNA_P Parameter: Tissue Value: Germinating Seeds
  misc_feature: MA Experiment ID: 108501 Result: Down-regulated in Transcription
  misc_feature: MA Experiment 108501 PARAMETER Experiment Name: At_ap2_floral_buds_cDNA_P Parameter: Plant Line Value: ap2 (Ler.)
  misc_feature: MA Experiment 108501 PARAMETER Experiment Name: At_ap2_floral_buds_cDNA_P Parameter: Tissue Value: Closed Flower
  misc_feature: MA Experiment ID: 108608 Result: Up-regulated in Transcription
  misc_feature: MA Experiment 108608 PARAMETER Experiment Name: At_100uM_ABA_cDNA_P Parameter: Timepoint (hr) Value: 1
  misc_feature: MA Experiment 108608 PARAMETER Experiment Name: At_100uM_ABA_cDNA_P Parameter: Tissue Value: Aerial
  misc_feature: MA Experiment 108608 PARAMETER Experiment Name: At_100uM_ABA_cDNA_P Parameter: Treatment Value: 100uM ABA vs. No Treatment
  misc_feature: MA Experiment ID: 20000072 Result: Up-regulated in Transcription
  misc_feature: MA Experiment 20000072 PARAMETER Experiment Name: At_100uM_ABA_Mutants_cDNA_P Parameter: Plant Line Value: CS8105
  misc_feature: MA Experiment 20000072 PARAMETER Experiment Name: At_100uM_ABA_Mutants_cDNA_P Parameter: Timepoint (hr) Value: 6
  misc_feature: MA Experiment 20000072 PARAMETER Experiment Name: At_100uM_ABA_Mutants_cDNA_P Parameter: Tissue Value: Aerial
  misc_feature: MA Experiment 20000072 PARAMETER Experiment Name: At_100uM_ABA_Mutants_cDNA_P Parameter: Treatment Value: 100uM ABA vs. No Treatment
  misc_feature: MA Experiment ID: 20000087 Result: Up-regulated in Transcription
  misc_feature: MA Experiment 20000087 PARAMETER Experiment Name: At_100uM_ABA_Mutants_cDNA_P Parameter: Plant Line Value: WS
  misc_feature: MA Experiment 20000087 PARAMETER Experiment Name: At_100uM_ABA_Mutants_cDNA_P Parameter: Timepoint (hr) Value: 6
  misc_feature: MA Experiment 20000087 PARAMETER Experiment Name: At_100uM_ABA_Mutants_cDNA_P Parameter: Tissue Value: Aerial
  misc_feature: MA Experiment 20000087 PARAMETER Experiment Name: At_100uM_ABA_Mutants_cDNA_P Parameter: Treatment Value: 100uM ABA vs. No Treatment
  misc_feature: MA Experiment ID: 20000180 Result: Down-regulated in Transcription
  misc_feature: MA Experiment 20000180 PARAMETER Experiment Name: At_Germinating_Seeds_P Parameter: Age (hr) Value: 24 vs. 0
  misc_feature: MA Experiment 20000180 PARAMETER Experiment Name: At_Germinating_Seeds_P Parameter: Tissue Value: Germinating Seeds
  misc_feature: MA Experiment ID: 20000184 Result: Up-regulated in Transcription
  misc_feature: MA Experiment 20000184 PARAMETER Experiment Name: At_Shoots__P Parameter: Age (day) Value: 7
  misc_feature: MA Experiment 20000184 PARAMETER Experiment Name: At_Shoots__P Parameter: Tissue Value: Shoots vs. Whole Plant
  misc_feature: MA Experiment ID: 20000264 Result: Up-regulated in Transcription
  misc_feature: MA Experiment 20000264 PARAMETER Experiment Name: At_Open_Flower_P Parameter: Age (day) Value: 21
  misc_feature: MA Experiment 20000264 PARAMETER Experiment Name: At_Open_Flower_P Parameter: Plant Line Value: WS
  misc_feature: MA Experiment 20000264 PARAMETER Experiment Name: At_Open_Flower_P Parameter: Tissue Value: Open Flower vs. Whole Plant
  misc_feature: MA Experiment ID: 20000265 Result: Up-regulated in Transcription
  misc_feature: MA Experiment 20000265 PARAMETER Experiment Name: At_Open_Flower_P Parameter: Age (day) Value: 21
  misc_feature: MA Experiment 20000265 PARAMETER Experiment Name: At_Open_Flower_P Parameter: Plant Line Value: WS
  misc_feature: MA Experiment 20000265 PARAMETER Experiment Name: At_Open_Flower_P Parameter: Tissue Value: Closed Flower vs. Whole Plant
  misc_feature: MA Experiment ID: 20000794 Result: Up-regulated in Transcription
  misc_feature: MA Experiment 20000794 PARAMETER Experiment Name: At_Petals_P Parameter: Age (day) Value: 23-25 days
  misc_feature: MA Experiment 20000794 PARAMETER Experiment Name: At_Petals_P Parameter: Plant Line Value: WS
  misc_feature: MA Experiment 20000794 PARAMETER Experiment Name: At_Petals_P Parameter: Tissue Value: Petals vs. Whole plant
  misc_feature: MA Experiment ID: 20001451 Result: Up-regulated in Transcription
  misc_feature: MA Experiment 20001451 PARAMETER Experiment Name: At_Far-red-induction_P Parameter: Age (day) Value: 7
  misc_feature: MA Experiment 20001451 PARAMETER Experiment Name: At_Far-red-induction_P Parameter: Light Value: Far-red vs. White
  misc_feature: MA Experiment 20001451 PARAMETER Experiment Name: At_Far-red-induction_P Parameter: Organism Value: A. thaliana
  misc_feature: MA Experiment 20001451 PARAMETER Experiment Name: At_Far-red-induction_P Parameter: Plant Line Value: Columbia
  misc_feature: MA Experiment 20001451 PARAMETER Experiment Name: At_Far-red-induction_P Parameter: Timepoint (hr) Value: 24
  misc_feature: MA Experiment 20001451 PARAMETER Experiment Name: At_Far-red-induction_P Parameter: Tissue Value: Whole Plant
  misc_feature: MA Experiment ID: 20001557 Result: Up-regulated in Transcription
  misc_feature: MA Experiment 20001557 PARAMETER Experiment Name: At_Drought_Soil_Dry_P Parameter: Age (day) Value: 27
  misc_feature: MA Experiment 20001557 PARAMETER Experiment Name: At_Drought_Soil_Dry_P Parameter: Organism Value: A. thaliana
  misc_feature: MA Experiment 20001557 PARAMETER Experiment Name: At_Drought_Soil_Dry_P Parameter: Plant Line Value: WS
  misc_feature: MA Experiment 20001557 PARAMETER Experiment Name: At_Drought_Soil_Dry_P Parameter: Post Timepoint (hr) Value: 3
  misc_feature: MA Experiment 20001557 PARAMETER Experiment Name: At_Drought_Soil_Dry_P Parameter: Post-Treatment Value: Re-Water vs. No Drought
  misc_feature: MA Experiment 20001557 PARAMETER Experiment Name: At_Drought_Soil_Dry_P Parameter: Timepoint (day) Value: 13
  misc_feature: MA Experiment 20001557 PARAMETER Experiment Name: At_Drought_Soil_Dry_P Parameter: Treatment Value: Drought vs. No Drought
aggttaagatcattttgagtctctccaaaccctaatatcaaattctcatctcataactaacaaaagcatcccaaaatttctagtaaatggcggaggaattcgatgaatctgaggtagtgttctccgatggtttaagctccgttctccataaagagaacgagaatcgcctgtttggttctgatatggagaggaagaagacgaggcggatcaagaggacgacgacggagaaggcgtcgttgtcgagctcgcttccggtgagtatccctgagaacatctttcggaggtacgttgggaaagaggaggatgaatactcagaggaggaatattccgaaggaggaggagagatgattccgccgcatattatgatcggacggaggatccaaggaggacaaatggcgttttccgtttgttcaggtagtggaaggactcttaagggaagagatctgagccgggttcggaattcggttcttaggttaaccggttttttggaggcttgaaccgttaccggtttgccatacttcatcatcttttcccaactcttttgtttttttgcatattacggaaaattgctagtggatccccgtgttgtttatttaagtaaagggtggggaaaatgtgaaacaaagctttctccttagtttttgtttttccatattcttttgtttttcctaaattgtaataggaaacaaggaaatttcgggt

SEQ ID NO: 99416 - protein, 136 aa, Arabidopsis thaliana; identical to SEQ ID NO: 21190
  peptide (1)..(136): Ceres Seq. ID no. 13602839
  misc_feature (1)..(135): Pfam Name: Protein of unknown function, DUF584 Pfam Description: Protein of unknown function, DUF584
  misc_feature (1)..(136): Homolog of NCBI NO: 18403527 NR Description: expressed protein [Arabidopsis thaliana]
  misc_feature (1)..(136): Homolog of NCBI NO: 15220508 NR Description: expressed protein [Arabidopsis thaliana]
  misc_feature (56)..(136): Homolog of NCBI NO: 34910798 NR Description: P0042A10.28 [Oryza sativa (japonica
  misc_feature (3)..(135): Homolog of NCBI NO: 18412629 NR Description: expressed protein [Arabidopsis thaliana]
  misc_feature (3)..(135): Homolog of NCBI NO: 25354620 NR Description: hypothetical protein AT4g04630 [imported] - thaliana >gi|4773907|gb|AAD29777.1|AF074021_9 hypothetical [Arabidopsis thaliana] >gi|7267221|emb|CAB80828.1| putative
  misc_feature (3)..(135): Homolog of NCBI NO: 26452217 NR Description: unknown protein [Arabidopsis thaliana]
  misc_feature (52)..(134): Homolog of NCBI NO: 34909498 NR Description: P0481E12.19 [Oryza sativa (japonica
  misc_feature (4)..(135): Homolog of NCBI NO: 15230636 NR Description: expressed protein [Arabidopsis thaliana]
  misc_feature (3)..(133): Homolog of NCBI NO: 7487830 NR Description: hypothetical protein T8O5.180 - Arabidopsis >gi|2894575|emb|CAA17164.1| putative protein [Arabidopsis
  misc_feature (1)..(132): Homolog of NCBI NO: 34910794 NR Description: P0042A10.26 [Oryza sativa (japonica

SEQ ID NO: 99417 - protein, 104 aa, Arabidopsis thaliana; identical to SEQ ID NO: 21191
  peptide (1)..(104): Ceres Seq. ID no. 13602840
  misc_feature (1)..(103): Pfam Name: Protein of unknown function, DUF584 Pfam Description: Protein of unknown function, DUF584
  misc_feature (1)..(104): Homolog of NCBI NO: 18403527 NR Description: expressed protein [Arabidopsis thaliana]
  misc_feature (1)..(104): Homolog of NCBI NO: 15220508 NR Description: expressed protein [Arabidopsis thaliana]
  misc_feature (24)..(104): Homolog of NCBI NO: 34910798 NR Description: P0042A10.28 [Oryza sativa (japonica
  misc_feature (1)..(103): Homolog of NCBI NO: 18412629 NR Description: expressed protein [Arabidopsis thaliana]
  misc_feature (1)..(103): Homolog of NCBI NO: 25354620 NR Description: hypothetical protein AT4g04630 [imported] - thaliana >gi|4773907|gb|AAD29777.1|AF074021_9 hypothetical [Arabidopsis thaliana] >gi|7267221|emb|CAB80828.1| putative
  misc_feature (1)..(103): Homolog of NCBI NO: 26452217 NR Description: unknown protein [Arabidopsis thaliana]
  misc_feature (20)..(102): Homolog of NCBI NO: 34909498 NR Description: P0481E12.19 [Oryza sativa (japonica
  misc_feature (1)..(103): Homolog of NCBI NO: 15230636 NR Description: expressed protein [Arabidopsis thaliana]
  misc_feature (1)..(101): Homolog of NCBI NO: 7487830 NR Description: hypothetical protein T8O5.180 - Arabidopsis >gi|2894575|emb|CAA17164.1| putative protein [Arabidopsis
  misc_feature (1)..(100): Homolog of NCBI NO: 34910794 NR Description: P0042A10.26 [Oryza sativa (japonica

SEQ ID NO: 99418 - DNA, 989 bp, Arabidopsis thaliana
  misc_feature (1)..(989): Ceres Seq. ID no. 13602841
  misc_feature: MA Experiment ID: 20000451 Result: Up-regulated in Transcription
  misc_feature: MA Experiment 20000451 PARAMETER Experiment Name: At_CS6879_Shoots-Roots_P Parameter: Age (day) Value: 14
  misc_feature: MA Experiment 20000451 PARAMETER Experiment Name: At_CS6879_Shoots-Roots_P Parameter: Organism Value: A. thaliana
  misc_feature: MA Experiment 20000451 PARAMETER Experiment Name: At_CS6879_Shoots-Roots_P Parameter: Plant Line Value: CS6879 vs. WS
  misc_feature: MA Experiment 20000451 PARAMETER Experiment Name: At_CS6879_Shoots-Roots_P Parameter: Tissue Value: Roots
  misc_feature: MA Experiment ID: 20000573 Result: Down-regulated in Transcription
  misc_feature: MA Experiment 20000573 PARAMETER Experiment Name: At_100uM_ABA_Mutants__P Parameter: Organism Value: A. thaliana
  misc_feature: MA Experiment 20000573 PARAMETER Experiment Name: At_100uM_ABA_Mutants__P Parameter: Plant Line Value: CS22 vs. Ler wt
  misc_feature: MA Experiment 20000573 PARAMETER Experiment Name: At_100uM_ABA_Mutants__P Parameter: Timepoint (hr) Value: N/A
  misc_feature: MA Experiment 20000573 PARAMETER Experiment Name: At_100uM_ABA_Mutants__P Parameter: Tissue Value: Whole Plant
  misc_feature: MA Experiment 20000573 PARAMETER Experiment Name: At_100uM_ABA_Mutants__P Parameter: Treatment Value: None
  misc_feature: MA Experiment ID: 20000574 Result: Down-regulated in Transcription
  misc_feature: MA Experiment 20000574 PARAMETER Experiment Name: At_100uM_ABA_Mutants__P Parameter: Organism Value: A. thaliana
  misc_feature: MA Experiment 20000574 PARAMETER Experiment Name: At_100uM_ABA_Mutants__P Parameter: Plant Line Value: CS23 vs. Ler wt
  misc_feature: MA Experiment 20000574 PARAMETER Experiment Name: At_100uM_ABA_Mutants__P Parameter: Timepoint (hr) Value: N/A
  misc_feature: MA Experiment 20000574 PARAMETER Experiment Name: At_100uM_ABA_Mutants__P Parameter: Tissue Value: Whole Plant
  misc_feature: MA Experiment 20000574 PARAMETER Experiment Name: At_100uM_ABA_Mutants__P Parameter: Treatment Value: None
caatctctcaaacacacaagaaggaaaaaaaaaaaaaaaatctctcaaacacataacttcaaacatcaatcaaagcttatacagaacttttttttctttctatttctcggacaaaaagaaaaatggatgacatatcagtgagcaaaagcaaccacggaaatgttgttgtgctcaacatcaaagcgtcttctcttgcagacacttctcttccttccaacaaacacgagtcatcgtccccgcctttgctctctgtccatttcttgcaaaagctcttagcggagctcgttggaacttactatctgatatttgctggctgtgccgccattgccgtgaatgctcaacacaaccatgtagtgactcttgtggggattgctgtggtttggggtatagtgataatggttcttgtttactgtctcggccacctctctgcacatttcaatcctgctgtcactcttgccttagcatcttcccaaagattccctctgaatcaagtcccggcctacataactgttcaagtcatcggatcaaccttggcatctgcgactctgcgtcttctgtttgatctgaacaatgatgtgtgcagcaagaaacatgatgtcttcctcgggtcatctccttctgggtctgatcttcaagcattcgtgatggagttcatcattaccggcttcctcatgttagtcgtctgtgccgtcacaaccaccaagagaactacagaggaactagaggggctaatcattggggcaaccgtcacactgaatgttatatttgctggagaggtatcaggagcatcgatgaatccagccagaagcataggacctgcacttgtgtggggatgttacaaagggatttggatatacttgctggctccaacacttggtgccgtctctggggccttgattcataaaatgttaccgtcaatacagaacgcagagcctgagttctccaagacaggatcttctcataaacgagttaccgatcttcctctgtga

SEQ ID NO: 99419 - protein, 288 aa, Arabidopsis thaliana
  peptide (1)..(288): Ceres Seq. ID no. 13602842
  misc_feature (1)..(288): Homolog of NCBI NO: 15226298 NR Description: major intrinsic protein (MIP) family [Arabidopsis
  misc_feature (1)..(247): Homolog of NCBI NO: 18072851 NR Description: putative aquaglyceroporin [Arabidopsis thaliana]
  misc_feature (15)..(283): Homolog of NCBI NO: 21536953 NR Description: major intrinsic protein (MIP)- like [Arabidopsis
  misc_feature (6)..(283): Homolog of NCBI NO: 18415224 NR Description: major intrinsic protein (MIP) family [Arabidopsis
  misc_feature (42)..(283): Homolog of NCBI NO: 15234059 NR Description: major intrinsic protein (MIP) family [Arabidopsis
  misc_feature (42)..(283): Homolog of NCBI NO: 2677614 NR Description: NLM1 protein (NodLikeMip1) [Arabidopsis thaliana]
  misc_feature (6)..(283): Homolog of NCBI NO: 25324917 NR Description: nodulin-26-like protein [imported] - Arabidopsis
  misc_feature (49)..(283): Homolog of NCBI NO: 7449725 NR Description: nodulin-26-like protein F13C5.200 - Arabidopsis
  misc_feature (7)..(278): Homolog of NCBI NO: 5139541 NR Description: nodulin26-like major intrinsic protein [Pisum
  misc_feature (31)..(278): Homolog of NCBI NO: 541944 NR Description: nodulin-26 - soybean
MDDISVSKSNHGNVVVLNIKASSLADTSLPSNKHESSSPPLLSVHFLQKLLAELVGTYYLIFAGCAAIAVNAQHNHVVTLVGIAVVWGIVIMVLVYCLGHLSAHFNPAVTLALASSQRFPLNQVPAYITVQVIGSTLASATLRLLFDLNNDVCSKKHDVFLGSSPSGSDLQAFVMEFIITGFLMLVVCAVTTTKRTTEELEGLIIGATVTLNVIFAGEVSGASMNPARSIGPALVWGCYKGIWIYLLAPTLGAVSGALIHKMLPSIQNAEPEFSKTGSSHKRVTDLPL

SEQ ID NO: 99420 - protein, 197 aa, Arabidopsis thaliana
  peptide (1)..(197): Ceres Seq. ID no. 13602843
  misc_feature (1)..(197): Homolog of NCBI NO: 15226298 NR Description: major intrinsic protein (MIP) family [Arabidopsis
  misc_feature (1)..(156): Homolog of NCBI NO: 18072851 NR Description: putative aquaglyceroporin [Arabidopsis thaliana]
  misc_feature (1)..(192): Homolog of NCBI NO: 21536953 NR Description: major intrinsic protein (MIP)- like [Arabidopsis
  misc_feature (1)..(192): Homolog of NCBI NO: 18415224 NR Description: major intrinsic protein (MIP) family [Arabidopsis
  misc_feature (1)..(192): Homolog of NCBI NO: 15234059 NR Description: major intrinsic protein (MIP) family [Arabidopsis
  misc_feature (1)..(192): Homolog of NCBI NO: 2677614 NR Description: NLM1 protein (NodLikeMip1) [Arabidopsis thaliana]
  misc_feature (1)..(192): Homolog of NCBI NO: 25324917 NR Description: nodulin-26-like protein [imported] - Arabidopsis
  misc_feature (1)..(192): Homolog of NCBI NO: 7449725 NR Description: nodulin-26-like protein F13C5.200 - Arabidopsis
  misc_feature (1)..(187): Homolog of NCBI NO: 5139541 NR Description: nodulin26-like major intrinsic protein [Pisum
  misc_feature (1)..(187): Homolog of NCBI NO: 541944 NR Description: nodulin-26 - soybean
MVLVYCLGHLSAHFNPAVTLALASSQRFPLNQVPAYITVQVIGSTLASATLRLLFDLNNDVCSKKHDVFLGSSPSGSDLQAFVMEFIITGFLMLVVCAVTTTKRTTEELEGLIIGATVTLNVIFAGEVSGASMNPARSIGPALVWGCYKGIWIYLLAPTLGAVSGALIHKMLPSIQNAEPEFSKTGSSHKRVTDLPL

SEQ ID NO: 99421 - DNA, 1094 bp, Arabidopsis thaliana
  misc_feature (1)..(1094): Ceres Seq. ID no. 13602855
  misc_feature: MA Experiment ID: 108434 Result: Up-regulated in Transcription
  misc_feature: MA Experiment 108434 PARAMETER Experiment Name: At_Root_Tips_cDNA_P Parameter: Tissue Value: Root Tips
  misc_feature: MA Experiment ID: 108461 Result: Down-regulated in Transcription
  misc_feature: MA Experiment 108461 PARAMETER Experiment Name: At_Germinating_Seeds_cDNA_P Parameter: Age (day) Value: 1 vs. 0
  misc_feature: MA Experiment 108461 PARAMETER Experiment Name: At_Germinating_Seeds_cDNA_P Parameter: Tissue Value: Germinating Seeds
  misc_feature: MA Experiment ID: 108462 Result: Down-regulated in Transcription
  misc_feature: MA Experiment 108462 PARAMETER Experiment Name: At_Germinating_Seeds_cDNA_P Parameter: Age (day) Value: 2 vs. 0
  misc_feature: MA Experiment 108462 PARAMETER Experiment Name: At_Germinating_Seeds_cDNA_P Parameter: Tissue Value: Germinating Seeds
  misc_feature: MA Experiment ID: 108463 Result: Down-regulated in Transcription
  misc_feature: MA Experiment 108463 PARAMETER Experiment Name: At_Germinating_Seeds_cDNA_P Parameter: Age (day) Value: 3 vs. 0
  misc_feature: MA Experiment 108463 PARAMETER Experiment Name: At_Germinating_Seeds_cDNA_P Parameter: Tissue Value: Germinating Seeds
  misc_feature: MA Experiment ID: 108464 Result: Down-regulated in Transcription
  misc_feature: MA Experiment 108464 PARAMETER Experiment Name: At_Germinating_Seeds_cDNA_P Parameter: Age (day) Value: 4 vs. 0
  misc_feature: MA Experiment 108464 PARAMETER Experiment Name: At_Germinating_Seeds_cDNA_P Parameter: Tissue Value: Germinating Seeds
  misc_feature: MA Experiment ID: 108572 Result: Down-regulated in Transcription
  misc_feature: MA Experiment 108572 PARAMETER Experiment Name: At_Drought_cDNA_P Parameter: Timepoint (hr) Value: 1
  misc_feature: MA Experiment 108572 PARAMETER Experiment Name: At_Drought_cDNA_P Parameter: Tissue Value: Aerial
  misc_feature: MA Experiment 108572 PARAMETER Experiment Name: At_Drought_cDNA_P Parameter: Treatment Value: Drought vs. No Drought
  misc_feature: MA Experiment ID: 108573 Result: Down-regulated in Transcription
  misc_feature: MA Experiment 108573 PARAMETER Experiment Name: At_Drought_cDNA_P Parameter: Timepoint (hr) Value: 6
  misc_feature: MA Experiment 108573 PARAMETER Experiment Name: At_Drought_cDNA_P Parameter: Tissue Value: Aerial
  misc_feature: MA Experiment 108573 PARAMETER Experiment Name: At_Drought_cDNA_P Parameter: Treatment Value: Drought vs. No Drought
  misc_feature: MA Experiment ID: 20000179 Result: Down-regulated in Transcription
  misc_feature: MA Experiment 20000179 PARAMETER Experiment Name: At_Germinating_Seeds_P Parameter: Age (hr) Value: 6 vs. 0
  misc_feature: MA Experiment 20000179 PARAMETER Experiment Name: At_Germinating_Seeds_P Parameter: Tissue Value: Germinating Seeds
  misc_feature: MA Experiment ID: 20000180 Result: Down-regulated in Transcription
  misc_feature: MA Experiment 20000180 PARAMETER Experiment Name: At_Germinating_Seeds_P Parameter: Age (hr) Value: 24 vs. 0
  misc_feature: MA Experiment 20000180 PARAMETER Experiment Name: At_Germinating_Seeds_P Parameter: Tissue Value: Germinating Seeds
  misc_feature: MA Experiment ID: 20000184 Result: Down-regulated in Transcription
  misc_feature: MA Experiment 20000184 PARAMETER Experiment Name: At_Shoots__P Parameter: Age (day) Value: 7
  misc_feature: MA Experiment 20000184 PARAMETER Experiment Name: At_Shoots__P Parameter: Tissue Value: Shoots vs. Whole Plant
  misc_feature: MA Experiment ID: 20000224 Result: Up-regulated in Transcription
  misc_feature: MA Experiment ID: 20001557 Result: Up-regulated in Transcription
  misc_feature: MA Experiment 20001557 PARAMETER Experiment Name: At_Drought_Soil_Dry_P Parameter: Age (day) Value: 27
  misc_feature: MA Experiment 20001557 PARAMETER Experiment Name: At_Drought_Soil_Dry_P Parameter: Organism Value: A. thaliana
  misc_feature: MA Experiment 20001557 PARAMETER Experiment Name: At_Drought_Soil_Dry_P Parameter: Plant Line Value: WS
  misc_feature: MA Experiment 20001557 PARAMETER Experiment Name: At_Drought_Soil_Dry_P Parameter: Post Timepoint (hr) Value: 3
  misc_feature: MA Experiment 20001557 PARAMETER Experiment Name: At_Drought_Soil_Dry_P Parameter: Post-Treatment Value: Re-Water vs. No Drought
  misc_feature: MA Experiment 20001557 PARAMETER Experiment Name: At_Drought_Soil_Dry_P Parameter: Timepoint (day) Value: 13
  misc_feature: MA Experiment 20001557 PARAMETER Experiment Name: At_Drought_Soil_Dry_P Parameter: Treatment Value: Drought vs. No Drought
  misc_feature: MA Experiment ID: 20001558 Result: Up-regulated in Transcription
  misc_feature: MA Experiment 20001558 PARAMETER Experiment Name: At_Drought_Soil_Dry_P Parameter: Age (day) Value: 27
  misc_feature: MA Experiment 20001558 PARAMETER Experiment Name: At_Drought_Soil_Dry_P Parameter: Organism Value: A. thaliana
  misc_feature: MA Experiment 20001558 PARAMETER Experiment Name: At_Drought_Soil_Dry_P Parameter: Plant Line Value: WS
  misc_feature: MA Experiment 20001558 PARAMETER Experiment Name: At_Drought_Soil_Dry_P Parameter: Post Timepoint (hr) Value: 6
  misc_feature: MA Experiment 20001558 PARAMETER Experiment Name: At_Drought_Soil_Dry_P Parameter: Post-Treatment Value: Re-Water vs. No Drought
  misc_feature: MA Experiment 20001558 PARAMETER Experiment Name: At_Drought_Soil_Dry_P Parameter: Timepoint (day) Value: 13
  misc_feature: MA Experiment 20001558 PARAMETER Experiment Name: At_Drought_Soil_Dry_P Parameter: Treatment Value: Drought vs. No Drought
gtttatctccaccgaacaagaaaaaaaactaaaaccctaattccagcgncgtcttcgcgctctgagaaaaatcgcagagtagagactagaaggagaagaagatgagagtgaagaggcagaagaaaaacaggagaaccgtgagattcttcacggtctgttacggattccgtcaaccctacaaagtcctttgcgacggcactttcgtccaccatcttgtcactaatgagatcactcccgccgacactgctgtctctgaactcctcggaggtcccgtcaagctcttcaccaccagatgtgtgattgcggagttggagaaactgggtaaagattttgcggaatctctcgaagctgcccagacgcttaatacagcaacatgtgagcacgaggaggcaaaaacagcagacgagtgtttgtcagaggtaataggggtacaaaatactgagcatttcttccttggtactcaggacgcggagtttaggagaaagcttcagcaggagtctatagttcctcttgtgtttggtctaaggaacatactgctgattgatcaaccttctgatttccaacgtcagagtgccaaagactctgaaaataagcgcttaactatgaccgatacggaaaaaaagttgttggtgaaacggactgcgaaaatcatagcttctaatagaaaagaagcaacaattgcaaatgaagaatggggaatgcctcgagtagtttctacaaaaaatggacttggtgtgaaggatagacctcagttcaagcgaaatagagccaagggtccaaacccactttcatgcatgaagaaaaagaaggagaatcctcaatccaaatccaaagccgattctaactctaatgcacaaaaggaaaagaaagaaggcgggagcgatacacaaaagaggtcaagaaaacggtcaaaaaaaggaaagtctggtccggagagaaccgagtgaaaacagttgttttatatataacacatcttgagtccttactttttctactgcatacaaaaattttggtcaccaatcagactagagcttgagtctcattgctgttatactctcattttatttcaagcaaagacgacccgtgtaacagag

SEQ ID NO: 99422 - protein, 281 aa, Arabidopsis thaliana
  peptide (1)..(281): Ceres Seq. ID no. 13602856
  misc_feature (51)..(150): Pfam Name: Protein of unknown function, DUF652 Pfam Description: Protein of unknown function, DUF652
  misc_feature (1)..(281): Homolog of NCBI NO: 30686117 NR Description: expressed protein [Arabidopsis thaliana]
  misc_feature (1)..(256): Homolog of NCBI NO: 25408336 NR Description: hypothetical protein At2g34570 [imported] - thaliana >gi|3128208|gb|AAC26688.1| hypothetical protein
  misc_feature (200)..(281): Homolog of NCBI NO: 26452330 NR Description: unknown protein [Arabidopsis thaliana]
  misc_feature (1)..(225): Homolog of NCBI NO: 31222167 NR Description: ENSANGP00000006696 [Anopheles gambiae]
  misc_feature (219)..(274): Homolog of NCBI NO: 31222167 NR Description: ENSANGP00000006696 [Anopheles gambiae]
  misc_feature (1)..(238): Homolog of NCBI NO: 19075891 NR Description: conserved protein; putative tRNA synthetase class [Schizosaccharomyces pombe] >gi|7490368|pir||T41155 conserved
  misc_feature (1)..(258): Homolog of NCBI NO: 14150118 NR Description: hypothetical protein MGC14595 [Homo sapiens] Similar to RIKEN cDNA D530033C11 gene [Homo sapiens]
  misc_feature (1)..(258): Homolog of NCBI NO: 21313442 NR Description: RIKEN cDNA D530033C11 [Mus musculus]
  misc_feature (1)..(258): Homolog of NCBI NO: 26335161 NR Description: unnamed protein product [Mus musculus]
  misc_feature (1)..(166): Homolog of NCBI NO: 17552478 NR Description: Protein required for cell viability like (26.3 [Caenorhabditis elegans] >gi|14550350|gb|AAK67218.1|U10402_10
MRVKRQKKNRRTVRFFTVCYGFRQPYKVLCDGTFVHHLVTNEITPADTAVSELLGGPVKLFTTRCVIAELEKLGKDFAESLEAAQTLNTATCEHEEAKTADECLSEVIGVQNTEHFFLGTQDAEFRRKLQQESIVPLVFGLRNILLIDQPSDFQRQSAKDSENKRLTMTDTEKKLLVKRTAKIIASNRKEATIANEEWGMPRVVSTKNGLGVKDRPQFKRNRAKGPNPLSCMKKKKENPQSKSKADSNSNAQKEKKEGGSDTQKRSRKRSKKGKSGPERTE

SEQ ID NO: 99423 - DNA, 1489 bp, Arabidopsis thaliana
  misc_feature (1)..(1489): Ceres Seq. ID no. 13602857
  misc_feature: MA Experiment ID: 108434 Result: Up-regulated in Transcription
  misc_feature: MA Experiment 108434 PARAMETER Experiment Name: At_Root_Tips_cDNA_P Parameter: Tissue Value: Root Tips
  misc_feature: MA Experiment ID: 108461 Result: Up-regulated in Transcription
  misc_feature: MA Experiment 108461 PARAMETER Experiment Name: At_Germinating_Seeds_cDNA_P Parameter: Age (day) Value: 1 vs. 0
  misc_feature: MA Experiment 108461 PARAMETER Experiment Name: At_Germinating_Seeds_cDNA_P Parameter: Tissue Value: Germinating Seeds
  misc_feature: MA Experiment ID: 108462 Result: Up-regulated in Transcription
  misc_feature: MA Experiment 108462 PARAMETER Experiment Name: At_Germinating_Seeds_cDNA_P Parameter: Age (day) Value: 2 vs. 0
  misc_feature: MA Experiment 108462 PARAMETER Experiment Name: At_Germinating_Seeds_cDNA_P Parameter: Tissue Value: Germinating Seeds
  misc_feature: MA Experiment ID: 108463 Result: Up-regulated in Transcription
  misc_feature: MA Experiment 108463 PARAMETER Experiment Name: At_Germinating_Seeds_cDNA_P Parameter: Age (day) Value: 3 vs. 0
  misc_feature: MA Experiment 108463 PARAMETER Experiment Name: At_Germinating_Seeds_cDNA_P Parameter: Tissue Value: Germinating Seeds
  misc_feature: MA Experiment ID: 108464 Result: Up-regulated in Transcription
  misc_feature: MA Experiment 108464 PARAMETER Experiment Name: At_Germinating_Seeds_cDNA_P Parameter: Age (day) Value: 4 vs. 0
  misc_feature: MA Experiment 108464 PARAMETER Experiment Name: At_Germinating_Seeds_cDNA_P Parameter: Tissue Value: Germinating Seeds
  misc_feature: MA Experiment ID: 108569 Result: Up-regulated in Transcription
  misc_feature: MA Experiment 108569 PARAMETER Experiment Name: At_0.001%_MeJA__cDNA_P Parameter: Timepoint (hr) Value: 6
  misc_feature: MA Experiment 108569 PARAMETER Experiment Name: At_0.001%_MeJA__cDNA_P Parameter: Tissue Value: Aerial
  misc_feature: MA Experiment 108569 PARAMETER Experiment Name: At_0.001%_MeJA__cDNA_P Parameter: Treatment Value: 0.001% MeJA vs. No Treatment
  misc_feature: MA Experiment ID: 108573 Result: Up-regulated in Transcription
  misc_feature: MA Experiment 108573 PARAMETER Experiment Name: At_Drought_cDNA_P Parameter: Timepoint (hr) Value: 6
  misc_feature: MA Experiment 108573 PARAMETER Experiment Name: At_Drought_cDNA_P Parameter: Tissue Value: Aerial
  misc_feature: MA Experiment 108573 PARAMETER Experiment Name: At_Drought_cDNA_P Parameter: Treatment Value: Drought vs. No Drought
  misc_feature: MA Experiment ID: 108576 Result: Up-regulated in Transcription
  misc_feature: MA Experiment 108576 PARAMETER Experiment Name: At_42deg_Heat_cDNA_P Parameter: Temperature (deg C) Value: 42 vs. 22
  misc_feature: MA Experiment 108576 PARAMETER Experiment Name: At_42deg_Heat_cDNA_P Parameter: Timepoint (hr) Value: 1
  misc_feature: MA Experiment 108576 PARAMETER Experiment Name: At_42deg_Heat_cDNA_P Parameter: Tissue Value: Aerial
  misc_feature: MA Experiment ID: 108577 Result: Up-regulated in Transcription
  misc_feature: MA Experiment 108577 PARAMETER Experiment Name: At_42deg_Heat_cDNA_P Parameter: Temperature (deg C) Value: 42 vs. 22
  misc_feature: MA Experiment 108577 PARAMETER Experiment Name: At_42deg_Heat_cDNA_P Parameter: Timepoint (hr) Value: 6
  misc_feature: MA Experiment 108577 PARAMETER Experiment Name: At_42deg_Heat_cDNA_P Parameter: Tissue Value: Aerial
  misc_feature: MA Experiment ID: 108579 Result: Down-regulated in Transcription
  misc_feature: MA Experiment 108579 PARAMETER Experiment Name: At_4deg_Cold_cDNA_P Parameter: Temperature (deg C) Value: 4 vs. 22
  misc_feature: MA Experiment 108579 PARAMETER Experiment Name: At_4deg_Cold_cDNA_P Parameter: Timepoint (hr) Value: 6
  misc_feature: MA Experiment 108579 PARAMETER Experiment Name: At_4deg_Cold_cDNA_P Parameter: Tissue Value: Aerial
  misc_feature: MA Experiment ID: 108595 Result: Down-regulated in Transcription
  misc_feature: MA Experiment 108595 PARAMETER Experiment Name: At_Ler-pi_Ovule_cDNA_P Parameter: Plant Line Value: null
  misc_feature: MA Experiment ID: 20000087 Result: Down-regulated in Transcription
  misc_feature: MA Experiment 20000087 PARAMETER Experiment Name: At_100uM_ABA_Mutants_cDNA_P Parameter: Plant Line Value: WS
  misc_feature: MA Experiment 20000087 PARAMETER Experiment Name: At_100uM_ABA_Mutants_cDNA_P Parameter: Timepoint (hr) Value: 6
  misc_feature: MA Experiment 20000087 PARAMETER Experiment Name: At_100uM_ABA_Mutants_cDNA_P Parameter: Tissue Value: Aerial
  misc_feature: MA Experiment 20000087 PARAMETER Experiment Name: At_100uM_ABA_Mutants_cDNA_P Parameter: Treatment Value: 100uM ABA vs. No Treatment
  misc_feature: MA Experiment ID: 20000093 Result: Up-regulated in Transcription
  misc_feature: MA Experiment 20000093 PARAMETER Experiment Name: At_42deg_Heat_cDNA_P Parameter: Temperature (deg C) Value: 42 vs. 22
  misc_feature: MA Experiment 20000093 PARAMETER Experiment Name: At_42deg_Heat_cDNA_P Parameter: Timepoint (hr) Value: 0.5
  misc_feature: MA Experiment 20000093 PARAMETER Experiment Name: At_42deg_Heat_cDNA_P Parameter: Tissue Value: Aerial
  misc_feature: MA Experiment ID: 20000112 Result: Up-regulated in Transcription
  misc_feature: MA Experiment 20000112 PARAMETER Experiment Name: At_42deg_Heat_cDNA_P Parameter: Temperature (deg C) Value: 42 vs. 22
  misc_feature: MA Experiment 20000112 PARAMETER Experiment Name: At_42deg_Heat_cDNA_P Parameter: Timepoint (hr) Value: 2
  misc_feature: MA Experiment 20000112 PARAMETER Experiment Name: At_42deg_Heat_cDNA_P Parameter: Tissue Value: Aerial
  misc_feature: MA Experiment ID: 20000113 Result: Up-regulated in Transcription
  misc_feature: MA Experiment 20000113 PARAMETER Experiment Name: At_42deg_Heat_cDNA_P Parameter: Temperature (deg C) Value: 42 vs. 22
  misc_feature: MA Experiment 20000113 PARAMETER Experiment Name: At_42deg_Heat_cDNA_P Parameter: Timepoint (hr) Value: 8
  misc_feature: MA Experiment 20000113 PARAMETER Experiment Name: At_42deg_Heat_cDNA_P Parameter: Tissue Value: Aerial
  misc_feature: MA Experiment ID: 20000144 Result: Up-regulated in Transcription
  misc_feature: MA Experiment 20000144 PARAMETER Experiment Name: At_42deg_Heat_cDNA_P Parameter: Temperature (deg C) Value: 42 vs. 22
  misc_feature: MA Experiment 20000144 PARAMETER Experiment Name: At_42deg_Heat_cDNA_P Parameter: Timepoint (hr) Value: 1
  misc_feature: MA Experiment 20000144 PARAMETER Experiment Name: At_42deg_Heat_cDNA_P Parameter: Tissue Value: Aerial
  misc_feature: MA Experiment ID: 20000171 Result: Up-regulated in Transcription
  misc_feature: MA Experiment 20000171 PARAMETER Experiment Name: At_42deg_Heat_P Parameter: Age (day) Value: 14
  misc_feature: MA Experiment 20000171 PARAMETER Experiment Name: At_42deg_Heat_P Parameter: Organism Value: A. thaliana
  misc_feature: MA Experiment 20000171 PARAMETER Experiment Name: At_42deg_Heat_P Parameter: Plant Line Value: WS
  misc_feature: MA Experiment 20000171 PARAMETER Experiment Name: At_42deg_Heat_P Parameter: Temperature (deg C) Value: 42 vs. 22
  misc_feature: MA Experiment 20000171 PARAMETER Experiment Name: At_42deg_Heat_P Parameter: Timepoint (hr) Value: 1
  misc_feature: MA Experiment 20000171 PARAMETER Experiment Name: At_42deg_Heat_P Parameter: Tissue Value: Aerial
  misc_feature: MA Experiment ID: 20000173 Result: Up-regulated in Transcription
  misc_feature: MA Experiment 20000173 PARAMETER Experiment Name: At_42deg_Heat_P Parameter: Age (day) Value: 14
  misc_feature: MA Experiment 20000173 PARAMETER Experiment Name: At_42deg_Heat_P Parameter: Organism Value: A. thaliana
  misc_feature: MA Experiment 20000173 PARAMETER Experiment Name: At_42deg_Heat_P Parameter: Plant Line Value: WS
  misc_feature: MA Experiment 20000173 PARAMETER Experiment Name: At_42deg_Heat_P Parameter: Temperature (deg C) Value: 42 vs. 22
  misc_feature: MA Experiment 20000173 PARAMETER Experiment Name: At_42deg_Heat_P Parameter: Timepoint (hr) Value: 6
  misc_feature: MA Experiment 20000173 PARAMETER Experiment Name: At_42deg_Heat_P Parameter: Tissue Value: Aerial
  misc_feature: MA Experiment ID: 20000179 Result: Up-regulated in Transcription
  misc_feature: MA Experiment 20000179 PARAMETER Experiment Name: At_Germinating_Seeds_P Parameter: Age (hr) Value: 6 vs. 0
  misc_feature: MA Experiment 20000179 PARAMETER Experiment Name: At_Germinating_Seeds_P Parameter: Tissue Value: Germinating Seeds
  misc_feature: MA Experiment ID: 20000180 Result: Up-regulated in Transcription
  misc_feature: MA Experiment 20000180 PARAMETER Experiment Name: At_Germinating_Seeds_P Parameter: Age (hr) Value: 24 vs. 0
  misc_feature: MA Experiment 20000180 PARAMETER Experiment Name: At_Germinating_Seeds_P Parameter: Tissue Value: Germinating Seeds
  misc_feature: MA Experiment ID: 20000794 Result: Down-regulated in Transcription
  misc_feature: MA Experiment 20000794 PARAMETER Experiment Name: At_Petals_P Parameter: Age (day) Value: 23-25 days
  misc_feature: MA Experiment 20000794 PARAMETER Experiment Name: At_Petals_P Parameter: Plant Line Value: WS
  misc_feature: MA Experiment 20000794 PARAMETER Experiment Name: At_Petals_P Parameter: Tissue Value: Petals vs. Whole plant
  misc_feature: MA Experiment ID: 20001248 Result: Up-regulated in Transcription
  misc_feature: MA Experiment 20001248 PARAMETER Experiment Name: At_Far-red-induction_P Parameter: Age (day) Value: 7
  misc_feature: MA Experiment 20001248 PARAMETER Experiment Name: At_Far-red-induction_P Parameter: Light Value: Far-red vs. White
  misc_feature: MA Experiment 20001248 PARAMETER Experiment Name: At_Far-red-induction_P Parameter: Organism Value: A. thaliana
  misc_feature: MA Experiment 20001248 PARAMETER Experiment Name: At_Far-red-induction_P Parameter: Plant Line Value: Columbia
  misc_feature: MA Experiment 20001248 PARAMETER Experiment Name: At_Far-red-induction_P Parameter: Timepoint (hr) Value: 4
  misc_feature: MA Experiment 20001248 PARAMETER Experiment Name: At_Far-red-induction_P Parameter: Tissue Value: Whole Plant
  misc_feature: MA Experiment ID: 20001450 Result: Up-regulated in Transcription
  misc_feature: MA Experiment 20001450 PARAMETER Experiment Name: At_Far-red-induction_P Parameter: Age (day) Value: 7
  misc_feature: MA Experiment 20001450 PARAMETER Experiment Name: At_Far-red-induction_P Parameter: Light Value: Far-red vs. White
  misc_feature: MA Experiment 20001450 PARAMETER Experiment Name: At_Far-red-induction_P Parameter: Organism Value: A. thaliana
  misc_feature: MA Experiment 20001450 PARAMETER Experiment Name: At_Far-red-induction_P Parameter: Plant Line Value: Columbia
  misc_feature: MA Experiment 20001450 PARAMETER Experiment Name: At_Far-red-induction_P Parameter: Timepoint (hr) Value: 8
  misc_feature: MA Experiment 20001450 PARAMETER Experiment Name: At_Far-red-induction_P Parameter: Tissue Value: Whole Plant
  misc_feature: MA Experiment ID: 20001451 Result: Up-regulated in Transcription
  misc_feature: MA Experiment 20001451 PARAMETER Experiment Name: At_Far-red-induction_P Parameter: Age (day) Value: 7
  misc_feature: MA Experiment 20001451 PARAMETER Experiment Name: At_Far-red-induction_P Parameter: Light Value: Far-red vs. White
  misc_feature: MA Experiment 20001451 PARAMETER Experiment Name: At_Far-red-induction_P Parameter: Organism Value: A. thaliana
  misc_feature: MA Experiment 20001451 PARAMETER Experiment Name: At_Far-red-induction_P Parameter: Plant Line Value: Columbia
  misc_feature: MA Experiment 20001451 PARAMETER Experiment Name: At_Far-red-induction_P Parameter: Timepoint (hr) Value: 24
  misc_feature: MA Experiment 20001451 PARAMETER Experiment Name: At_Far-red-induction_P Parameter: Tissue Value: Whole Plant
cgatttctccgctcttctccactcttcttctctgttctatcgcagacatttttgtttatatgcatacataataataatacactcttgtcaggatttttgattctctctttggttttctcggaaaaatgtctgcgatactccaaggagctggagctgcaacggctctctcgccgtttaattctatcgattccaacaaactcgttgctccttctcgctcttctctttcagtgaggagcaagagatacattgttgccggatctgatagtaaaagctttggttctagcctcgtagctcgtcgctctgagccgttgataccaaatgctgttacgacgaaggcggacactgctgcgagctctacttcatcaaagcctggacatgagctattacttttcgaggctcttcaagaaggtctagaagaagagatggacagagatccacatgtatgtgtcatgggtgaagatgtaggccattacggaggctcatacaaagtaactaaaggcctagctgataagtttggcgatctcagggttctggacactccaatctgtgaaaacgccttcaccggtatgggcattggagccgccatgacaggactaagacccgtcatcgaaggtatgaacatggggtttctactcttagccttcaaccaaatctccaacaactgtggtatgcttcactatacatccggtggtcaattcactatcccggttgttatccgtgggcctggaggtgtgggccggcagctcggagccgagcattcccagcgtctcgagtcttacttccagtcaatccctgggatccagatggtggcttgctcaacaccttacaacgctaaaggattgatgaaagcggcgataagaagtgagaatcctgtgattctgtttgaacacgttctgctctataacctcaaggagagtattccggatgaagaatacatatgtaatctggaagaagcagaaatggtcagacccggtgaacacatcacgatactgacgtattcaaggatgaggtaccatgtaatgcaggctgcaaagacgctggtgaacaaagggtatgatccagaggttatcgacataaggtcgttgaagccgtttgatctctacacaattggaaactcggtgaagaagacacaccgggttttgattgtggaggaatgtatgagaacgggaggaatcggagccagtttgacggctgcaataaacgagaactttcatgattacttagatgctccggtgatgtgtttgtcttctcaggatgtcccaactccttacgccggtacattggaagaatggacggttgttcagccagctcagatcgtcactgccgtcgaacaactttgccagtaattgctttttttacggtgattgtgttttacccttttttactttttgttactgtttgtcttcgatggaaaatgcttgtgaaatgaaaactctgaattttactcttatgatatgaacatttatattttctatagataataacttcc

SEQ ID NO: 99424 - protein, 406 aa, Arabidopsis thaliana; identical to SEQ ID NO: 24500
  peptide (1)..(406): Ceres Seq. ID no. 13602858
  misc_feature (275)..(397): Pfam Name: Transketolase, C-terminal domain Pfam Description: Transketolase, C-terminal domain
  misc_feature (1)..(406): Homolog of NCBI NO: 15226781 NR Description: pyruvate dehydrogenase E1 beta subunit -related thaliana] >gi|25284457|pir||E84758 probable pyruvate
  misc_feature (1)..(406): Homolog of NCBI NO: 21593379 NR Description: putative pyruvate dehydrogenase E1 beta subunit
  misc_feature (1)..(406): Homolog of NCBI NO: 2454184 NR Description: pyruvate dehydrogenase E1 beta subunit thaliana] >gi|21593321|gb|AAM65270.1| pyruvate dehydrogenase E1
  misc_feature (1)..(406): Homolog of NCBI NO: 15220670 NR Description: pyruvate dehydrogenase E1 beta subunit -related thaliana] >gi|25284456|pir||C86425 probable pyruvate
  misc_feature (120)..(406): Homolog of NCBI NO: 2982328 NR Description: pyruvate dehydrogenase E1 beta subunit [Picea
  misc_feature (85)..(406): Homolog of NCBI NO: 22711921 NR Description: pyruvate dehydrogenase E1 component beta subunit globosum] >gi|22416925|gb|AAM96525.1| beta subunit of pyruvate
  misc_feature (85)..(406): Homolog of NCBI NO: 22297748 NR Description: pyruvate dehydrogenase E1 component beta subunit
  misc_feature (85)..(404): Homolog of NCBI NO: 17227618 NR Description: pyruvate dehydrogenase E1 beta subunit [Nostoc
  misc_feature (85)..(404): Homolog of NCBI NO: 23041427 NR Description: hypothetical protein [Trichodesmium erythraeum
  misc_feature (85)..(404): Homolog of NCBI NO: 16330037 NR Description: pyruvate dehydrogenase E1 beta subunit sp. PCC 6803] >gi|7431577|pir||S77342 probable pyruvate

SEQ ID NO: 99425 - protein, 307 aa, Arabidopsis thaliana; identical to SEQ ID NO: 24501
  peptide (1)..(307): Ceres Seq. ID no. 13602859
  misc_feature (176)..(298): Pfam Name: Transketolase, C-terminal domain Pfam Description: Transketolase, C-terminal domain
  misc_feature (1)..(307): Homolog of NCBI NO: 15226781 NR Description: pyruvate dehydrogenase E1 beta subunit -related thaliana] >gi|25284457|pir||E84758 probable pyruvate
  misc_feature (1)..(307): Homolog of NCBI NO: 21593379 NR Description: putative pyruvate dehydrogenase E1 beta subunit
  misc_feature (1)..(307): Homolog of NCBI NO: 2454184 NR Description: pyruvate dehydrogenase E1 beta subunit thaliana] >gi|21593321|gb|AAM65270.1| pyruvate dehydrogenase E1
  misc_feature (1)..(307): Homolog of NCBI NO: 15220670 NR Description: pyruvate dehydrogenase E1 beta subunit -related thaliana] >gi|25284456|pir||C86425 probable pyruvate
  misc_feature (21)..(307): Homolog of NCBI NO: 2982328 NR Description: pyruvate dehydrogenase E1 beta subunit [Picea
  misc_feature (1)..(307): Homolog of NCBI NO: 22711921 NR Description: pyruvate dehydrogenase E1 component beta subunit globosum] >gi|22416925|gb|AAM96525.1| beta subunit of pyruvate
  misc_feature (1)..(307): Homolog of NCBI NO: 22297748 NR Description: pyruvate dehydrogenase E1 component beta subunit
  misc_feature (1)..(305): Homolog of NCBI NO: 17227618 NR Description: pyruvate dehydrogenase E1 beta subunit [Nostoc
  misc_feature (1)..(305): Homolog of NCBI NO: 23041427 NR Description: hypothetical protein [Trichodesmium erythraeum
  misc_feature (1)..(305): Homolog of NCBI NO: 16330037 NR Description: pyruvate dehydrogenase E1 beta subunit sp. PCC 6803] >gi|7431577|pir||S77342 probable pyruvate

SEQ ID NO: 99426 - protein, 298 aa, Arabidopsis thaliana; identical to SEQ ID NO: 24502
  peptide (1)..(298): Ceres Seq. ID no. 13602860
  misc_feature (167)..(289): Pfam Name: Transketolase, C-terminal domain Pfam Description: Transketolase, C-terminal domain
  misc_feature (1)..(298): Homolog of NCBI NO: 15226781 NR Description: pyruvate dehydrogenase E1 beta subunit -related thaliana] >gi|25284457|pir||E84758 probable pyruvate
  misc_feature (1)..(298): Homolog of NCBI NO: 21593379 NR Description: putative pyruvate dehydrogenase E1 beta subunit
  misc_feature (1)..(298): Homolog of NCBI NO: 2454184 NR Description: pyruvate dehydrogenase E1 beta subunit thaliana] >gi|21593321|gb|AAM65270.1| pyruvate dehydrogenase E1
  misc_feature (1)..(298): Homolog of NCBI NO: 15220670 NR Description: pyruvate dehydrogenase E1 beta subunit -related thaliana] >gi|25284456|pir||C86425 probable pyruvate
  misc_feature (12)..(298): Homolog of NCBI NO: 2982328 NR Description: pyruvate dehydrogenase E1 beta subunit [Picea
  misc_feature (1)..(298): Homolog of NCBI NO: 22711921 NR Description: pyruvate dehydrogenase E1 component beta subunit globosum] >gi|22416925|gb|AAM96525.1| beta subunit of pyruvate
  misc_feature (1)..(298): Homolog of NCBI NO: 22297748 NR Description: pyruvate dehydrogenase E1 component beta subunit
  misc_feature (1)..(296): Homolog of NCBI NO: 17227618 NR Description: pyruvate dehydrogenase E1 beta subunit [Nostoc
  misc_feature (1)..(296): Homolog of NCBI NO: 23041427 NR Description: hypothetical protein [Trichodesmium erythraeum
  misc_feature (1)..(296): Homolog of NCBI NO: 16330037 NR Description: pyruvate dehydrogenase E1 beta subunit sp. PCC 6803] >gi|7431577|pir||S77342 probable pyruvate

SEQ ID NO: 99427 - DNA, 1464 bp, Arabidopsis thaliana
  misc_feature (1)..(1464): Ceres Seq. ID no. 13602875
  misc_feature: MA Experiment ID: 20000185 Result: Down-regulated in Transcription
  misc_feature: MA Experiment 20000185 PARAMETER Experiment Name: At_Roots__P Parameter: Age (day) Value: 7 vs. 21
  misc_feature: MA Experiment 20000185 PARAMETER Experiment Name: At_Roots__P Parameter: Organism Value: A. thaliana
  misc_feature: MA Experiment 20000185 PARAMETER Experiment Name: At_Roots__P Parameter: Tissue Value: Roots vs. Whole Plant
  misc_feature: MA Experiment ID: 20000264 Result: Down-regulated in Transcription
  misc_feature: MA Experiment 20000264 PARAMETER Experiment Name: At_Open_Flower_P Parameter: Age (day) Value: 21
  misc_feature: MA Experiment 20000264 PARAMETER Experiment Name: At_Open_Flower_P Parameter: Plant Line Value: WS
  misc_feature: MA Experiment 20000264 PARAMETER Experiment Name: At_Open_Flower_P Parameter: Tissue Value: Open Flower vs. Whole Plant
  misc_feature: MA Experiment ID: 20000439 Result: Down-regulated in Transcription
  misc_feature: MA Experiment 20000439 PARAMETER Experiment Name: At_Roots__P Parameter: Age (day) Value: 14 vs. 21
  misc_feature: MA Experiment 20000439 PARAMETER Experiment Name: At_Roots__P Parameter: Organism Value: A. thaliana
  misc_feature: MA Experiment 20000439 PARAMETER Experiment Name: At_Roots__P Parameter: Tissue Value: Roots vs. Whole Plant
  misc_feature: MA Experiment ID: 20000495 Result: Down-regulated in Transcription
  misc_feature: MA Experiment 20000495 PARAMETER Experiment Name: At_Guard_Cells_P Parameter: Harvest Date Value: 8/2/2002
  misc_feature: MA Experiment 20000495 PARAMETER Experiment Name: At_Guard_Cells_P Parameter: Organism Value: A. thaliana
  misc_feature: MA Experiment 20000495 PARAMETER Experiment Name: At_Guard_Cells_P Parameter: Tissue Value: Guard Cells vs. Leaves
  misc_feature: MA Experiment ID: 20001247 Result: Up-regulated in Transcription
  misc_feature: MA Experiment 20001247 PARAMETER Experiment Name: At_Far-red-induction_P Parameter: Age (day) Value: 7
  misc_feature: MA Experiment 20001247 PARAMETER Experiment Name: At_Far-red-induction_P Parameter: Light Value: Far-red vs. White
  misc_feature: MA Experiment 20001247 PARAMETER Experiment Name: At_Far-red-induction_P Parameter: Organism Value: A. thaliana
  misc_feature: MA Experiment 20001247 PARAMETER Experiment Name: At_Far-red-induction_P Parameter: Plant Line Value: Columbia
  misc_feature: MA Experiment 20001247 PARAMETER Experiment Name: At_Far-red-induction_P Parameter: Timepoint (hr) Value: 1
  misc_feature: MA Experiment 20001247 PARAMETER Experiment Name: At_Far-red-induction_P Parameter: Tissue Value: Whole Plant
ataattctagccacaatctttttagggtttcacaagttcacttaaaaagttgaaaagagtctttcttcttcaactattgtaaatgcgaaatggatcgaagagatgcaatgggattatccgggtcaggttcttactatatccatagaggattatccgggtcgggtcctccaacgtttcatggatcaccacagcaacagcaaggtcttcgtcacttacctaatcaaaactctccattcgggtcaggctccactggtttcggatctccttctttacacggtgatccttctctggcaacagcagccggaggagccggagctcttcctcatcatatcggcgttaatatgattgctcctcctccacctcccagtgaaactccgatgaaacgaaagagaggacggcctagaaaatacggtcaagacggctctgtttctttggctctgtcgtcttcctctgtttcgaccattactcccaacaactctaacaaacgcggccgtggtcgacctccgggctccggcaagaaacagagaatggcttccgttggtgaactgatgccttcatcttctggaatgagcttcacgccacatgttatcgcggtttcaataggagaagatattgcatcaaaggttatagctttctctcaacaaggtccgagagccatttgcgttttatctgcaagtggtgcagtctctactgcaacacttattcaaccatcagcatctcccggagccattaaatacgagggccggtttgaaatcctagcgttatcaacatcttatatagtggcaactgatggaagcttccgtaaccgaactggaaacttatcggtttcgcttgctagccccgatgggcgtgtgattggcggtgccattggtgggcctttaatagctgcaagtcctgttcaggttattgtagggagctttatatgggcagctccaaagatcaagagcaagaaacgagaagaagaagcttctgaagttgttcaagaaactgatgatcaccacgttctggacaataataacaacacgatttcgcctgtccctcagcagcagccaaaccaaaacctgatttggtcaacaggttcaaggcaaatggatatgcgtcatgctcatgctgatattgatttaatgcgcggttgatgatagcgagaaagaactctgtgtatataaagcatggaatctaggaagaagaagaaggaatataagctaacctctgaacaaaagtatgtggaaatgttagggaaaaagattatgtggaaatgttagggaaaaagattaactctattagtgtacctctcatatctctaagcttgtttggttttactgtttctgtgactctgaagatttgcagagttcctttctttctctgttttagattgttcagtctttatgtaatttgcttgcaattctgattctacagcttagattcagtacattgtgtagaagtttacatgggaacctgaaaatt

SEQ ID NO: 99428 - protein, 348 aa, Arabidopsis thaliana; identical to SEQ ID NO: 36793
  peptide (1)..(348): Ceres Seq. ID no. 13602876
  misc_feature (1)..(348): Homolog of NCBI NO: 15225902 NR Description: AT-hook DNA-binding protein -related [Arabidopsis
  misc_feature (1)..(348): Homolog of NCBI NO: 30695388 NR Description: DNA-binding protein -related [Arabidopsis
  misc_feature (7)..(348): Homolog of NCBI NO: 11281387 NR Description: probable DNA-binding protein - Arabidopsis
  misc_feature (1)..(348): Homolog of NCBI NO: 7488825 NR Description: probable DNA-binding protein - garden pea
  misc_feature (1)..(337): Homolog of NCBI NO: 2213534 NR Description: DNA-binding PD1-like protein [Pisum sativum]
  misc_feature (1)..(348): Homolog of NCBI NO: 30696854 NR Description: DNA-binding protein -related [Arabidopsis
  misc_feature (1)..(321): Homolog of NCBI NO: 6633838 NR Description: F2K11.15 [Arabidopsis thaliana]
  misc_feature (1)..(348): Homolog of NCBI NO: 22330402 NR Description: DNA-binding protein -related [Arabidopsis
  misc_feature (1)..(317): Homolog of NCBI NO: 6633838 NR Description: F2K11.15 [Arabidopsis thaliana]
  misc_feature (89)..(348): Homolog of NCBI NO: 6633838 NR Description: F2K11.15 [Arabidopsis thaliana]

SEQ ID NO: 99429 - protein, 342 aa, Arabidopsis thaliana; identical to SEQ ID NO: 36794
  peptide (1)..(342): Ceres Seq. ID no. 13602877
  misc_feature (1)..(342): Homolog of NCBI NO: 15225902 NR Description: AT-hook DNA-binding protein -related [Arabidopsis
  misc_feature (1)..(342): Homolog of NCBI NO: 30695388 NR Description: DNA-binding protein -related [Arabidopsis
  misc_feature (1)..(342): Homolog of NCBI NO: 11281387 NR Description: probable DNA-binding protein - Arabidopsis
  misc_feature (1)..(342): Homolog of NCBI NO: 7488825 NR Description: probable DNA-binding protein - garden pea
  misc_feature (1)..(331): Homolog of NCBI NO: 2213534 NR Description: DNA-binding PD1-like protein [Pisum sativum]
  misc_feature (1)..(342): Homolog of NCBI NO: 30696854 NR Description: DNA-binding protein -related [Arabidopsis
  misc_feature (1)..(315): Homolog of NCBI NO: 6633838 NR Description: F2K11.15 [Arabidopsis thaliana]
  misc_feature (1)..(342): Homolog of NCBI NO: 22330402 NR Description: DNA-binding protein -related [Arabidopsis
  misc_feature (1)..(311): Homolog of NCBI NO: 6633838 NR Description: F2K11.15 [Arabidopsis thaliana]
  misc_feature (83)..(342): Homolog of NCBI NO: 6633838 NR Description: F2K11.15 [Arabidopsis thaliana]

SEQ ID NO: 99430 - protein, 264 aa, Arabidopsis thaliana; identical to SEQ ID NO: 36795
  peptide (1)..(264): Ceres Seq. ID no. 13602878
  misc_feature (1)..(264): Homolog of NCBI NO: 15225902 NR Description: AT-hook DNA-binding protein -related [Arabidopsis
  misc_feature (1)..(264): Homolog of NCBI NO: 30695388 NR Description: DNA-binding protein -related [Arabidopsis
  misc_feature (1)..(264): Homolog of NCBI NO: 11281387 NR Description: probable DNA-binding protein - Arabidopsis
  misc_feature (1)..(264): Homolog of NCBI NO: 7488825 NR Description: probable DNA-binding protein - garden pea
  misc_feature (1)..(253): Homolog of NCBI NO: 2213534 NR Description: DNA-binding PD1-like protein [Pisum sativum]
  misc_feature (1)..(264): Homolog of NCBI NO: 30696854 NR Description: DNA-binding protein -related [Arabidopsis
  misc_feature (1)..(237): Homolog of NCBI NO: 6633838 NR Description: F2K11.15 [Arabidopsis thaliana]
  misc_feature (1)..(264): Homolog of NCBI NO: 22330402 NR Description: DNA-binding protein -related [Arabidopsis
  misc_feature (1)..(233): Homolog of NCBI NO: 6633838 NR Description: F2K11.15 [Arabidopsis thaliana]
  misc_feature (5)..(264): Homolog of NCBI NO: 6633838 NR Description: F2K11.15 [Arabidopsis thaliana]

SEQ ID NO: 99431 - DNA, 976 bp, Arabidopsis thaliana
  misc_feature (1)..(976): Ceres Seq. ID no. 13610689
  misc_feature: MA Experiment ID: 108435 Result: Down-regulated in Transcription
  misc_feature: MA Experiment 108435 PARAMETER Experiment Name: At_stm_Mutants_cDNA_P Parameter: Plant Line Value: wt Landsburg vs stm
  misc_feature: MA Experiment 108435 PARAMETER Experiment Name: At_stm_Mutants_cDNA_P Parameter: Tissue Value: Shoot Apical Meristem Region
  misc_feature: MA Experiment ID: 108462 Result: Down-regulated in Transcription
  misc_feature: MA Experiment 108462 PARAMETER Experiment Name: At_Germinating_Seeds_cDNA_P Parameter: Age (day) Value: 2 vs. 0
  misc_feature: MA Experiment 108462 PARAMETER Experiment Name: At_Germinating_Seeds_cDNA_P Parameter: Tissue Value: Germinating Seeds
  misc_feature: MA Experiment ID: 108463 Result: Down-regulated in Transcription
  misc_feature: MA Experiment 108463 PARAMETER Experiment Name: At_Germinating_Seeds_cDNA_P Parameter: Age (day) Value: 3 vs. 0
  misc_feature: MA Experiment 108463 PARAMETER Experiment Name: At_Germinating_Seeds_cDNA_P Parameter: Tissue Value: Germinating Seeds
  misc_feature: MA Experiment ID: 108464 Result: Down-regulated in Transcription
  misc_feature: MA Experiment 108464 PARAMETER Experiment Name: At_Germinating_Seeds_cDNA_P Parameter: Age (day) Value: 4 vs. 0
  misc_feature: MA Experiment 108464 PARAMETER Experiment Name: At_Germinating_Seeds_cDNA_P Parameter: Tissue Value: Germinating Seeds
  misc_feature: MA Experiment ID: 108501 Result: Up-regulated in Transcription
  misc_feature: MA Experiment 108501 PARAMETER Experiment Name: At_ap2_floral_buds_cDNA_P Parameter: Plant Line Value: ap2 (Ler.)
  misc_feature: MA Experiment 108501 PARAMETER Experiment Name: At_ap2_floral_buds_cDNA_P Parameter: Tissue Value: Closed Flower
  misc_feature: MA Experiment ID: 108573 Result: Down-regulated in Transcription
  misc_feature: MA Experiment 108573 PARAMETER Experiment Name: At_Drought_cDNA_P Parameter: Timepoint (hr) Value: 6
  misc_feature: MA Experiment 108573 PARAMETER Experiment Name: At_Drought_cDNA_P Parameter: Tissue Value: Aerial
  misc_feature: MA Experiment 108573 PARAMETER Experiment Name: At_Drought_cDNA_P Parameter: Treatment Value: Drought vs. No Drought
  misc_feature: MA Experiment ID: 108579 Result: Up-regulated in Transcription
  misc_feature: MA Experiment 108579 PARAMETER Experiment Name: At_4deg_Cold_cDNA_P Parameter: Temperature (deg C) Value: 4 vs. 22
  misc_feature: MA Experiment 108579 PARAMETER Experiment Name: At_4deg_Cold_cDNA_P Parameter: Timepoint (hr) Value: 6
  misc_feature: MA Experiment 108579 PARAMETER Experiment Name: At_4deg_Cold_cDNA_P Parameter: Tissue Value: Aerial
  misc_feature: MA Experiment ID: 108585 Result: Down-regulated in Transcription
  misc_feature: MA Experiment 108585 PARAMETER Experiment Name: At_5mM_NaNP_cDNA_P Parameter: Timepoint (hr) Value: 6
  misc_feature: MA Experiment 108585 PARAMETER Experiment Name: At_5mM_NaNP_cDNA_P Parameter: Tissue Value: Aerial
  misc_feature: MA Experiment 108585 PARAMETER Experiment Name: At_5mM_NaNP_cDNA_P Parameter: Treatment Value: null
  misc_feature: MA Experiment ID: 108668 Result: Down-regulated in Transcription
  misc_feature: MA Experiment 108668 PARAMETER Experiment Name: At_2mM_SA_cDNA_P Parameter: Plant Line Value: WS
  misc_feature: MA Experiment 108668 PARAMETER Experiment Name: At_2mM_SA_cDNA_P Parameter: Timepoint (hr) Value: 6
  misc_feature: MA Experiment 108668 PARAMETER Experiment Name: At_2mM_SA_cDNA_P Parameter: Treatment Value: 2mM SA vs. No Treatment
  misc_feature: MA Experiment ID: 20000184 Result: Up-regulated in Transcription
  misc_feature: MA Experiment 20000184 PARAMETER Experiment Name: At_Shoots__P Parameter: Age (day) Value: 7
  misc_feature: MA Experiment 20000184 PARAMETER Experiment Name: At_Shoots__P Parameter: Tissue Value: Shoots vs. Whole Plant
  misc_feature: MA Experiment ID: 20000224 Result: Up-regulated in Transcription
  misc_feature: MA Experiment ID: 20001451 Result: Up-regulated in Transcription
  misc_feature: MA Experiment 20001451 PARAMETER Experiment Name: At_Far-red-induction_P Parameter: Age (day) Value: 7
  misc_feature: MA Experiment 20001451 PARAMETER Experiment Name: At_Far-red-induction_P Parameter: Light Value: Far-red vs. White
  misc_feature: MA Experiment 20001451 PARAMETER Experiment Name: At_Far-red-induction_P Parameter: Organism Value: A. thaliana
  misc_feature: MA Experiment 20001451 PARAMETER Experiment Name: At_Far-red-induction_P Parameter: Plant Line Value: Columbia
  misc_feature: MA Experiment 20001451 PARAMETER Experiment Name: At_Far-red-induction_P Parameter: Timepoint (hr) Value: 24
  misc_feature: MA Experiment 20001451 PARAMETER Experiment Name: At_Far-red-induction_P Parameter: Tissue Value: Whole Plant
atgttcttaacccaaagaaacttttcattgagaccttctcttgttcatgactttcttcaacagactctcacgaccaggaaaaggactttgaatctttggctcaactttcccaaaacacccttctgctcacttctattcactgtcttgccatcatctctcccaagactctgtctcatcctttctctcctctgttttctcctccatccattctcatcttcctcttcttccttcttcttaatctctcttcttcttaccatttctcctctctcttcttcttcttcgttcgccttccttaacctaggaatccgaccacctttgcttgtccctaaaagctcaaaattgattttgctccaaccaatcttatcttcattatcccaaccaaatctctcactaatctccaacaacatcgaaacagagtttacctcttctctactcttccttacagaagttaaagctctcatgctctcatcacttccatggaggattttctctgcaaattcccactcagttctatctttataaacatcgtcttcgagcacttcatcagcaagctttgcccaatactcaaaaactcctgcacgaagattctttgagacccatttaagataagaagaaggcaaagtaccaagcattttgcccttgtgtttgccgaagtctatgattgtgtctctggcggctagggtttcgatgatttgaagttttttgattaagggtttagactgattggtggagaagataccattagatgaagaaagatttcttcttggtctgaaagatgatgatgatgagattctgaagatggtttttgttgttactgcagcagagtgaggactgtggaacaagaccaccgagaaactcattgttgtgtccccaaaatattgtctattttttcttgaatcctataaaatacatttagggggtgttattcgttaatggattttaatagaattgaaattcaacactaatttactgttat

SEQ ID NO: 99432 - protein, 173 aa, Arabidopsis thaliana
  peptide (1)..(173): Ceres Seq. ID no. 13610690
MFLTQRNFSLRPSLVHDFLQQTLTTRKRTLNLWLNFPKTPFCSLLFTVLPSSLPRLCLILSLLCFLLHPFSSSSSSFFLISLLLTISPLSSSSSFAFLNLGIRPPLLVPKSSKLILLQPILSSLSQPNLSLISNNIETEFTSSLLFLTEVKALMLSSLPWRIFSANSHSVLSL

SEQ ID NO: 99433 - DNA, 746 bp, Arabidopsis thaliana
  misc_feature (1)..(746): Ceres Seq. ID no. 13602891
  misc_feature: MA Experiment ID: 108585 Result: Up-regulated in Transcription
  misc_feature: MA Experiment 108585 PARAMETER Experiment Name: At_5mM_NaNP_cDNA_P Parameter: Timepoint (hr) Value: 6
  misc_feature: MA Experiment 108585 PARAMETER Experiment Name: At_5mM_NaNP_cDNA_P Parameter: Tissue Value: Aerial
  misc_feature: MA Experiment 108585 PARAMETER Experiment Name: At_5mM_NaNP_cDNA_P Parameter: Treatment Value: null
  misc_feature: MA Experiment ID: 20000185 Result: Up-regulated in Transcription
  misc_feature: MA Experiment 20000185 PARAMETER Experiment Name: At_Roots__P Parameter: Age (day) Value: 7 vs. 21
  misc_feature: MA Experiment 20000185 PARAMETER Experiment Name: At_Roots__P Parameter: Organism Value: A. thaliana
  misc_feature: MA Experiment 20000185 PARAMETER Experiment Name: At_Roots__P Parameter: Tissue Value: Roots vs. Whole Plant
  misc_feature: MA Experiment ID: 20000227 Result: Up-regulated in Transcription
  misc_feature: MA Experiment 20000227 PARAMETER Experiment Name: At_Root-Tips-vs-Tops_P Parameter: Tissue Value: Root Tips vs. Root Tops
  misc_feature: MA Experiment ID: 20000234 Result: Up-regulated in Transcription
  misc_feature: MA Experiment 20000234 PARAMETER Experiment Name: At_Siliques_P Parameter: Age (day) Value: 21
  misc_feature: MA Experiment 20000234 PARAMETER Experiment Name: At_Siliques_P Parameter: Organism Value: A. thaliana
  misc_feature: MA Experiment 20000234 PARAMETER Experiment Name: At_Siliques_P Parameter: Plant Line Value: WS
  misc_feature: MA Experiment 20000234 PARAMETER Experiment Name: At_Siliques_P Parameter: Tissue Value: Less Than 5mm Siliques vs. Whole Plant
  misc_feature: MA Experiment ID: 20000235 Result: Up-regulated in Transcription
  misc_feature: MA Experiment 20000235 PARAMETER Experiment Name: At_Siliques_P Parameter: Age (day) Value: 21
  misc_feature: MA Experiment 20000235 PARAMETER Experiment Name: At_Siliques_P Parameter: Organism Value: A. thaliana
  misc_feature: MA Experiment 20000235 PARAMETER Experiment Name: At_Siliques_P Parameter: Plant Line Value: WS
  misc_feature: MA Experiment 20000235 PARAMETER Experiment Name: At_Siliques_P Parameter: Tissue Value: 5-10mm Siliques vs. Whole Plant
  misc_feature: MA Experiment ID: 20000264 Result: Up-regulated in Transcription
  misc_feature: MA Experiment 20000264 PARAMETER Experiment Name: At_Open_Flower_P Parameter: Age (day) Value: 21
  misc_feature: MA Experiment 20000264 PARAMETER Experiment Name: At_Open_Flower_P Parameter: Plant Line Value: WS
  misc_feature: MA Experiment 20000264 PARAMETER Experiment Name: At_Open_Flower_P Parameter: Tissue Value: Open Flower vs. Whole Plant
  misc_feature: MA Experiment ID: 20000265 Result: Up-regulated in Transcription
  misc_feature: MA Experiment 20000265 PARAMETER Experiment Name: At_Open_Flower_P Parameter: Age (day) Value: 21
  misc_feature: MA Experiment 20000265 PARAMETER Experiment Name: At_Open_Flower_P Parameter: Plant Line Value: WS
  misc_feature: MA Experiment 20000265 PARAMETER Experiment Name: At_Open_Flower_P Parameter: Tissue Value: Closed Flower vs. Whole Plant
  misc_feature: MA Experiment ID: 20000286 Result: Up-regulated in Transcription
  misc_feature: MA Experiment 20000286 PARAMETER Experiment Name: At_Open_Flower_P Parameter: Age (day) Value: 21
  misc_feature: MA Experiment 20000286 PARAMETER Experiment Name: At_Open_Flower_P Parameter: Plant Line Value: WS
  misc_feature: MA Experiment 20000286 PARAMETER Experiment Name: At_Open_Flower_P Parameter: Tissue Value: Half Open vs. Whole Plant
  misc_feature: MA Experiment ID: 20000439 Result: Up-regulated in Transcription
  misc_feature: MA Experiment 20000439 PARAMETER Experiment Name: At_Roots__P Parameter: Age (day) Value: 14 vs. 21
  misc_feature: MA Experiment 20000439 PARAMETER Experiment Name: At_Roots__P Parameter: Organism Value: A. thaliana
  misc_feature: MA Experiment 20000439 PARAMETER Experiment Name: At_Roots__P Parameter: Tissue Value: Roots vs. Whole Plant
  misc_feature: MA Experiment ID: 20000496 Result: Down-regulated in Transcription
  misc_feature: MA Experiment 20000496 PARAMETER Experiment Name: At_Guard_Cells_P Parameter: Harvest Date Value: 7/19/2002
  misc_feature: MA Experiment 20000496 PARAMETER Experiment Name: At_Guard_Cells_P Parameter: Organism Value: Canola
  misc_feature: MA Experiment 20000496 PARAMETER Experiment Name: At_Guard_Cells_P Parameter: Tissue Value: Guard Cells vs. Leaves
  misc_feature: MA Experiment ID: 20000527 Result: Down-regulated in Transcription
  misc_feature: MA Experiment 20000527 PARAMETER Experiment Name: At_10percent_PEG_P Parameter: Age (day) Value: 20
  misc_feature: MA Experiment 20000527 PARAMETER Experiment Name: At_10percent_PEG_P Parameter: Organism Value: A. thaliana
  misc_feature: MA Experiment 20000527 PARAMETER Experiment Name: At_10percent_PEG_P Parameter: Plant Line Value: WS
  misc_feature: MA Experiment 20000527 PARAMETER Experiment Name: At_10percent_PEG_P Parameter: Timepoint (day) Value: 20
  misc_feature: MA Experiment 20000527 PARAMETER Experiment Name: At_10percent_PEG_P Parameter: Tissue Value: Whole Plant
  misc_feature: MA Experiment 20000527 PARAMETER Experiment Name: At_10percent_PEG_P Parameter: Treatment Value: 10percent PEG vs. No Treatment
  misc_feature: MA Experiment ID: 20001450 Result: Down-regulated in Transcription
  misc_feature: MA Experiment 20001450 PARAMETER Experiment Name: At_Far-red-induction_P Parameter: Age (day) Value: 7
  misc_feature: MA Experiment 20001450 PARAMETER Experiment Name: At_Far-red-induction_P Parameter: Light Value: Far-red vs. White
  misc_feature: MA Experiment 20001450 PARAMETER Experiment Name: At_Far-red-induction_P Parameter: Organism Value: A. thaliana
  misc_feature: MA Experiment 20001450 PARAMETER Experiment Name: At_Far-red-induction_P Parameter: Plant Line Value: Columbia
  misc_feature: MA Experiment 20001450 PARAMETER Experiment Name: At_Far-red-induction_P Parameter: Timepoint (hr) Value: 8
  misc_feature: MA Experiment 20001450 PARAMETER Experiment Name: At_Far-red-induction_P Parameter: Tissue Value: Whole Plant
gccataaactttagaaaagagagagagagacaaagagagatctgatcctttgaagaaacaacaccaaaaaaaaaaaaaaaagaatggcatcagcggatgaaaaggtggtggaagagaaggcttcggtgatttcaagcttgttggacaaagccaaaggtttctttgcggagaagctggcgaatattccgacgccggaagcaaccgtggacgacgttgatttcaaaggcgtgacacgtgatggagtagattatcacgccaaggtctccgtcaagaatccttactctcaatccatccctatctgccagatctcttacatcctcaagagtgccacaaggacgatcgcgtcaggcacgataccggacccgggttcgttggttgggagcggcacgacggttctggacgtaccggttaaggtggcttatagcatagcggttagtctgatgaaggatatgtgtacggactgggacattgactatcaactagacattgggctaaccttcgacattcctgttgttggtgatatcaccattcctgtctctactcagggagagatcaagctcccttcccttcgcgacttcttttaattaccttatttcaaatatagttttcttaaatcataatctaattttcaataatgtacgatccataaacatagacgatcggagattaatacatttctggaatcctttttttattttgttgatttcaacaaggattttattggttattaattatgtatgtttttc

SEQ ID NO: 99434 - protein, 166 aa, Arabidopsis thaliana; identical to SEQ ID NO: 26434
  peptide (1)..(166): Ceres Seq. ID no. 13602892
  misc_feature (17)..(166): Pfam Name: Late embryogenesis abundant protein Pfam Description: Late embryogenesis abundant protein
  misc_feature (1)..(166): Homolog of NCBI NO: 15225930 NR Description: desiccation related protein -related [Arabidopsis
  misc_feature (1)..(166): Homolog of NCBI NO: 21555248 NR Description: putative desiccation related protein [Arabidopsis
  misc_feature (1)..(166): Homolog of NCBI NO: 3789986 NR Description: desiccation protein [Brassica napus]
  misc_feature (16)..(166): Homolog of NCBI NO: 1170746 NR Description: Desiccation protectant protein Lea14 homolog
  misc_feature (16)..(166): Homolog of NCBI NO: 1170745 NR Description: Late embryogenesis abundant protein Lea14-A

SEQ ID NO: 99435 - DNA, 1370 bp, Arabidopsis thaliana
  misc_feature (1)..(1370): Ceres Seq. ID no. 13602929
  misc_feature: MA Experiment ID: 108434 Result: Up-regulated in Transcription
  misc_feature: MA Experiment 108434 PARAMETER Experiment Name: At_Root_Tips_cDNA_P Parameter: Tissue Value: Root Tips
  misc_feature: MA Experiment ID: 108561 Result: Up-regulated in Transcription
  misc_feature: MA Experiment 108561 PARAMETER Experiment Name: At_100uM_ABA_cDNA_P Parameter: Timepoint (hr) Value: 6
  misc_feature: MA Experiment 108561 PARAMETER Experiment Name: At_100uM_ABA_cDNA_P Parameter: Tissue Value: Aerial
  misc_feature: MA Experiment 108561 PARAMETER Experiment Name: At_100uM_ABA_cDNA_P Parameter: Treatment Value: 100uM ABA vs. No Treatment
  misc_feature: MA Experiment ID: 108572 Result: Up-regulated in Transcription
  misc_feature: MA Experiment 108572 PARAMETER Experiment Name: At_Drought_cDNA_P Parameter: Timepoint (hr) Value: 1
  misc_feature: MA Experiment 108572 PARAMETER Experiment Name: At_Drought_cDNA_P Parameter: Tissue Value: Aerial
  misc_feature: MA Experiment 108572 PARAMETER Experiment Name: At_Drought_cDNA_P Parameter: Treatment Value: Drought vs. No Drought
  misc_feature: MA Experiment ID: 108573 Result: Up-regulated in Transcription
  misc_feature: MA Experiment 108573 PARAMETER Experiment Name: At_Drought_cDNA_P Parameter: Timepoint (hr) Value: 6
  misc_feature: MA Experiment 108573 PARAMETER Experiment Name: At_Drought_cDNA_P Parameter: Tissue Value: Aerial
  misc_feature: MA Experiment 108573 PARAMETER Experiment Name: At_Drought_cDNA_P Parameter: Treatment Value: Drought vs. No Drought
  misc_feature: MA Experiment ID: 108579 Result: Down-regulated in Transcription
  misc_feature: MA Experiment 108579 PARAMETER Experiment Name: At_4deg_Cold_cDNA_P Parameter: Temperature (deg C) Value: 4 vs. 22
  misc_feature: MA Experiment 108579 PARAMETER Experiment Name: At_4deg_Cold_cDNA_P Parameter: Timepoint (hr) Value: 6
  misc_feature: MA Experiment 108579 PARAMETER Experiment Name: At_4deg_Cold_cDNA_P Parameter: Tissue Value: Aerial
  misc_feature: MA Experiment ID: 108605 Result: Up-regulated in Transcription
  misc_feature: MA Experiment 108605 PARAMETER Experiment Name: At_100uM_ABA_cDNA_P Parameter: Timepoint (hr) Value: 6
  misc_feature: MA Experiment 108605 PARAMETER Experiment Name: At_100uM_ABA_cDNA_P Parameter: Tissue Value: Aerial
  misc_feature: MA Experiment 108605 PARAMETER Experiment Name: At_100uM_ABA_cDNA_P Parameter: Treatment Value: 100uM ABA vs. No Treatment
  misc_feature: MA Experiment ID: 108607 Result: Up-regulated in Transcription
  misc_feature: MA Experiment 108607 PARAMETER Experiment Name: At_100uM_ABA_cDNA_P Parameter: Timepoint (hr) Value: 4
  misc_feature: MA Experiment 108607 PARAMETER Experiment Name: At_100uM_ABA_cDNA_P Parameter: Tissue Value: Aerial
  misc_feature: MA Experiment 108607 PARAMETER Experiment Name: At_100uM_ABA_cDNA_P Parameter: Treatment Value: 100uM ABA vs. No Treatment
  misc_feature: MA Experiment ID: 108608 Result: Up-regulated in Transcription
  misc_feature: MA Experiment 108608 PARAMETER Experiment Name: At_100uM_ABA_cDNA_P Parameter: Timepoint (hr) Value: 1
  misc_feature: MA Experiment 108608 PARAMETER Experiment Name: At_100uM_ABA_cDNA_P Parameter: Tissue Value: Aerial
  misc_feature: MA Experiment 108608 PARAMETER Experiment Name: At_100uM_ABA_cDNA_P Parameter: Treatment Value: 100uM ABA vs. No Treatment
  misc_feature: MA Experiment ID: 20000111 Result: Up-regulated in Transcription
  misc_feature: MA Experiment 20000111 PARAMETER Experiment Name: At_42deg_Heat_cDNA_P Parameter: Temperature (deg C) Value: 42 vs. 22
  misc_feature: MA Experiment 20000111 PARAMETER Experiment Name: At_42deg_Heat_cDNA_P Parameter: Timepoint (hr) Value: 6
  misc_feature: MA Experiment 20000111 PARAMETER Experiment Name: At_42deg_Heat_cDNA_P Parameter: Tissue Value: Aerial
  misc_feature: MA Experiment ID: 20000113 Result: Up-regulated in Transcription
  misc_feature: MA Experiment 20000113 PARAMETER Experiment Name: At_42deg_Heat_cDNA_P Parameter: Temperature (deg C) Value: 42 vs. 22
  misc_feature: MA Experiment 20000113 PARAMETER Experiment Name: At_42deg_Heat_cDNA_P Parameter: Timepoint (hr) Value: 8
  misc_feature: MA Experiment 20000113 PARAMETER Experiment Name: At_42deg_Heat_cDNA_P Parameter: Tissue Value: Aerial
  misc_feature: MA Experiment ID: 20000166 Result: Up-regulated in Transcription
  misc_feature: MA Experiment 20000166 PARAMETER Experiment Name: At_100uM_ABA_P Parameter: Age (day) Value: 14
  misc_feature: MA Experiment 20000166 PARAMETER Experiment Name: At_100uM_ABA_P Parameter: Organism Value: A. thaliana
  misc_feature: MA Experiment 20000166 PARAMETER Experiment Name: At_100uM_ABA_P Parameter: Plant Line Value: WS
  misc_feature: MA Experiment 20000166 PARAMETER Experiment Name: At_100uM_ABA_P Parameter: Timepoint (hr) Value: 1
  misc_feature: MA Experiment 20000166 PARAMETER Experiment Name: At_100uM_ABA_P Parameter: Tissue Value: Aerial
  misc_feature: MA Experiment 20000166 PARAMETER Experiment Name: At_100uM_ABA_P Parameter: Treatment Value: 100uM ABA vs. No Treatment
  misc_feature: MA Experiment ID: 20000173 Result: Up-regulated in Transcription
  misc_feature: MA Experiment 20000173 PARAMETER Experiment Name: At_42deg_Heat_P Parameter: Age (day) Value: 14
  misc_feature: MA Experiment 20000173 PARAMETER Experiment Name: At_42deg_Heat_P Parameter: Organism Value: A. thaliana
  misc_feature: MA Experiment 20000173 PARAMETER Experiment Name: At_42deg_Heat_P Parameter: Plant Line Value: WS
  misc_feature: MA Experiment 20000173 PARAMETER Experiment Name: At_42deg_Heat_P Parameter: Temperature (deg C) Value: 42 vs. 22
  misc_feature: MA Experiment 20000173 PARAMETER Experiment Name: At_42deg_Heat_P Parameter: Timepoint (hr) Value: 6
  misc_feature: MA Experiment 20000173 PARAMETER Experiment Name: At_42deg_Heat_P Parameter: Tissue Value: Aerial
  misc_feature: MA Experiment ID: 20000185 Result: Up-regulated in Transcription
  misc_feature: MA Experiment 20000185 PARAMETER Experiment Name: At_Roots__P Parameter: Age (day) Value: 7 vs. 21
  misc_feature: MA Experiment 20000185 PARAMETER Experiment Name: At_Roots__P Parameter: Organism Value: A. thaliana
  misc_feature: MA Experiment 20000185 PARAMETER Experiment Name: At_Roots__P Parameter: Tissue Value: Roots vs. Whole Plant
  misc_feature: MA Experiment ID: 20000227 Result: Up-regulated in Transcription
  misc_feature: MA Experiment 20000227 PARAMETER Experiment Name: At_Root-Tips-vs-Tops_P Parameter: Tissue Value: Root Tips vs. Root Tops
  misc_feature: MA Experiment ID: 20000436 Result: Up-regulated in Transcription
  misc_feature: MA Experiment 20000436 PARAMETER Experiment Name: At_Drought_P Parameter: Age (day) Value: 7
  misc_feature: MA Experiment 20000436 PARAMETER Experiment Name: At_Drought_P Parameter: Organism Value: A. thaliana
  misc_feature: MA Experiment 20000436 PARAMETER Experiment Name: At_Drought_P Parameter: Plant Line Value: WS
  misc_feature: MA Experiment 20000436 PARAMETER Experiment Name: At_Drought_P Parameter: Timepoint (hr) Value: 12
  misc_feature: MA Experiment 20000436 PARAMETER Experiment Name: At_Drought_P Parameter: Tissue Value: Whole Plant
  misc_feature: MA Experiment 20000436 PARAMETER Experiment Name: At_Drought_P Parameter: Treatment Value: Drought vs. No Drought
  misc_feature: MA Experiment ID: 20000441 Result: Up-regulated in Transcription
  misc_feature: MA Experiment 20000441 PARAMETER Experiment Name: At_1uM_BR-BRZ__P Parameter: Tissue Value: Shoot Apices
  misc_feature: MA Experiment 20000441 PARAMETER Experiment Name: At_1uM_BR-BRZ__P Parameter: Treatment Value: 1uM BR vs. No Treatment
  misc_feature: MA Experiment ID: 20000495 Result: Up-regulated in Transcription
  misc_feature: MA Experiment 20000495 PARAMETER Experiment Name: At_Guard_Cells_P Parameter: Harvest Date Value: 8/2/2002
  misc_feature: MA Experiment 20000495 PARAMETER Experiment Name: At_Guard_Cells_P Parameter: Organism Value: A. thaliana
  misc_feature: MA Experiment 20000495 PARAMETER Experiment Name: At_Guard_Cells_P Parameter: Tissue Value: Guard Cells vs. Leaves
  misc_feature: MA Experiment ID: 20001911 Result: Up-regulated in Transcription
  misc_feature: MA Experiment 20001911 PARAMETER Experiment Name: At_Drought_Reproduction_P Parameter: Age (day) Value: 40
  misc_feature: MA Experiment 20001911 PARAMETER Experiment Name: At_Drought_Reproduction_P Parameter: Organism Value: A. thaliana
  misc_feature: MA Experiment 20001911 PARAMETER Experiment Name: At_Drought_Reproduction_P Parameter: Plant Line Value: WS
  misc_feature: MA Experiment 20001911 PARAMETER Experiment Name: At_Drought_Reproduction_P Parameter: Timepoint (day) Value: 10
  misc_feature: MA Experiment 20001911 PARAMETER Experiment Name: At_Drought_Reproduction_P Parameter: Tissue Value: Flowers
  misc_feature: MA Experiment 20001911 PARAMETER Experiment Name: At_Drought_Reproduction_P Parameter: Treatment Value: Drought vs. No Drought
aaatagctttcttcttttggccccttacccagagatagattcttatatactactgagaatcttcaatttctgcaacttttgtatctcttcctgatggagtcttcaagtccccaccatagtcacattgttgaggttaatgttggaaaatctgatgaagagagaataattgtggcgagtaaagtctgtggagaagcaccatgtgggttttcagattctaagaatgcttccggggatgctcacgaacgctctgcttctatgcggaagctttgtatcgccgtcgtgctgtgtctagtgttcatgagtgttgaagttgttggtgggattaaagccaatagtttagctatattaaccgatgcagctcatttgctctctgacgttgctgcctttgctatctccctcttctcattgtgggctgctggctgggaagcgactcctaggcagacttacgggttcttcaggattgagattttgggtgctcttgtatctatccagctcatttggttgctcacgggtattctggtttatgaagcgattatcagaattgttacagagaccagtgaggttaatggattcctcatgtttctggttgctgcctttggtctagtggtgaacatcataatggctgttctgctagggcatgatcatggtcacagtcatggacatgggcatggccacggccatgaccatcacaatcatagccatggggtgactgttaccactcatcaccatcatcacgatcatgaacatggccatagtcatggtcatggagaggacaagcatcatgctcatggggatgttactgagcaattgttggacaaatcgaagactcaagtcgcagcaaaagagaaaagaaagagaaacatcaatctccaaggagcttatctgcatgtccttggggattccatccagagtgttggtgttatgattggaggagctatcatttggtacaatccggaatggaagatagtggatctgatctgcacacttgccttttcggttattgtcctaggaacaaccatcaacatgattcgcaacattctagaagtattgatggagagtacacccagagagattgacgccacaaagctcgaaaagggtttgctcgaaatggaagaagtggtggctgttcatgagctccacatatgggctatcacagtgggaaaagtgctattggcttgccatgtcaatatcagaccagaagcagatgcagatatggtgctcaacaaggtaattgattacatccgcagggagtacaacattagtcatgtcacgatacaaatcgagcgctaaaagctaagtaagatctgatgaagggtttttgtatcagcattctcattaacaataaaatcaataaagtttctacatttttc

SEQ ID NO: 99436 - protein, 398 aa, Arabidopsis thaliana; identical to SEQ ID NO: 43642
  peptide (1)..(398): Ceres Seq. ID no. 13602930
  misc_feature (58)..(398): Pfam Name: Cation efflux family Pfam Description: Cation efflux family
  misc_feature (1)..(398): Homolog of NCBI NO: 15226441 NR Description: zinc transporter of Arabidopsis/metal tolerance (ZAT/MTP1) [Arabidopsis thaliana] >gi|30690511|ref|NP_850459.1| transporter of Arabidopsis/metal tolerance protein (ZAT/MTP1)
  misc_feature (1)..(398): Homolog of NCBI NO: 4206640 NR Description: zinc transporter ZAT [Arabidopsis thaliana]
  misc_feature (1)..(398): Homolog of NCBI NO: 40287446 NR Description: heavy metal transporter MTP1 [Arabis shortii]
  misc_feature (1)..(398): Homolog of NCBI NO: 40287442 NR Description: heavy metal transporter MTP1 [Thlaspi arvense]
  misc_feature (1)..(204): Homolog of NCBI NO: 40287448 NR Description: heavy metal transporter MTP2 [Arabis shortii]
  misc_feature (216)..(398): Homolog of NCBI NO: 40287448 NR Description: heavy metal transporter MTP2 [Arabis shortii]
  misc_feature (1)..(398): Homolog of NCBI NO: 39919138 NR Description: zinc transporter CDF1-3 [Arabidopsis halleri
  misc_feature (1)..(398): Homolog of NCBI NO: 28315876 NR Description: putative vacuolar metal-ion transport protein
  misc_feature (1)..(398): Homolog of NCBI NO: 40287440 NR Description: heavy metal transporter MTP1 [Thlaspi montanum]
  misc_feature (1)..(398): Homolog of NCBI NO: 40287444 NR Description: heavy metal transporter MTP1 [Thlaspi

SEQ ID NO: 99437 - protein, 344 aa, Arabidopsis thaliana; identical to SEQ ID NO: 43643
  peptide (1)..(344): Ceres Seq. ID no. 13602931
  misc_feature (4)..(344): Pfam Name: Cation efflux family Pfam Description: Cation efflux family
  misc_feature (1)..(344): Homolog of NCBI NO: 15226441 NR Description: zinc transporter of Arabidopsis/metal tolerance (ZAT/MTP1) [Arabidopsis thaliana] >gi|30690511|ref|NP_850459.1| transporter of Arabidopsis/metal tolerance protein (ZAT/MTP1)
  misc_feature (1)..(344): Homolog of NCBI NO: 4206640 NR Description: zinc transporter ZAT [Arabidopsis thaliana]
  misc_feature (1)..(344): Homolog of NCBI NO: 40287446 NR Description: heavy metal transporter MTP1 [Arabis shortii]
  misc_feature (1)..(344): Homolog of NCBI NO: 40287442 NR Description: heavy metal transporter MTP1 [Thlaspi arvense]
  misc_feature (1)..(150): Homolog of NCBI NO: 40287448 NR Description: heavy metal transporter MTP2 [Arabis shortii]
  misc_feature (162)..(344): Homolog of NCBI NO: 40287448 NR Description: heavy metal transporter MTP2 [Arabis shortii]
  misc_feature (1)..(344): Homolog of NCBI NO: 39919138 NR Description: zinc transporter CDF1-3 [Arabidopsis halleri
  misc_feature (1)..(344): Homolog of NCBI NO: 28315876 NR Description: putative vacuolar metal-ion transport protein
  misc_feature (1)..(344): Homolog of NCBI NO: 40287440 NR Description: heavy metal transporter MTP1 [Thlaspi montanum]
  misc_feature (1)..(344): Homolog of NCBI NO: 40287444 NR Description: heavy metal transporter MTP1 [Thlaspi

SEQ ID NO: 99438 - protein, 330 aa, Arabidopsis thaliana; identical to SEQ ID NO: 43644
  peptide (1)..(330): Ceres Seq. ID no. 13602932
  misc_feature (1)..(330): Pfam Name: Cation efflux family Pfam Description: Cation efflux family
  misc_feature (1)..(330): Homolog of NCBI NO: 15226441 NR Description: zinc transporter of Arabidopsis/metal tolerance (ZAT/MTP1) [Arabidopsis thaliana] >gi|30690511|ref|NP_850459.1| transporter of Arabidopsis/metal tolerance protein (ZAT/MTP1)
  misc_feature (1)..(330): Homolog of NCBI NO: 4206640 NR Description: zinc transporter ZAT [Arabidopsis thaliana]
  misc_feature (1)..(330): Homolog of NCBI NO: 40287446 NR Description: heavy metal transporter MTP1 [Arabis shortii]
  misc_feature (1)..(330): Homolog of NCBI NO: 40287442 NR Description: heavy metal transporter MTP1 [Thlaspi arvense]
  misc_feature (1)..(136): Homolog of NCBI NO: 40287448 NR Description: heavy metal transporter MTP2 [Arabis shortii]
  misc_feature (148)..(330): Homolog of NCBI NO: 40287448 NR Description: heavy metal transporter MTP2 [Arabis shortii]
  misc_feature (1)..(330): Homolog of NCBI NO: 39919138 NR Description: zinc transporter CDF1-3 [Arabidopsis halleri
  misc_feature (1)..(330): Homolog of NCBI NO: 28315876 NR Description: putative vacuolar metal-ion transport protein
  misc_feature (1)..(330): Homolog of NCBI NO: 40287440 NR Description: heavy metal transporter MTP1 [Thlaspi montanum]
  misc_feature (1)..(330): Homolog of NCBI NO: 40287444 NR Description: heavy metal transporter MTP1 [Thlaspi

SEQ ID NO: 99439 - DNA, 1577 bp, Arabidopsis thaliana
  misc_feature (1)..(1577): Ceres Seq. ID no. 13602933
  misc_feature: MA Experiment ID: 20000169 Result: Down-regulated in Transcription
  misc_feature: MA Experiment 20000169 PARAMETER Experiment Name: At_100uM_ABA_P Parameter: Age (day) Value: 14
  misc_feature: MA Experiment 20000169 PARAMETER Experiment Name: At_100uM_ABA_P Parameter: Organism Value: A. thaliana
  misc_feature: MA Experiment 20000169 PARAMETER Experiment Name: At_100uM_ABA_P Parameter: Plant Line Value: WS
  misc_feature: MA Experiment 20000169 PARAMETER Experiment Name: At_100uM_ABA_P Parameter: Timepoint (hr) Value: 6
  misc_feature: MA Experiment 20000169 PARAMETER Experiment Name: At_100uM_ABA_P Parameter: Tissue Value: Aerial
  misc_feature: MA Experiment 20000169 PARAMETER Experiment Name: At_100uM_ABA_P Parameter: Treatment Value: 100uM ABA vs. No Treatment
  misc_feature: MA Experiment ID: 20000308 Result: Up-regulated in Transcription
  misc_feature: MA Experiment 20000308 PARAMETER Experiment Name: At_100mM_NaCl__P Parameter: Age (day) Value: 17
  misc_feature: MA Experiment 20000308 PARAMETER Experiment Name: At_100mM_NaCl__P Parameter: Organism Value: A. thaliana
  misc_feature: MA Experiment 20000308 PARAMETER Experiment Name: At_100mM_NaCl__P Parameter: Plant Line Value: WS
  misc_feature: MA Experiment 20000308 PARAMETER Experiment Name: At_100mM_NaCl__P Parameter: Timepoint (hr) Value: 72
  misc_feature: MA Experiment 20000308 PARAMETER Experiment Name: At_100mM_NaCl__P Parameter: Tissue Value: Whole Plant
  misc_feature: MA Experiment 20000308 PARAMETER Experiment Name: At_100mM_NaCl__P Parameter: Treatment Value: 100mM NaCl vs. No Treatment
  misc_feature: MA Experiment ID: 20000436 Result: Down-regulated in Transcription
  misc_feature: MA Experiment 20000436 PARAMETER Experiment Name: At_Drought_P Parameter: Age (day) Value: 7
  misc_feature: MA Experiment 20000436 PARAMETER Experiment Name: At_Drought_P Parameter: Organism Value: A. thaliana
  misc_feature: MA Experiment 20000436 PARAMETER Experiment Name: At_Drought_P Parameter: Plant Line Value: WS
  misc_feature: MA Experiment 20000436 PARAMETER Experiment Name: At_Drought_P Parameter: Timepoint (hr) Value: 12
  misc_feature: MA Experiment 20000436 PARAMETER Experiment Name: At_Drought_P Parameter: Tissue Value: Whole Plant
  misc_feature: MA Experiment 20000436 PARAMETER Experiment Name: At_Drought_P Parameter: Treatment Value: Drought vs. No Drought
  misc_feature: MA Experiment ID: 20000437 Result: Down-regulated in Transcription
  misc_feature: MA Experiment 20000437 PARAMETER Experiment Name: At_Drought_P Parameter: Age (day) Value: 8
  misc_feature: MA Experiment 20000437 PARAMETER Experiment Name: At_Drought_P Parameter: Organism Value: A. thaliana
  misc_feature: MA Experiment 20000437 PARAMETER Experiment Name: At_Drought_P Parameter: Plant Line Value: WS
  misc_feature: MA Experiment 20000437 PARAMETER Experiment Name: At_Drought_P Parameter: Timepoint (hr) Value: 24
  misc_feature: MA Experiment 20000437 PARAMETER Experiment Name: At_Drought_P Parameter: Tissue Value: Whole Plant
  misc_feature: MA Experiment 20000437 PARAMETER Experiment Name: At_Drought_P Parameter: Treatment Value: Drought vs. No Drought
  misc_feature: MA Experiment ID: 20000453 Result: Down-regulated in Transcription
  misc_feature: MA Experiment 20000453 PARAMETER Experiment Name: At_100uM_ABA_P Parameter: Age (day) Value: 15
  misc_feature: MA Experiment 20000453 PARAMETER Experiment Name: At_100uM_ABA_P Parameter: Organism Value: A. thaliana
  misc_feature: MA Experiment 20000453 PARAMETER Experiment Name: At_100uM_ABA_P Parameter: Plant Line Value: WS
  misc_feature: MA Experiment 20000453 PARAMETER Experiment Name: At_100uM_ABA_P Parameter: Timepoint (hr) Value: 24
  misc_feature: MA Experiment 20000453 PARAMETER Experiment Name: At_100uM_ABA_P Parameter: Tissue Value: Aerial
  misc_feature: MA Experiment 20000453 PARAMETER Experiment Name: At_100uM_ABA_P Parameter: Treatment Value: 100uM ABA vs. No Treatment
  misc_feature: MA Experiment ID: 20000527 Result: Down-regulated in Transcription
  misc_feature: MA Experiment 20000527 PARAMETER Experiment Name: At_10percent_PEG_P Parameter: Age (day) Value: 20
  misc_feature: MA Experiment 20000527 PARAMETER Experiment Name: At_10percent_PEG_P Parameter: Organism Value: A. thaliana
  misc_feature: MA Experiment 20000527 PARAMETER Experiment Name: At_10percent_PEG_P Parameter: Plant Line Value: WS
  misc_feature: MA Experiment 20000527 PARAMETER Experiment Name: At_10percent_PEG_P Parameter: Timepoint (day) Value: 20
  misc_feature: MA Experiment 20000527 PARAMETER Experiment Name: At_10percent_PEG_P Parameter: Tissue Value: Whole Plant
  misc_feature: MA Experiment 20000527 PARAMETER Experiment Name: At_10percent_PEG_P Parameter: Treatment Value: 10percent PEG vs. No Treatment
  misc_feature: MA Experiment ID: 20000573 Result: Down-regulated in Transcription
  misc_feature: MA Experiment 20000573 PARAMETER Experiment Name: At_100uM_ABA_Mutants__P Parameter: Organism Value: A. thaliana
  misc_feature: MA Experiment 20000573 PARAMETER Experiment Name: At_100uM_ABA_Mutants__P Parameter: Plant Line Value: CS22 vs. Ler wt
  misc_feature: MA Experiment 20000573 PARAMETER Experiment Name: At_100uM_ABA_Mutants__P Parameter: Timepoint (hr) Value: N/A
  misc_feature: MA Experiment 20000573 PARAMETER Experiment Name: At_100uM_ABA_Mutants__P Parameter: Tissue Value: Whole Plant
  misc_feature: MA Experiment 20000573 PARAMETER Experiment Name: At_100uM_ABA_Mutants__P Parameter: Treatment Value: None
  misc_feature: MA Experiment ID: 20001756 Result: Up-regulated in Transcription
  misc_feature: MA Experiment 20001756 PARAMETER Experiment Name: At_50mM_NH4NO3_L-to-H_P Parameter: Timepoint (hr) Value: 4
  misc_feature: MA Experiment 20001756 PARAMETER Experiment Name: At_50mM_NH4NO3_L-to-H_P Parameter: Tissue Value: Leaf
  misc_feature: MA Experiment 20001756 PARAMETER Experiment Name: At_50mM_NH4NO3_L-to-H_P Parameter: Treatment Value: 50mM NH4NO3 vs 100mM Mannitol
  misc_feature: MA Experiment ID: 20001761 Result: Down-regulated in Transcription
  misc_feature: MA Experiment 20001761 PARAMETER Experiment Name: At_50mM_NH4NO3_L-to-H_P Parameter: Timepoint (hr) Value: 4
  misc_feature: MA Experiment 20001761 PARAMETER Experiment Name: At_50mM_NH4NO3_L-to-H_P Parameter: Tissue Value: Siliques
  misc_feature: MA Experiment 20001761 PARAMETER Experiment Name: At_50mM_NH4NO3_L-to-H_P Parameter: Treatment Value: 50mM NH4NO3 vs 100mM Mannitol
ctccagtttcatagtcactaacctaaaagaattaatggaggaaactcggaggaggtttgtcatatcctctgttctaagtgtttctttgatctacttatgtctttcgacatgtcacgtttccgccttcgacttcggtagaaggcagctccggtttaatactgatggtcggttcaagatactgcaagtgtcagatatgcactacggttttggcaaagagacgcaatgctcagacgtttcacctgcagaatttccttactgctccgatctcaatactacctcctttttacagcgaactatcgcttccgagaagcccgatctcatcgtcttctctggagacaatgtatatggattgtgcgagacaagtgacgtggcaaaatcgatggacatggcatttgctcctgcgatcgaatcggggattccatgggtggctattttggggaatcacgaccaagaatccgacatgactagagaaacaatgatgaaatacatcatgaaactcccaaactcgttgtctcaagtaaaccctcccgatgcttggctataccaaatcgacggttttggtaattacaatctacaaatcgagggtccttttggctcccctctcttcttcaaatccattctcaatctctatctactagacggtggatcttacacgaagcttgatggttttggttacaaatatgattgggtcaaaacctctcaacagaattggtatgaacacacttctaaatggcttgagatggaacacaagaggtggccatttccacagaatagtacggcaccaggattggtttacctccacattccgatgccggaatttgcattgttcaacaaatcgacggagatgactggagtaagacaagaatctacttgttctccacctatcaactctggtttctttaccaaacttgtcgaaagaggtgaagtcaaaggtgttttcagtggtcacgaccacgtcaacgacttctgtgccgaactccatgggatcaacctttgttacgcaggcggagccgggtatcatgggtacggacaggttggttgggcaaggagagtaagagtagttgaggctcagcttgagaagactatgtatggacgttggggagctgttgatacaatcaaaacttggaaacggctcgatgataagaatcattctttgattgatactcaacttctctggaccaagaacacaactcttgagccaaattttgggtttagttgctctactataccacaacactgatcattaagcagagttgttgtacaatgatatgatattttcattttctttatttatgctttactatctattattttgtttagaataagaattaaggaagacaatgtcagcttataattgtctgctttgtttagaataagaaggaagacaatgtcagcttataattgtctgctttgttacgttcgttttatttttctcaatagagtatcattttatctataaacatgagtcaatactcaatgggtacgctttggtaaagttaataatctcgggaaatgtttatagaagagtttataatgtaggattttctgagtgggaaatattggaagactggaatcgc

SEQ ID NO: 99440 - protein, 412 aa, Arabidopsis thaliana
  peptide (1)..(412): Ceres Seq. ID no. 13602934
  misc_feature (57)..(320): Pfam Name: Calcineurin-like phosphoesterase Pfam Description: Calcineurin-like phosphoesterase
  misc_feature (12)..(396): Homolog of NCBI NO: 15226455 NR Description: calcineurin-like phosphoesterase family
  misc_feature (12)..(412): Homolog of NCBI NO: 30267807 NR Description: hypothetical protein [Arabidopsis thaliana]
  misc_feature (12)..(397): Homolog of NCBI NO: 25763519 NR Description: probable phosphoesterase (EC 3.1.-.-) At2g46880 -
  misc_feature (12)..(338): Homolog of NCBI NO: 30267809 NR Description: hypothetical protein [Arabidopsis thaliana]
  misc_feature (12)..(395): Homolog of NCBI NO: 15242654 NR Description: calcineurin-like phosphoesterase family thaliana] >gi|10177295|dbj|BAB10556.1|
  misc_feature (19)..(395): Homolog of NCBI NO: 7208777 NR Description: putative PTS protein [Cicer arietinum]
  misc_feature (49)..(399): Homolog of NCBI NO: 15242042 NR Description: Calcineurin-like phosphoesterase family thaliana] >gi|8843816|dbj|BAA97364.1| to unknown protein [Arabidopsis thaliana]
  misc_feature (50)..(391): Homolog of NCBI NO: 40740622 NR Description: hypothetical protein AN3604.2 [Aspergillus
  misc_feature (49)..(379): Homolog of NCBI NO: 32405676 NR Description: hypothetical protein [Neurospora crassa] conserved hypothetical protein [Neurospora crassa]
  misc_feature (31)..(396): Homolog of NCBI NO: 6323393 NR Description: Dose-Dependent Cell cycle Regulator; Ylr361cp
SSFIVTNLKELMEETRRRFVISSVLSVSLIYLCLSTCHVSAFDFGRRQLRFNTDGRFKILQVSDMHYGFGKETQCSDVSPAEFPYCSDLNTTSFLQRTIASEKPDLIVFSGDNVYGLCETSDVAKSMDMAFAPAIESGIPWVAILGNHDQESDMTRETMMKYIMKLPNSLSQVNPPDAWLYQIDGFGNYNLQIEGPFGSPLFFKSILNLYLLDGGSYTKLDGFGYKYDWVKTSQQNWYEHTSKWLEMEHKRWPFPQNSTAPGLVYLHIPMPEFALFNKSTEMTGVRQESTCSPPINSGFFTKLVERGEVKGVFSGHDHVNDFCAELHGINLCYAGGAGYHGYGQVGWARRVRVVEAQLEKTMYGRWGAVDTIKTWKRLDDKNHSLIDTQLLWTKNTTLEPNFGFSCSTIPQH

SEQ ID NO: 99441 - protein, 401 aa, Arabidopsis thaliana
  peptide (1)..(401): Ceres Seq. ID no. 13602935
  misc_feature (46)..(309): Pfam Name: Calcineurin-like phosphoesterase Pfam Description: Calcineurin-like phosphoesterase
  misc_feature (1)..(385): Homolog of NCBI NO: 15226455 NR Description: calcineurin-like phosphoesterase family
  misc_feature (1)..(401): Homolog of NCBI NO: 30267807 NR Description: hypothetical protein [Arabidopsis thaliana]
  misc_feature (1)..(386): Homolog of NCBI NO: 25763519 NR Description: probable phosphoesterase (EC 3.1.-.-) At2g46880 -
  misc_feature (1)..(327): Homolog of NCBI NO: 30267809 NR Description: hypothetical protein [Arabidopsis thaliana]
  misc_feature (1)..(384): Homolog of NCBI NO: 15242654 NR Description: calcineurin-like phosphoesterase family thaliana] >gi|10177295|dbj|BAB10556.1|
  misc_feature (8)..(384): Homolog of NCBI NO: 7208777 NR Description: putative PTS protein [Cicer arietinum]
  misc_feature (38)..(388): Homolog of NCBI NO: 15242042 NR Description: Calcineurin-like phosphoesterase family thaliana] >gi|8843816|dbj|BAA97364.1| to unknown protein [Arabidopsis thaliana]
  misc_feature (39)..(380): Homolog of NCBI NO: 40740622 NR Description: hypothetical protein AN3604.2 [Aspergillus
  misc_feature (38)..(368): Homolog of NCBI NO: 32405676 NR Description: hypothetical protein [Neurospora crassa] conserved hypothetical protein [Neurospora crassa]
  misc_feature (20)..(385): Homolog of NCBI NO: 6323393 NR Description: Dose-Dependent Cell cycle Regulator; Ylr361cp
MEETRRRFVISSVLSVSLIYLCLSTCHVSAFDFGRRQLRFNTDGRFKILQVSDMHYGFGKETQCSDVSPAEFPYCSDLNTTSFLQRTIASEKPDLIVFSGDNVYGLCETSDVAKSMDMAFAPAIESGIPWVAILGNHDQESDMTRETMMKYIMKLPNSLSQVNPPDAWLYQIDGFGNYNLQIEGPFGSPLFFKSILNLYLLDGGSYTKLDGFGYKYDWVKTSQQNWYEHTSKWLEMEHKRWPFPQNSTAPGLVYLHIPMPEFALFNKSTEMTGVRQESTCSPPINSGFFTKLVERGEVKGVFSGHDHVNDFCAELHGINLCYAGGAGYHGYGQVGWARRVRVVEAQLEKTMYGRWGAVDTIKTWKRLDDKNHSLIDTQLLWTKNTTLEPNFGFSCSTIPQH

SEQ ID NO: 99442 - protein, 348 aa, Arabidopsis thaliana
  peptide (1)..(348): Ceres Seq. ID no. 13602936
  misc_feature (1)..(256): Pfam Name: Calcineurin-like phosphoesterase Pfam Description: Calcineurin-like phosphoesterase
  misc_feature (1)..(332): Homolog of NCBI NO: 15226455 NR Description: calcineurin-like phosphoesterase family
  misc_feature (1)..(348): Homolog of NCBI NO: 30267807 NR Description: hypothetical protein [Arabidopsis thaliana]
  misc_feature (1)..(333): Homolog of NCBI NO: 25763519 NR Description: probable phosphoesterase (EC 3.1.-.-) At2g46880 -
  misc_feature (1)..(274): Homolog of NCBI NO: 30267809 NR Description: hypothetical protein [Arabidopsis thaliana]
  misc_feature (1)..(331): Homolog of NCBI NO: 15242654 NR Description: calcineurin-like phosphoesterase family thaliana] >gi|10177295|dbj|BAB10556.1|
  misc_feature (1)..(331): Homolog of NCBI NO: 7208777 NR Description: putative PTS protein [Cicer arietinum]
  misc_feature (1)..(335): Homolog of NCBI NO: 15242042 NR Description: Calcineurin-like phosphoesterase family thaliana] >gi|8843816|dbj|BAA97364.1| to unknown protein [Arabidopsis thaliana]
  misc_feature (1)..(327): Homolog of NCBI NO: 40740622 NR Description: hypothetical protein AN3604.2 [Aspergillus
  misc_feature (1)..(315): Homolog of NCBI NO: 32405676 NR Description: hypothetical protein [Neurospora crassa] conserved hypothetical protein [Neurospora crassa]
  misc_feature (1)..(332): Homolog of NCBI NO: 6323393 NR Description: Dose-Dependent Cell cycle Regulator; Ylr361cp
MHYGFGKETQCSDVSPAEFPYCSDLNTTSFLQRTIASEKPDLIVFSGDNVYGLCETSDVAKSMDMAFAPAIESGIPWVAILGNHDQESDMTRETMMKYIMKLPNSLSQVNPPDAWLYQIDGFGNYNLQIEGPFGSPLFFKSILNLYLLDGGSYTKLDGFGYKYDWVKTSQQNWYEHTSKWLEMEHKRWPFPQNSTAPGLVYLHIPMPEFALFNKSTEMTGVRQESTCSPPINSGFFTKLVERGEVKGVFSGHDHVNDFCAELHGINLCYAGGAGYHGYGQVGWARRVRVVEAQLEKTMYGRWGAVDTIKTWKRLDDKNHSLIDTQLLWTKNTTLEPNFGFSCSTIPQH

SEQ ID NO: 99443 - DNA, 1032 bp, Arabidopsis thaliana
  misc_feature (1)..(1032): Ceres Seq. ID no. 13602937
  misc_feature: MA Experiment ID: 108461 Result: Up-regulated in Transcription
  misc_feature: MA Experiment 108461 PARAMETER Experiment Name: At_Germinating_Seeds_cDNA_P Parameter: Age (day) Value: 1 vs. 0
  misc_feature: MA Experiment 108461 PARAMETER Experiment Name: At_Germinating_Seeds_cDNA_P Parameter: Tissue Value: Germinating Seeds
  misc_feature: MA Experiment ID: 108462 Result: Up-regulated in Transcription
  misc_feature: MA Experiment 108462 PARAMETER Experiment Name: At_Germinating_Seeds_cDNA_P Parameter: Age (day) Value: 2 vs. 0
  misc_feature: MA Experiment 108462 PARAMETER Experiment Name: At_Germinating_Seeds_cDNA_P Parameter: Tissue Value: Germinating Seeds
  misc_feature: MA Experiment ID: 108463 Result: Up-regulated in Transcription
  misc_feature: MA Experiment 108463 PARAMETER Experiment Name: At_Germinating_Seeds_cDNA_P Parameter: Age (day) Value: 3 vs. 0
  misc_feature: MA Experiment 108463 PARAMETER Experiment Name: At_Germinating_Seeds_cDNA_P Parameter: Tissue Value: Germinating Seeds
  misc_feature: MA Experiment ID: 108464 Result: Up-regulated in Transcription
  misc_feature: MA Experiment 108464 PARAMETER Experiment Name: At_Germinating_Seeds_cDNA_P Parameter: Age (day) Value: 4 vs. 0
  misc_feature: MA Experiment 108464 PARAMETER Experiment Name: At_Germinating_Seeds_cDNA_P Parameter: Tissue Value: Germinating Seeds
  misc_feature: MA Experiment ID: 108595 Result: Down-regulated in Transcription
  misc_feature: MA Experiment 108595 PARAMETER Experiment Name: At_Ler-pi_Ovule_cDNA_P Parameter: Plant Line Value: null
  misc_feature: MA Experiment ID: 20000090 Result: Down-regulated in Transcription
  misc_feature: MA Experiment ID: 20000180 Result: Up-regulated in Transcription
  misc_feature: MA Experiment 20000180 PARAMETER Experiment Name: At_Germinating_Seeds_P Parameter: Age (hr) Value: 24 vs. 0
  misc_feature: MA Experiment 20000180 PARAMETER Experiment Name: At_Germinating_Seeds_P Parameter: Tissue Value: Germinating Seeds
  misc_feature: MA Experiment ID: 20000227 Result: Down-regulated in Transcription
  misc_feature: MA Experiment 20000227 PARAMETER Experiment Name: At_Root-Tips-vs-Tops_P Parameter: Tissue Value: Root Tips vs. Root Tops
  misc_feature: MA Experiment ID: 20000234 Result: Down-regulated in Transcription
  misc_feature: MA Experiment 20000234 PARAMETER Experiment Name: At_Siliques_P Parameter: Age (day) Value: 21
  misc_feature: MA Experiment 20000234 PARAMETER Experiment Name: At_Siliques_P Parameter: Organism Value: A. thaliana
  misc_feature: MA Experiment 20000234 PARAMETER Experiment Name: At_Siliques_P Parameter: Plant Line Value: WS
  misc_feature: MA Experiment 20000234 PARAMETER Experiment Name: At_Siliques_P Parameter: Tissue Value: Less Than 5mm Siliques vs. Whole Plant
  misc_feature: MA Experiment ID: 20000235 Result: Down-regulated in Transcription
  misc_feature: MA Experiment 20000235 PARAMETER Experiment Name: At_Siliques_P Parameter: Age (day) Value: 21
  misc_feature: MA Experiment 20000235 PARAMETER Experiment Name: At_Siliques_P Parameter: Organism Value: A. thaliana
  misc_feature: MA Experiment 20000235 PARAMETER Experiment Name: At_Siliques_P Parameter: Plant Line Value: WS
  misc_feature: MA Experiment 20000235 PARAMETER Experiment Name: At_Siliques_P Parameter: Tissue Value: 5-10mm Siliques vs. Whole Plant
  misc_feature: MA Experiment ID: 20000264 Result: Down-regulated in Transcription
  misc_feature: MA Experiment 20000264 PARAMETER Experiment Name: At_Open_Flower_P Parameter: Age (day) Value: 21
  misc_feature: MA Experiment 20000264 PARAMETER Experiment Name: At_Open_Flower_P Parameter: Plant Line Value: WS
  misc_feature: MA Experiment 20000264 PARAMETER Experiment Name: At_Open_Flower_P Parameter: Tissue Value: Open Flower vs. Whole Plant
  misc_feature: MA Experiment ID: 20000265 Result: Down-regulated in Transcription
  misc_feature: MA Experiment 20000265 PARAMETER Experiment Name: At_Open_Flower_P Parameter: Age (day) Value: 21
  misc_feature: MA Experiment 20000265 PARAMETER Experiment Name: At_Open_Flower_P Parameter: Plant Line Value: WS
  misc_feature: MA Experiment 20000265 PARAMETER Experiment Name: At_Open_Flower_P Parameter: Tissue Value: Closed Flower vs. Whole Plant
  misc_feature: MA Experiment ID: 20000286 Result: Down-regulated in Transcription
  misc_feature: MA Experiment 20000286 PARAMETER Experiment Name: At_Open_Flower_P Parameter: Age (day) Value: 21
  misc_feature: MA Experiment 20000286 PARAMETER Experiment Name: At_Open_Flower_P Parameter: Plant Line Value: WS
  misc_feature: MA Experiment 20000286 PARAMETER Experiment Name: At_Open_Flower_P Parameter: Tissue Value: Half Open vs. Whole Plant
  misc_feature: MA Experiment ID: 20000437 Result: Up-regulated in Transcription
  misc_feature: MA Experiment 20000437 PARAMETER Experiment Name: At_Drought_P Parameter: Age (day) Value: 8
  misc_feature: MA Experiment 20000437 PARAMETER Experiment Name: At_Drought_P Parameter: Organism Value: A. thaliana
  misc_feature: MA Experiment 20000437 PARAMETER Experiment Name: At_Drought_P Parameter: Plant Line Value: WS
  misc_feature: MA Experiment 20000437 PARAMETER Experiment Name: At_Drought_P Parameter: Timepoint (hr) Value: 24
  misc_feature: MA Experiment 20000437 PARAMETER Experiment Name: At_Drought_P Parameter: Tissue Value: Whole Plant
  misc_feature: MA Experiment 20000437 PARAMETER Experiment Name: At_Drought_P Parameter: Treatment Value: Drought vs. No Drought
  misc_feature: MA Experiment ID: 20000439 Result: Down-regulated in Transcription
  misc_feature: MA Experiment 20000439 PARAMETER Experiment Name: At_Roots__P Parameter: Age (day) Value: 14 vs. 21
  misc_feature: MA Experiment 20000439 PARAMETER Experiment Name: At_Roots__P Parameter: Organism Value: A. thaliana
  misc_feature: MA Experiment 20000439 PARAMETER Experiment Name: At_Roots__P Parameter: Tissue Value: Roots vs. Whole Plant
  misc_feature: MA Experiment ID: 20000496 Result: Down-regulated in Transcription
  misc_feature: MA Experiment 20000496 PARAMETER Experiment Name: At_Guard_Cells_P Parameter: Harvest Date Value: 7/19/2002
  misc_feature: MA Experiment 20000496 PARAMETER Experiment Name: At_Guard_Cells_P Parameter: Organism Value: Canola
  misc_feature: MA Experiment 20000496 PARAMETER Experiment Name: At_Guard_Cells_P Parameter: Tissue Value: Guard Cells vs. Leaves
  misc_feature: MA Experiment ID: 20000794 Result: Down-regulated in Transcription
  misc_feature: MA Experiment 20000794 PARAMETER Experiment Name: At_Petals_P Parameter: Age (day) Value: 23-25 days
  misc_feature: MA Experiment 20000794 PARAMETER Experiment Name: At_Petals_P Parameter: Plant Line Value: WS
  misc_feature: MA Experiment 20000794 PARAMETER Experiment Name: At_Petals_P Parameter: Tissue Value: Petals vs. Whole plant
  misc_feature: MA Experiment ID: 20001451 Result: Up-regulated in Transcription
  misc_feature: MA Experiment 20001451 PARAMETER Experiment Name: At_Far-red-induction_P Parameter: Age (day) Value: 7
  misc_feature: MA Experiment 20001451 PARAMETER Experiment Name: At_Far-red-induction_P Parameter: Light Value: Far-red vs. White
  misc_feature: MA Experiment 20001451 PARAMETER Experiment Name: At_Far-red-induction_P Parameter: Organism Value: A. thaliana
  misc_feature: MA Experiment 20001451 PARAMETER Experiment Name: At_Far-red-induction_P Parameter: Plant Line Value: Columbia
  misc_feature: MA Experiment 20001451 PARAMETER Experiment Name: At_Far-red-induction_P Parameter: Timepoint (hr) Value: 24
  misc_feature: MA Experiment 20001451 PARAMETER Experiment Name: At_Far-red-induction_P Parameter: Tissue Value: Whole Plant
  misc_feature: MA Experiment ID: 20001757 Result: Up-regulated in Transcription
  misc_feature: MA Experiment 20001757 PARAMETER Experiment Name: At_50mM_NH4NO3_L-to-H_P Parameter: Timepoint (hr) Value: 6
  misc_feature: MA Experiment 20001757 PARAMETER Experiment Name: At_50mM_NH4NO3_L-to-H_P Parameter: Tissue Value: Leaf
  misc_feature: MA Experiment 20001757 PARAMETER Experiment Name: At_50mM_NH4NO3_L-to-H_P Parameter: Treatment Value: 50mM NH4NO3 vs 100mM Mannitol
agttctcagtttgtcaccatcctcgagcagcttttgagctttgaaggttcgaaaatggatcgaattgcgtctgcgactttctcttgccctgcgatttcattgtcccgcgtctgtagaatcagcccttttggcttaaacattaaaaccaaccatagaaagagattctcgtgtcgagtagctgtagcttctggagagacttcggccagggtcgtcgtcgacaatgaacttgacttagaacacaagaaacacgatctactgagagctgttcaagacactcaacgaggactcactgccacttctgatcaacgatctatcattgaggaggctctggtgactgtggaagggtttaatggcggtgaagaaattgatccagtgaagttagatggaacatggaggctacaatatacatctgcacctgatgttgttgttctgtttgaagctgcttcaagacttcccttctttcaggtagggcaggtctttcagaagtttgagtgcagagatagatccgacggtgggatcattcggaatgttgttcagtggagtcttccaagcttgttggaggagcaagaaggtgcaacacttgttgttaccgcgaaatttgataaggtctctagtcgaaacatctaccttcagtttgaagagataagtgttagaaacattaacatcaatgagcagcttcaagctcttatcgcacctgcaatacttccacgctcatttctaagcctacagcttttgcagtttatccgtactttcaaagctcagattccagtaaacgcaaccagcccaggaaggagatctgtaggtggattgtattacctatcgtatctcgataacaacatgcttttgggacggtctgtaggaggaggaggagtatttgtctttacaaaatctcaacccctcgagctgtgagcatcagacaaatctataaaactctgtttttgactgtataatcacagaaaaaagaagaacattatgttagcagattctgtttatgtacaatctattcgggttttattgaagatcttgtacaat

SEQ ID NO: 99444 - protein, 302 aa, Arabidopsis thaliana; identical to SEQ ID NO: 30333
  peptide (1)..(302): Ceres Seq. ID no. 13602938
  misc_feature (79)..(295): Pfam Name: PAP_fibrillin Pfam Description: PAP_fibrillin
  misc_feature (19)..(302): Homolog of NCBI NO: 18407205 NR Description: plastid-lipid associated protein PAP/fibrillin [Arabidopsis thaliana] >gi|17065042|gb|AAL32675.1| Unknown [Arabidopsis thaliana] >gi|20197139|gb|AAC34229.2| Expressed
  misc_feature (19)..(302): Homolog of NCBI NO: 21553852 NR Description: unknown [Arabidopsis thaliana]
  misc_feature (195)..(258): Homolog of NCBI NO: 37535940 NR Description: unknown protein [Oryza sativa (japonica

SEQ ID NO: 99445 - protein, 284 aa, Arabidopsis thaliana; identical to SEQ ID NO: 30334
  peptide (1)..(284): Ceres Seq. ID no. 13602939
  misc_feature (61)..(277): Pfam Name: PAP_fibrillin Pfam Description: PAP_fibrillin
  misc_feature (1)..(284): Homolog of NCBI NO: 18407205 NR Description: plastid-lipid associated protein PAP/fibrillin [Arabidopsis thaliana] >gi|17065042|gb|AAL32675.1| Unknown [Arabidopsis thaliana] >gi|20197139|gb|AAC34229.2| Expressed
  misc_feature (1)..(284): Homolog of NCBI NO: 21553852 NR Description: unknown [Arabidopsis thaliana]
  misc_feature (177)..(240): Homolog of NCBI NO: 37535940 NR Description: unknown protein [Oryza sativa (japonica

SEQ ID NO: 99446 - DNA, 2331 bp, Arabidopsis thaliana
  misc_feature (1)..(2331): Ceres Seq. ID no. 13602940
  misc_feature: MA Experiment ID: 20000171 Result: Down-regulated in Transcription
  misc_feature: MA Experiment 20000171 PARAMETER Experiment Name: At_42deg_Heat_P Parameter: Age (day) Value: 14
  misc_feature: MA Experiment 20000171 PARAMETER Experiment Name: At_42deg_Heat_P Parameter: Organism Value: A. thaliana
  misc_feature: MA Experiment 20000171 PARAMETER Experiment Name: At_42deg_Heat_P Parameter: Plant Line Value: WS
  misc_feature: MA Experiment 20000171 PARAMETER Experiment Name: At_42deg_Heat_P Parameter: Temperature (deg C) Value: 42 vs. 22
  misc_feature: MA Experiment 20000171 PARAMETER Experiment Name: At_42deg_Heat_P Parameter: Timepoint (hr) Value: 1
  misc_feature: MA Experiment 20000171 PARAMETER Experiment Name: At_42deg_Heat_P Parameter: Tissue Value: Aerial
  misc_feature: MA Experiment ID: 20000173 Result: Down-regulated in Transcription
  misc_feature: MA Experiment 20000173 PARAMETER Experiment Name: At_42deg_Heat_P Parameter: Age (day) Value: 14
  misc_feature: MA Experiment 20000173 PARAMETER Experiment Name: At_42deg_Heat_P Parameter: Organism Value: A. thaliana
  misc_feature: MA Experiment 20000173 PARAMETER Experiment Name: At_42deg_Heat_P Parameter: Plant Line Value: WS
  misc_feature: MA Experiment 20000173 PARAMETER Experiment Name: At_42deg_Heat_P Parameter: Temperature (deg C) Value: 42 vs. 22
  misc_feature: MA Experiment 20000173 PARAMETER Experiment Name: At_42deg_Heat_P Parameter: Timepoint (hr) Value: 6
  misc_feature: MA Experiment 20000173 PARAMETER Experiment Name: At_42deg_Heat_P Parameter: Tissue Value: Aerial
  misc_feature: MA Experiment ID: 20000184 Result: Down-regulated in Transcription
  misc_feature: MA Experiment 20000184 PARAMETER Experiment Name: At_Shoots__P Parameter: Age (day) Value: 7
  misc_feature: MA Experiment 20000184 PARAMETER Experiment Name: At_Shoots__P Parameter: Tissue Value: Shoots vs. Whole Plant
  misc_feature: MA Experiment ID: 20000185 Result: Down-regulated in Transcription
  misc_feature: MA Experiment 20000185 PARAMETER Experiment Name: At_Roots__P Parameter: Age (day) Value: 7 vs. 21
  misc_feature: MA Experiment 20000185 PARAMETER Experiment Name: At_Roots__P Parameter: Organism Value: A. thaliana
  misc_feature: MA Experiment 20000185 PARAMETER Experiment Name: At_Roots__P Parameter: Tissue Value: Roots vs. Whole Plant
  misc_feature: MA Experiment ID: 20000439 Result: Down-regulated in Transcription
  misc_feature: MA Experiment 20000439 PARAMETER Experiment Name: At_Roots__P Parameter: Age (day) Value: 14 vs. 21
  misc_feature: MA Experiment 20000439 PARAMETER Experiment Name: At_Roots__P Parameter: Organism Value: A. thaliana
  misc_feature: MA Experiment 20000439 PARAMETER Experiment Name: At_Roots__P Parameter: Tissue Value: Roots vs. Whole Plant
  misc_feature: MA Experiment ID: 20000451 Result: Up-regulated in Transcription
  misc_feature: MA Experiment 20000451 PARAMETER Experiment Name: At_CS6879_Shoots-Roots_P Parameter: Age (day) Value: 14
  misc_feature: MA Experiment 20000451 PARAMETER Experiment Name: At_CS6879_Shoots-Roots_P Parameter: Organism Value: A. thaliana
  misc_feature: MA Experiment 20000451 PARAMETER Experiment Name: At_CS6879_Shoots-Roots_P Parameter: Plant Line Value: CS6879 vs. WS
  misc_feature: MA Experiment 20000451 PARAMETER Experiment Name: At_CS6879_Shoots-Roots_P Parameter: Tissue Value: Roots
  misc_feature: MA Experiment ID: 20000573 Result: Down-regulated in Transcription
  misc_feature: MA Experiment 20000573 PARAMETER Experiment Name: At_100uM_ABA_Mutants__P Parameter: Organism Value: A. thaliana
  misc_feature: MA Experiment 20000573 PARAMETER Experiment Name: At_100uM_ABA_Mutants__P Parameter: Plant Line Value: CS22 vs. Ler wt
  misc_feature: MA Experiment 20000573 PARAMETER Experiment Name: At_100uM_ABA_Mutants__P Parameter: Timepoint (hr) Value: N/A
  misc_feature: MA Experiment 20000573 PARAMETER Experiment Name: At_100uM_ABA_Mutants__P Parameter: Tissue Value: Whole Plant
  misc_feature: MA Experiment 20000573 PARAMETER Experiment Name: At_100uM_ABA_Mutants__P Parameter: Treatment Value: None
  misc_feature: MA Experiment ID: 20001450 Result: Down-regulated in Transcription
  misc_feature: MA Experiment 20001450 PARAMETER Experiment Name: At_Far-red-induction_P Parameter: Age (day) Value: 7
  misc_feature: MA Experiment 20001450 PARAMETER Experiment Name: At_Far-red-induction_P Parameter: Light Value: Far-red vs. White
  misc_feature: MA Experiment 20001450 PARAMETER Experiment Name: At_Far-red-induction_P Parameter: Organism Value: A. thaliana
  misc_feature: MA Experiment 20001450 PARAMETER Experiment Name: At_Far-red-induction_P Parameter: Plant Line Value: Columbia
  misc_feature: MA Experiment 20001450 PARAMETER Experiment Name: At_Far-red-induction_P Parameter: Timepoint (hr) Value: 8
  misc_feature: MA Experiment 20001450 PARAMETER Experiment Name: At_Far-red-induction_P Parameter: Tissue Value: Whole Plant
  misc_feature: MA Experiment ID: 20001451 Result: Down-regulated in Transcription
  misc_feature: MA Experiment 20001451 PARAMETER Experiment Name: At_Far-red-induction_P Parameter: Age (day) Value: 7
  misc_feature: MA Experiment 20001451 PARAMETER Experiment Name: At_Far-red-induction_P Parameter: Light Value: Far-red vs. White
  misc_feature: MA Experiment 20001451 PARAMETER Experiment Name: At_Far-red-induction_P Parameter: Organism Value: A. thaliana
  misc_feature: MA Experiment 20001451 PARAMETER Experiment Name: At_Far-red-induction_P Parameter: Plant Line Value: Columbia
  misc_feature: MA Experiment 20001451 PARAMETER Experiment Name: At_Far-red-induction_P Parameter: Timepoint (hr) Value: 24
  misc_feature: MA Experiment 20001451 PARAMETER Experiment Name: At_Far-red-induction_P Parameter: Tissue Value: Whole Plant
  misc_feature: MA Experiment ID: 20001555 Result: Down-regulated in Transcription
  misc_feature: MA Experiment 20001555 PARAMETER Experiment Name: At_Drought_Soil_Dry_P Parameter: Age (day) Value: 24
  misc_feature: MA Experiment 20001555 PARAMETER Experiment Name: At_Drought_Soil_Dry_P Parameter: Organism Value: A. thaliana
  misc_feature: MA Experiment 20001555 PARAMETER Experiment Name: At_Drought_Soil_Dry_P Parameter: Plant Line Value: WS
  misc_feature: MA Experiment 20001555 PARAMETER Experiment Name: At_Drought_Soil_Dry_P Parameter: Post Timepoint (hr) Value: None
  misc_feature: MA Experiment 20001555 PARAMETER Experiment Name: At_Drought_Soil_Dry_P Parameter: Post-Treatment Value: None
  misc_feature: MA Experiment 20001555 PARAMETER Experiment Name: At_Drought_Soil_Dry_P Parameter: Timepoint (day) Value: 10
  misc_feature: MA Experiment 20001555 PARAMETER Experiment Name: At_Drought_Soil_Dry_P Parameter: Treatment Value: Drought vs. No Drought
  misc_feature: MA Experiment ID: 20001557 Result: Up-regulated in Transcription
  misc_feature: MA Experiment 20001557 PARAMETER Experiment Name: At_Drought_Soil_Dry_P Parameter: Age (day) Value: 27
  misc_feature: MA Experiment 20001557 PARAMETER Experiment Name: At_Drought_Soil_Dry_P Parameter: Organism Value: A. thaliana
  misc_feature: MA Experiment 20001557 PARAMETER Experiment Name: At_Drought_Soil_Dry_P Parameter: Plant Line Value: WS
  misc_feature: MA Experiment 20001557 PARAMETER Experiment Name: At_Drought_Soil_Dry_P Parameter: Post Timepoint (hr) Value: 3
  misc_feature: MA Experiment 20001557 PARAMETER Experiment Name: At_Drought_Soil_Dry_P Parameter: Post-Treatment Value: Re-Water vs. No Drought
  misc_feature: MA Experiment 20001557 PARAMETER Experiment Name: At_Drought_Soil_Dry_P Parameter: Timepoint (day) Value: 13
  misc_feature: MA Experiment 20001557 PARAMETER Experiment Name: At_Drought_Soil_Dry_P Parameter: Treatment Value: Drought vs. No Drought
  misc_feature: MA Experiment ID: 20001558 Result: Up-regulated in Transcription
  misc_feature: MA Experiment 20001558 PARAMETER Experiment Name: At_Drought_Soil_Dry_P Parameter: Age (day) Value: 27
  misc_feature: MA Experiment 20001558 PARAMETER Experiment Name: At_Drought_Soil_Dry_P Parameter: Organism Value: A. thaliana
  misc_feature: MA Experiment 20001558 PARAMETER Experiment Name: At_Drought_Soil_Dry_P Parameter: Plant Line Value: WS
  misc_feature: MA Experiment 20001558 PARAMETER Experiment Name: At_Drought_Soil_Dry_P Parameter: Post Timepoint (hr) Value: 6
  misc_feature: MA Experiment 20001558 PARAMETER Experiment Name: At_Drought_Soil_Dry_P Parameter: Post-Treatment Value: Re-Water vs. No Drought
  misc_feature: MA Experiment 20001558 PARAMETER Experiment Name: At_Drought_Soil_Dry_P Parameter: Timepoint (day) Value: 13
  misc_feature: MA Experiment 20001558 PARAMETER Experiment Name: At_Drought_Soil_Dry_P Parameter: Treatment Value: Drought vs. No Drought
  misc_feature: MA Experiment ID: 20001904 Result: Down-regulated in Transcription
  misc_feature: MA Experiment 20001904 PARAMETER Experiment Name: At_Drought_Reproduction_P Parameter: Age (day) Value: 37
  misc_feature: MA Experiment 20001904 PARAMETER Experiment Name: At_Drought_Reproduction_P Parameter: Organism Value: A. thaliana
  misc_feature: MA Experiment 20001904 PARAMETER Experiment Name: At_Drought_Reproduction_P Parameter: Plant Line Value: WS
  misc_feature: MA Experiment 20001904 PARAMETER Experiment Name: At_Drought_Reproduction_P Parameter: Timepoint (day) Value: 7
  misc_feature: MA Experiment 20001904 PARAMETER Experiment Name: At_Drought_Reproduction_P Parameter: Tissue Value: Rosettes
  misc_feature: MA Experiment 20001904 PARAMETER Experiment Name: At_Drought_Reproduction_P Parameter: Treatment Value: Drought vs. No Drought
  misc_feature: MA Experiment ID: 20001905 Result: Down-regulated in Transcription
  misc_feature: MA Experiment 20001905 PARAMETER Experiment Name: At_Drought_Reproduction_P Parameter: Age (day) Value: 40
  misc_feature: MA Experiment 20001905 PARAMETER Experiment Name: At_Drought_Reproduction_P Parameter: Organism Value: A. thaliana
  misc_feature: MA Experiment 20001905 PARAMETER Experiment Name: At_Drought_Reproduction_P Parameter: Plant Line Value: WS
  misc_feature: MA Experiment 20001905 PARAMETER Experiment Name: At_Drought_Reproduction_P Parameter: Timepoint (day) Value: 10
  misc_feature: MA Experiment 20001905 PARAMETER Experiment Name: At_Drought_Reproduction_P Parameter: Tissue Value: Rosettes
  misc_feature: MA Experiment 20001905 PARAMETER Experiment Name: At_Drought_Reproduction_P Parameter: Treatment Value: Drought vs. No Drought
  misc_feature: MA Experiment ID: 20001911 Result: Down-regulated in Transcription
  misc_feature: MA Experiment 20001911 PARAMETER Experiment Name: At_Drought_Reproduction_P Parameter: Age (day) Value: 40
  misc_feature: MA Experiment 20001911 PARAMETER Experiment Name: At_Drought_Reproduction_P Parameter: Organism Value: A. thaliana
  misc_feature: MA Experiment 20001911 PARAMETER Experiment Name: At_Drought_Reproduction_P Parameter: Plant Line Value: WS
  misc_feature: MA Experiment 20001911 PARAMETER Experiment Name: At_Drought_Reproduction_P Parameter: Timepoint (day) Value: 10
  misc_feature: MA Experiment 20001911 PARAMETER Experiment Name: At_Drought_Reproduction_P Parameter: Tissue Value: Flowers
  misc_feature: MA Experiment 20001911 PARAMETER Experiment Name: At_Drought_Reproduction_P Parameter: Treatment Value: Drought vs. No Drought
atcaaattatcttctttctctttctctctgatcatttccaaattatttctaagctaagaaaatctttaaaaataacaaagcttctaaaataataatccgacctaccggattcaaaccattgatctgaagatcatctataaaccagtccttgatctataaactaaaataagggaagaaaaaaacaagagagagaaatagagaatgaagtcttttgcggctaaggtagaagagggagttaaaggaatagacggaaagccgtcggtaggtccggtgtaccggaatcttctgtcggaaaaaggttttcctccgattgattctgagatcaccactgcttgggacattttcagtaaatcagtggagaaattccctgacaataatatgcttggatggcgtcgaattgttgatgagaaggttggaccatatatgtggaaaacgtacaaggaagtatacgaagaagttttgcagattggctctgcactacgagccgccggagctgaacctgggagtcgagtggggatctacggtgttaattgtcctcagtggatcatagcaatggaggcttgtgcagctcacactctaatctgtgtacctctatatgatacattgggttcaggagcagtcgattacattgtagagcatgcggaaatcgactttgtgtttgtccaagacaccaaaattaaaggacttcttgagccagattgcaaatgtgctaaacggctaaaagctatagtttccttcactaacgtgagcgacgagcttagccacaaggcttcagaaattggagtcaaaacatactcctggatcgattttctccatatgggacgtgagaaaccggaagacacgaacccgcctaaggcgtttaacatatgcaccataatgtacaccagcggcacaagcggtgatcctaaaggtgtggttttgactcaccaagcggtcgcgacttttgttgttgggatggatctctatatggaccagtttgaagataagatgacacatgatgatgtgtatctctccttcttgcccttggctcatattcttgaccgtatgaacgaggaatacttctttcgcaaaggcgcttccgtcggctattaccatggaaatttgaacgtgttacgtgacgatattcaagaactgaaaccgacttatctagctggagtaccaagagtgtttgagagaatccatgaggggattcaaaaggctcttcaagaacttaacccaagaaggagattcatcttcaatgctctctacaaacacaagcttgcgtggttgaatcgtgggtactctcatagtaaagcttcacccatggctgatttcattgctttcagaaagattagagacaaattgggaggtcgcatccggttgctagtatctggaggagcacctttgagccctgagattgaagagtttttgagagttacttgttgttgctttgtcgttcaaggctacggtctaacggagacacttggaggaacggctttgggtttcccggacgagatgtgtatgctagggacagtcggtattccagcggtttacaacgagatacggcttgaagaggtgtctgaaatgggctatgacccgctcggagaaaatccggcaggagagatctgtataagaggacaatgtatgttttcagggtattacaagaaccctgaactcactgaagaagtcatgaaagatggatggttccacacaggagatataggtgagattcttccaaacggagtactcaagatcatcgatcgtaaaaagaatctgatcaaactttctcaaggagaatatgttgctctcgagcatttggaaaacatcttcgggcaaaactctgttgtccaagatatatgggtttatggagacagcttcaaatctatgcttgtcgcggtggttgttcccaacccagaaaccgtcaacaggtgggctaaagatctcggttttactaaaccattcgaagaactctgttctttcccggaactaaaagaacacatcatttcagaactgaagtccacggcagaaaagaacaagctaagaaagtttgagtacatcaaagcggtgacagtggagacaaaacctttcgacgtagagagagacttagtgactgcgacgctcaagaatcggaggaacaatcttctcaaatattatcaggtgcaaatcgacgaaatgtaccgcaaattggcctcaaagaaaatctgaaagtgttgcgatgatgtgtgtgctgttattgatagttatatatgtacgttatatgtatcaataattcatagatatgagctttatgctttatgtaatattttatttttatgttgtatgacatcataattatggaatttttttttgttg

SEQ ID NO: 99447 - protein, 660 aa, Arabidopsis thaliana
  peptide (1)..(660): Ceres Seq. ID no. 13602941
  misc_feature (78)..(345): Pfam Name: AMP-binding enzyme Pfam Description: AMP-binding enzyme
  misc_feature (1)..(658): Homolog of NCBI NO: 15236634 NR Description: long-chain-fatty-acid--CoA ligase (acyl-CoA
  misc_feature (1)..(659): Homolog of NCBI NO: 7437845 NR Description: probable long-chain-fatty-acid-CoA ligase (EC
  misc_feature (4)..(654): Homolog of NCBI NO: 15217631 NR Description: long-chain-fatty-acid--CoA ligase (acyl-CoA
  misc_feature (2)..(653): Homolog of NCBI NO: 15237023 NR Description: long-chain-fatty-acid--CoA ligase (acyl CoA
  misc_feature (2)..(653): Homolog of NCBI NO: 20805871 NR Description: long chain acyl-CoA synthetase 5 [Arabidopsis
  misc_feature (20)..(653): Homolog of NCBI NO: 34898260 NR Description: similar to long-chain-fatty-acid--CoA ligase 1
  misc_feature (8)..(652): Homolog of NCBI NO: 22330132 NR Description: long-chain-fatty-acid--CoA ligase (acyl CoA [Arabidopsis thaliana] >gi|25293395|pir||G96530 probable acyl CoA
  misc_feature (8)..(659): Homolog of NCBI NO: 7437844 NR Description: probable long-chain-fatty-acid-CoA ligase (EC
  misc_feature (36)..(657): Homolog of NCBI NO: 13516481 NR Description: long-chain acyl-CoA synthetase [Arabidopsis
  misc_feature (36)..(657): Homolog of NCBI NO: 18397422 NR Description: AMP-binding protein, putative [Arabidopsis >gi|20453099|gb|AAM19792.1| AT3g05970/F2O10_9 [Arabidopsis >gi|24796992|gb|AAN64508.1| At3g05970/F2O10_9 [Arabidopsis
MKSFAAKVEEGVKGIDGKPSVGPVYRNLLSEKGFPPIDSEITTAWDIFSKSVEKFPDNNMLGWRRIVDEKVGPYMWKTYKEVYEEVLQIGSALRAAGAEPGSRVGIYGVNCPQWIIAMEACAAHTLICVPLYDTLGSGAVDYIVEHAEIDFVFVQDTKIKGLLEPDCKCAKRLKAIVSFTNVSDELSHKASEIGVKTYSWIDFLHMGREKPEDTNPPKAFNICTIMYTSGTSGDPKGVVLTHQAVATFVVGMDLYMDQFEDKMTHDDVYLSFLPLAHILDRMNEEYFFRKGASVGYYHGNLNVLRDDIQELKPTYLAGVPRVFERIHEGIQKALQELNPRRRFIFNALYKHKLAWLNRGYSHSKASPMADFIAFRKIRDKLGGRIRLLVSGGAPLSPEIEEFLRVTCCCFVVQGYGLTETLGGTALGFPDEMCMLGTVGIPAVYNEIRLEEVSEMGYDPLGENPAGEICIRGQCMFSGYYKNPELTEEVMKDGWFHTGDIGEILPNGVLKIIDRKKNLIKLSQGEYVALEHLENIFGQNSVVQDIWVYGDSFKSMLVAVVVPNPETVNRWAKDLGFTKPFEELCSFPELKEHIISELKSTAEKNKLRKFEYIKAVTVETKPFDVERDLVTATLKNRRNNLLKYYQVQIDEMYRKLASKKI

SEQ ID NO: 99448 - protein, 601 aa, Arabidopsis thaliana
  peptide (1)..(601): Ceres Seq. ID no. 13602942
  misc_feature (19)..(286): Pfam Name: AMP-binding enzyme Pfam Description: AMP-binding enzyme
  misc_feature (1)..(599): Homolog of NCBI NO: 15236634 NR Description: long-chain-fatty-acid--CoA ligase (acyl-CoA
  misc_feature (1)..(600): Homolog of NCBI NO: 7437845 NR Description: probable long-chain-fatty-acid-CoA ligase (EC
  misc_feature (1)..(595): Homolog of NCBI NO: 15217631 NR Description: long-chain-fatty-acid--CoA ligase (acyl-CoA
  misc_feature (1)..(594): Homolog of NCBI NO: 15237023 NR Description: long-chain-fatty-acid--CoA ligase (acyl CoA
  misc_feature (1)..(594): Homolog of NCBI NO: 20805871 NR Description: long chain acyl-CoA synthetase 5 [Arabidopsis
  misc_feature (1)..(594): Homolog of NCBI NO: 34898260 NR Description: similar to long-chain-fatty-acid--CoA ligase 1
  misc_feature (1)..(593): Homolog of NCBI NO: 22330132 NR Description: long-chain-fatty-acid--CoA ligase (acyl CoA [Arabidopsis thaliana] >gi|25293395|pir||G96530 probable acyl CoA
  misc_feature (1)..(600): Homolog of NCBI NO: 7437844 NR Description: probable long-chain-fatty-acid-CoA ligase (EC
  misc_feature (1)..(598): Homolog of NCBI NO: 13516481 NR Description: long-chain acyl-CoA synthetase [Arabidopsis
  misc_feature (1)..(598): Homolog of NCBI NO: 18397422 NR Description: AMP-binding protein, putative [Arabidopsis >gi|20453099|gb|AAM19792.1| AT3g05970/F2O10_9 [Arabidopsis >gi|24796992|gb|AAN64508.1| At3g05970/F2O10_9 [Arabidopsis
MLGWRRIVDEKVGPYMWKTYKEVYEEVLQIGSALRAAGAEPGSRVGIYGVNCPQWIIAMEACAAHTLICVPLYDTLGSGAVDYIVEHAEIDFVFVQDTKIKGLLEPDCKCAKRLKAIVSFTNVSDELSHKASEIGVKTYSWIDFLHMGREKPEDTNPPKAFNICTIMYTSGTSGDPKGVVLTHQAVATFVVGMDLYMDQFEDKMTHDDVYLSFLPLAHILDRMNEEYFFRKGASVGYYHGNLNVLRDDIQELKPTYLAGVPRVFERIHEGIQKALQELNPRRRFIFNALYKHKLAWLNRGYSHSKASPMADFIAFRKIRDKLGGRIRLLVSGGAPLSPEIEEFLRVTCCCFVVQGYGLTETLGGTALGFPDEMCMLGTVGIPAVYNEIRLEEVSEMGYDPLGENPAGEICIRGQCMFSGYYKNPELTEEVMKDGWFHTGDIGEILPNGVLKIIDRKKNLIKLSQGEYVALEHLENIFGQNSVVQDIWVYGDSFKSMLVAVVVPNPETVNRWAKDLGFTKPFEELCSFPELKEHIISELKSTAEKNKLRKFEYIKAVTVETKPFDVERDLVTATLKNRRNNLLKYYQVQIDEMYRKLASKKI

SEQ ID NO: 99449 - protein, 586 aa, Arabidopsis thaliana
  peptide (1)..(586): Ceres Seq. ID no. 13602943
  misc_feature (4)..(271): Pfam Name: AMP-binding enzyme Pfam Description: AMP-binding enzyme
  misc_feature (1)..(584): Homolog of NCBI NO: 15236634 NR Description: long-chain-fatty-acid--CoA ligase (acyl-CoA
  misc_feature (1)..(585): Homolog of NCBI NO: 7437845 NR Description: probable long-chain-fatty-acid-CoA ligase (EC
  misc_feature (1)..(580): Homolog of NCBI NO: 15217631 NR Description: long-chain-fatty-acid--CoA ligase (acyl-CoA
  misc_feature (1)..(579): Homolog of NCBI NO: 15237023 NR Description: long-chain-fatty-acid--CoA ligase (acyl CoA
  misc_feature (1)..(579): Homolog of NCBI NO: 20805871 NR Description: long chain acyl-CoA synthetase 5 [Arabidopsis
  misc_feature (1)..(579): Homolog of NCBI NO: 34898260 NR Description: similar to long-chain-fatty-acid--CoA ligase 1
  misc_feature (1)..(578): Homolog of NCBI NO: 22330132 NR Description: long-chain-fatty-acid--CoA ligase (acyl CoA [Arabidopsis thaliana] >gi|25293395|pir||G96530 probable acyl CoA
  misc_feature (1)..(585): Homolog of NCBI NO: 7437844 NR Description: probable long-chain-fatty-acid-CoA ligase (EC
  misc_feature (1)..(583): Homolog of NCBI NO: 13516481 NR Description: long-chain acyl-CoA synthetase [Arabidopsis
  misc_feature (1)..(583): Homolog of NCBI NO: 18397422 NR Description: AMP-binding protein, putative [Arabidopsis >gi|20453099|gb|AAM19792.1| AT3g05970/F2O10_9 [Arabidopsis >gi|24796992|gb|AAN64508.1| At3g05970/F2O10_9 [Arabidopsis
MWKTYKEVYEEVLQIGSALRAAGAEPGSRVGIYGVNCPQWIIAMEACAAHTLICVPLYDTLGSGAVDYIVEHAEIDFVFVQDTKIKGLLEPDCKCAKRLKAIVSFTNVSDELSHKASEIGVKTYSWIDFLHMGREKPEDTNPPKAFNICTIMYTSGTSGDPKGVVLTHQAVATFVVGMDLYMDQFEDKMTHDDVYLSFLPLAHILDRMNEEYFFRKGASVGYYHGNLNVLRDDIQELKPTYLAGVPRVFERIHEGIQKALQELNPRRRFIFNALYKHKLAWLNRGYSHSKASPMADFIAFRKIRDKLGGRIRLLVSGGAPLSPEIEEFLRVTCCCFVVQGYGLTETLGGTALGFPDEMCMLGTVGIPAVYNEIRLEEVSEMGYDPLGENPAGEICIRGQCMFSGYYKNPELTEEVMKDGWFHTGDIGEILPNGVLKIIDRKKNLIKLSQGEYVALEHLENIFGQNSVVQDIWVYGDSFKSMLVAVVVPNPETVNRWAKDLGFTKPFEELCSFPELKEHIISELKSTAEKNKLRKFEYIKAVTVETKPFDVERDLVTATLKNRRNNLLKYYQVQIDEMYRKLASKKI

SEQ ID NO: 99450 - DNA, 1302 bp, Arabidopsis thaliana
  misc_feature (1)..(1302): Ceres Seq. ID no. 13602944
  misc_feature: MA Experiment ID: 20000227 Result: Down-regulated in Transcription
  misc_feature: MA Experiment 20000227 PARAMETER Experiment Name: At_Root-Tips-vs-Tops_P Parameter: Tissue Value: Root Tips vs. Root Tops
  misc_feature: MA Experiment ID: 20000437 Result: Up-regulated in Transcription
  misc_feature: MA Experiment 20000437 PARAMETER Experiment Name: At_Drought_P Parameter: Age (day) Value: 8
  misc_feature: MA Experiment 20000437 PARAMETER Experiment Name: At_Drought_P Parameter: Organism Value: A. thaliana
  misc_feature: MA Experiment 20000437 PARAMETER Experiment Name: At_Drought_P Parameter: Plant Line Value: WS
  misc_feature: MA Experiment 20000437 PARAMETER Experiment Name: At_Drought_P Parameter: Timepoint (hr) Value: 24
  misc_feature: MA Experiment 20000437 PARAMETER Experiment Name: At_Drought_P Parameter: Tissue Value: Whole Plant
  misc_feature: MA Experiment 20000437 PARAMETER Experiment Name: At_Drought_P Parameter: Treatment Value: Drought vs. No Drought
  misc_feature: MA Experiment ID: 20000439 Result: Up-regulated in Transcription
  misc_feature: MA Experiment 20000439 PARAMETER Experiment Name: At_Roots__P Parameter: Age (day) Value: 14 vs. 21
  misc_feature: MA Experiment 20000439 PARAMETER Experiment Name: At_Roots__P Parameter: Organism Value: A. thaliana
  misc_feature: MA Experiment 20000439 PARAMETER Experiment Name: At_Roots__P Parameter: Tissue Value: Roots vs. Whole Plant
  misc_feature: MA Experiment ID: 20000573 Result: Down-regulated in Transcription
  misc_feature: MA Experiment 20000573 PARAMETER Experiment Name: At_100uM_ABA_Mutants__P Parameter: Organism Value: A. thaliana
  misc_feature: MA Experiment 20000573 PARAMETER Experiment Name: At_100uM_ABA_Mutants__P Parameter: Plant Line Value: CS22 vs. Ler wt
  misc_feature: MA Experiment 20000573 PARAMETER Experiment Name: At_100uM_ABA_Mutants__P Parameter: Timepoint (hr) Value: N/A
  misc_feature: MA Experiment 20000573 PARAMETER Experiment Name: At_100uM_ABA_Mutants__P Parameter: Tissue Value: Whole Plant
  misc_feature: MA Experiment 20000573 PARAMETER Experiment Name: At_100uM_ABA_Mutants__P Parameter: Treatment Value: None
  misc_feature: MA Experiment ID: 20000574 Result: Down-regulated in Transcription
  misc_feature: MA Experiment 20000574 PARAMETER Experiment Name: At_100uM_ABA_Mutants__P Parameter: Organism Value: A. thaliana
  misc_feature: MA Experiment 20000574 PARAMETER Experiment Name: At_100uM_ABA_Mutants__P Parameter: Plant Line Value: CS23 vs. Ler wt
  misc_feature: MA Experiment 20000574 PARAMETER Experiment Name: At_100uM_ABA_Mutants__P Parameter: Timepoint (hr) Value: N/A
  misc_feature: MA Experiment 20000574 PARAMETER Experiment Name: At_100uM_ABA_Mutants__P Parameter: Tissue Value: Whole Plant
  misc_feature: MA Experiment 20000574 PARAMETER Experiment Name: At_100uM_ABA_Mutants__P Parameter: Treatment Value: None
  misc_feature: MA Experiment ID: 20001451 Result: Down-regulated in Transcription
  misc_feature: MA Experiment 20001451 PARAMETER Experiment Name: At_Far-red-induction_P Parameter: Age (day) Value: 7
  misc_feature: MA Experiment 20001451 PARAMETER Experiment Name: At_Far-red-induction_P Parameter: Light Value: Far-red vs. White
  misc_feature: MA Experiment 20001451 PARAMETER Experiment Name: At_Far-red-induction_P Parameter: Organism Value: A. thaliana
  misc_feature: MA Experiment 20001451 PARAMETER Experiment Name: At_Far-red-induction_P Parameter: Plant Line Value: Columbia
  misc_feature: MA Experiment 20001451 PARAMETER Experiment Name: At_Far-red-induction_P Parameter: Timepoint (hr) Value: 24
  misc_feature: MA Experiment 20001451 PARAMETER Experiment Name: At_Far-red-induction_P Parameter: Tissue Value: Whole Plant
  misc_feature: MA Experiment ID: 20001757 Result: Up-regulated in Transcription
  misc_feature: MA Experiment 20001757 PARAMETER Experiment Name: At_50mM_NH4NO3_L-to-H_P Parameter: Timepoint (hr) Value: 6
  misc_feature: MA Experiment 20001757 PARAMETER Experiment Name: At_50mM_NH4NO3_L-to-H_P Parameter: Tissue Value: Leaf
  misc_feature: MA Experiment 20001757 PARAMETER Experiment Name: At_50mM_NH4NO3_L-to-H_P Parameter: Treatment Value: 50mM NH4NO3 vs 100mM Mannitol
  misc_feature: MA Experiment ID: 20001905 Result: Up-regulated in Transcription
  misc_feature: MA Experiment 20001905 PARAMETER Experiment Name: At_Drought_Reproduction_P Parameter: Age (day) Value: 40
  misc_feature: MA Experiment 20001905 PARAMETER Experiment Name: At_Drought_Reproduction_P Parameter: Organism Value: A. thaliana
  misc_feature: MA Experiment 20001905 PARAMETER Experiment Name: At_Drought_Reproduction_P Parameter: Plant Line Value: WS
  misc_feature: MA Experiment 20001905 PARAMETER Experiment Name: At_Drought_Reproduction_P Parameter: Timepoint (day) Value: 10
  misc_feature: MA Experiment 20001905 PARAMETER Experiment Name: At_Drought_Reproduction_P Parameter: Tissue Value: Rosettes
  misc_feature: MA Experiment 20001905 PARAMETER Experiment Name: At_Drought_Reproduction_P Parameter: Treatment Value: Drought vs. No Drought
atctttcttctctctctatctctcctctttgaaccctaaaaactctttctttacaaggattgatctttttgtatttttgattttgacatttgctttgtgttcgatctctgttttgatgcgatttctctgtttttaaagccatttgatagattgtttccggtaaagctcagcgagagaagaagaagaacaacaatggagtttacagatttctcaaagacgagtttttactacccgtcgtcacaaagcgtttgggatttcggagatttagcggcggcggagaggcattctttagggttcatggagttattaagttctcagcagcatcaagactttgctactgtttctcctcattccttccttctccaaacgtctcaaccgcaaacgcaaacgcaaccatcggcgaagctgtcttcaagtatcattcaagctccaccgtcagagcaattagtgacgtcaaaggtggagtctttgtgttcggatcatttgttgataaacccaccggcgactcctaactcgtcatcgatttcgtctgcttcaagcgaggctctaaatgaagagaaaccgaaaacagaagacaatgaagaagaaggaggtgaagatcaacaagagaagagtcatactaagaaacagttgaaagcaaagaagaataatcagaagagacagagagaggcaagagtcgcattcatgacaaagagtgaagttgatcatctcgaagatggttatcgctggcgaaaatatggtcaaaaagctgtcaaaaacagtccttttcccaggagttactaccgttgcacaacggcttcatgtaacgtgaagaagagagtggagagatcattcagagatccaagcactgtggttacaacctacgaaggtcaacacactcacattagtccactcacgtctcgtcctatttccactggaggtttcttcggatcgtcaggagctgcttcgagtctcggtaatggttgctttgggtttcctattgatggctccacgttaatctctcctcagttccaacagcttgtccaataccatcaccaacagcagcaacaagaactcatgtcttgttttggaggagtcaacgagtaccttaatagccacgctaatgagtatggtgatgataatcgtgtgaagaagagtcgagttttggttaaagataatggacttctgcaagatgttgttccgtctcatatgttgaaggaagagtagtagtatatatatagtcttatagttttaatctagtttttttttgtataattgtctaaaagaaacggatcttttgttctgatgaagaagatgttttct

SEQ ID NO: 99451 - protein, 337 aa, Arabidopsis thaliana; identical to SEQ ID NO: 40414
  peptide (1)..(337): Ceres Seq. ID no. 13602945
  misc_feature (173)..(232): Pfam Name: WRKY DNA -binding domain Pfam Description: WRKY DNA -binding domain
  misc_feature (1)..(337): Homolog of NCBI NO: 15226550 NR Description: WRKY family transcription factor [Arabidopsis >gi|29839448|sp|O22900|WR23_ARATH Probable WRKY transcription
  misc_feature (1)..(337): Homolog of NCBI NO: 21536889 NR Description: putative WRKY-type DNA binding protein
  misc_feature (45)..(333): Homolog of NCBI NO: 15239913 NR Description: WRKY family transcription factor [Arabidopsis >gi|20978785|sp|Q9FGZ4|WR48_ARATH Probable WRKY transcription
  misc_feature (99)..(337): Homolog of NCBI NO: 11357984 NR Description: hypothetical protein T12C14.40 - Arabidopsis >gi|7340705|emb|CAB82948.1| putative protein [Arabidopsis
  misc_feature (99)..(337): Homolog of NCBI NO: 18412338 NR Description: WRKY family transcription factor [Arabidopsis >gi|29839600|sp|Q93WV6|WR68_ARATH Probable WRKY transcription
  misc_feature (104)..(249): Homolog of NCBI NO: 34912866 NR Description: putative DNA-binding protein homolog [Oryza
  misc_feature (10)..(252): Homolog of NCBI NO: 15236785 NR Description: WRKY family transcription factor [Arabidopsis >gi|29839578|sp|Q8VWJ2|WR28_ARATH Probable WRKY transcription
  misc_feature (105)..(237): Homolog of NCBI NO: 15220582 NR Description: WRKY family transcription factor [Arabidopsis >gi|29839598|sp|Q93WV4|WR71_ARATH Probable WRKY transcription
  misc_feature (105)..(237): Homolog of NCBI NO: 25518132 NR Description: F1N18.10 protein - Arabidopsis thaliana
  misc_feature (10)..(337): Homolog of NCBI NO: 7484934 NR Description: DNA-binding protein homolog T9A21.10 -

SEQ ID NO: 99452 - protein, 302 aa, Arabidopsis thaliana; identical to SEQ ID NO: 40415
  peptide (1)..(302): Ceres Seq. ID no. 13602946
  misc_feature (138)..(197): Pfam Name: WRKY DNA -binding domain Pfam Description: WRKY DNA -binding domain
  misc_feature (1)..(302): Homolog of NCBI NO: 15226550 NR Description: WRKY family transcription factor [Arabidopsis >gi|29839448|sp|O22900|WR23_ARATH Probable WRKY transcription
  misc_feature (1)..(302): Homolog of NCBI NO: 21536889 NR Description: putative WRKY-type DNA binding protein
  misc_feature (10)..(298): Homolog of NCBI NO: 15239913 NR Description: WRKY family transcription factor [Arabidopsis >gi|20978785|sp|Q9FGZ4|WR48_ARATH Probable WRKY transcription
  misc_feature (64)..(302): Homolog of NCBI NO: 11357984 NR Description: hypothetical protein T12C14.40 - Arabidopsis >gi|7340705|emb|CAB82948.1| putative protein [Arabidopsis
  misc_feature (64)..(302): Homolog of NCBI NO: 18412338 NR Description: WRKY family transcription factor [Arabidopsis >gi|29839600|sp|Q93WV6|WR68_ARATH Probable WRKY transcription
  misc_feature (69)..(214): Homolog of NCBI NO: 34912866 NR Description: putative DNA-binding protein homolog [Oryza
  misc_feature (1)..(217): Homolog of NCBI NO: 15236785 NR Description: WRKY family transcription factor [Arabidopsis >gi|29839578|sp|Q8VWJ2|WR28_ARATH Probable WRKY transcription
  misc_feature (70)..(202): Homolog of NCBI NO: 15220582 NR Description: WRKY family transcription factor [Arabidopsis >gi|29839598|sp|Q93WV4|WR71_ARATH Probable WRKY transcription
  misc_feature (70)..(202): Homolog of NCBI NO: 25518132 NR Description: F1N18.10 protein - Arabidopsis thaliana
  misc_feature (1)..(302): Homolog of NCBI NO: 7484934 NR Description: DNA-binding protein homolog T9A21.10 -

SEQ ID NO: 99453 - protein, 173 aa, Arabidopsis thaliana; identical to SEQ ID NO: 40416
  peptide (1)..(173): Ceres Seq. ID no. 13602947
  misc_feature (9)..(68): Pfam Name: WRKY DNA -binding domain Pfam Description: WRKY DNA -binding domain
  misc_feature (1)..(173): Homolog of NCBI NO: 15226550 NR Description: WRKY family transcription factor [Arabidopsis >gi|29839448|sp|O22900|WR23_ARATH Probable WRKY transcription
  misc_feature (1)..(173): Homolog of NCBI NO: 21536889 NR Description: putative WRKY-type DNA binding protein
  misc_feature (1)..(169): Homolog of NCBI NO: 15239913 NR Description: WRKY family transcription factor [Arabidopsis >gi|20978785|sp|Q9FGZ4|WR48_ARATH Probable WRKY transcription
  misc_feature (1)..(173): Homolog of NCBI NO: 11357984 NR Description: hypothetical protein T12C14.40 - Arabidopsis >gi|7340705|emb|CAB82948.1| putative protein [Arabidopsis
  misc_feature (1)..(173): Homolog of NCBI NO: 18412338 NR Description: WRKY family transcription factor [Arabidopsis >gi|29839600|sp|Q93WV6|WR68_ARATH Probable WRKY transcription
  misc_feature (1)..(85): Homolog of NCBI NO: 34912866 NR Description: putative DNA-binding protein homolog [Oryza
  misc_feature (1)..(88): Homolog of NCBI NO: 15236785 NR Description: WRKY family transcription factor [Arabidopsis >gi|29839578|sp|Q8VWJ2|WR28_ARATH Probable WRKY transcription
  misc_feature (1)..(73): Homolog of NCBI NO: 15220582 NR Description: WRKY family transcription factor [Arabidopsis >gi|29839598|sp|Q93WV4|WR71_ARATH Probable WRKY transcription
  misc_feature (1)..(73): Homolog of NCBI NO: 25518132 NR Description: F1N18.10 protein - Arabidopsis thaliana
  misc_feature (1)..(173): Homolog of NCBI NO: 7484934 NR Description: DNA-binding protein homolog T9A21.10 -

SEQ ID NO: 99454 - DNA, 1208 bp, Arabidopsis thaliana
  misc_feature (1)..(1208): Ceres Seq. ID no. 13602960
  misc_feature: MA Experiment ID: 108501 Result: Up-regulated in Transcription
  misc_feature: MA Experiment 108501 PARAMETER Experiment Name: At_ap2_floral_buds_cDNA_P Parameter: Plant Line Value: ap2 (Ler.)
  misc_feature: MA Experiment 108501 PARAMETER Experiment Name: At_ap2_floral_buds_cDNA_P Parameter: Tissue Value: Closed Flower
  misc_feature: MA Experiment ID: 108595 Result: Up-regulated in Transcription
  misc_feature: MA Experiment 108595 PARAMETER Experiment Name: At_Ler-pi_Ovule_cDNA_P Parameter: Plant Line Value: null
  misc_feature: MA Experiment ID: 108667 Result: Down-regulated in Transcription
  misc_feature: MA Experiment 108667 PARAMETER Experiment Name: At_2mM_SA_cDNA_P Parameter: Plant Line Value: WS
  misc_feature: MA Experiment 108667 PARAMETER Experiment Name: At_2mM_SA_cDNA_P Parameter: Timepoint (hr) Value: 1
  misc_feature: MA Experiment 108667 PARAMETER Experiment Name: At_2mM_SA_cDNA_P Parameter: Treatment Value: 2mM SA vs. No Treatment
  misc_feature: MA Experiment ID: 20000089 Result: Down-regulated in Transcription
  misc_feature: MA Experiment ID: 20000169 Result: Up-regulated in Transcription
  misc_feature: MA Experiment 20000169 PARAMETER Experiment Name: At_100uM_ABA_P Parameter: Age (day) Value: 14
  misc_feature: MA Experiment 20000169 PARAMETER Experiment Name: At_100uM_ABA_P Parameter: Organism Value: A. thaliana
  misc_feature: MA Experiment 20000169 PARAMETER Experiment Name: At_100uM_ABA_P Parameter: Plant Line Value: WS
  misc_feature: MA Experiment 20000169 PARAMETER Experiment Name: At_100uM_ABA_P Parameter: Timepoint (hr) Value: 6
  misc_feature: MA Experiment 20000169 PARAMETER Experiment Name: At_100uM_ABA_P Parameter: Tissue Value: Aerial
  misc_feature: MA Experiment 20000169 PARAMETER Experiment Name: At_100uM_ABA_P Parameter: Treatment Value: 100uM ABA vs. No Treatment
  misc_feature: MA Experiment ID: 20000227 Result: Up-regulated in Transcription
  misc_feature: MA Experiment 20000227 PARAMETER Experiment Name: At_Root-Tips-vs-Tops_P Parameter: Tissue Value: Root Tips vs. Root Tops
  misc_feature: MA Experiment ID: 20000234 Result: Up-regulated in Transcription
  misc_feature: MA Experiment 20000234 PARAMETER Experiment Name: At_Siliques_P Parameter: Age (day) Value: 21
  misc_feature: MA Experiment 20000234 PARAMETER Experiment Name: At_Siliques_P Parameter: Organism Value: A. thaliana
  misc_feature: MA Experiment 20000234 PARAMETER Experiment Name: At_Siliques_P Parameter: Plant Line Value: WS
  misc_feature: MA Experiment 20000234 PARAMETER Experiment Name: At_Siliques_P Parameter: Tissue Value: Less Than 5mm Siliques vs. Whole Plant
  misc_feature: MA Experiment ID: 20000235 Result: Up-regulated in Transcription
  misc_feature: MA Experiment 20000235 PARAMETER Experiment Name: At_Siliques_P Parameter: Age (day) Value: 21
  misc_feature: MA Experiment 20000235 PARAMETER Experiment Name: At_Siliques_P Parameter: Organism Value: A. thaliana
  misc_feature: MA Experiment 20000235 PARAMETER Experiment Name: At_Siliques_P Parameter: Plant Line Value: WS
  misc_feature: MA Experiment 20000235 PARAMETER Experiment Name: At_Siliques_P Parameter: Tissue Value: 5-10mm Siliques vs. Whole Plant
  misc_feature: MA Experiment ID: 20000264 Result: Up-regulated in Transcription
  misc_feature: MA Experiment 20000264 PARAMETER Experiment Name: At_Open_Flower_P Parameter: Age (day) Value: 21
  misc_feature: MA Experiment 20000264 PARAMETER Experiment Name: At_Open_Flower_P Parameter: Plant Line Value: WS
  misc_feature: MA Experiment 20000264 PARAMETER Experiment Name: At_Open_Flower_P Parameter: Tissue Value: Open Flower vs. Whole Plant
  misc_feature: MA Experiment ID: 20000444 Result: Up-regulated in Transcription
  misc_feature: MA Experiment 20000444 PARAMETER Experiment Name: At_100uM_NAA__P Parameter: Age (day) Value: 14
  misc_feature: MA Experiment 20000444 PARAMETER Experiment Name: At_100uM_NAA__P Parameter: Organism Value: A. thaliana
  misc_feature: MA Experiment 20000444 PARAMETER Experiment Name: At_100uM_NAA__P Parameter: Plant Line Value: WS
  misc_feature: MA Experiment 20000444 PARAMETER Experiment Name: At_100uM_NAA__P Parameter: Timepoint (hr) Value: 1
  misc_feature: MA Experiment 20000444 PARAMETER Experiment Name: At_100uM_NAA__P Parameter: Tissue Value: Aerial
  misc_feature: MA Experiment 20000444 PARAMETER Experiment Name: At_100uM_NAA__P Parameter: Treatment Value: 100uM NAA vs. No Treatment
  misc_feature: MA Experiment ID: 20000445 Result: Up-regulated in Transcription
  misc_feature: MA Experiment 20000445 PARAMETER Experiment Name: At_100uM_NAA__P Parameter: Age (day) Value: 14
  misc_feature: MA Experiment 20000445 PARAMETER Experiment Name: At_100uM_NAA__P Parameter: Organism Value: A. thaliana
  misc_feature: MA Experiment 20000445 PARAMETER Experiment Name: At_100uM_NAA__P Parameter: Plant Line Value: WS
  misc_feature: MA Experiment 20000445 PARAMETER Experiment Name: At_100uM_NAA__P Parameter: Timepoint (hr) Value: 6
  misc_feature: MA Experiment 20000445 PARAMETER Experiment Name: At_100uM_NAA__P Parameter: Tissue Value: Aerial
  misc_feature: MA Experiment 20000445 PARAMETER Experiment Name: At_100uM_NAA__P Parameter: Treatment Value: 100uM NAA vs. No Treatment
  misc_feature: MA Experiment ID: 20000451 Result: Down-regulated in Transcription
  misc_feature: MA Experiment 20000451 PARAMETER Experiment Name: At_CS6879_Shoots-Roots_P Parameter: Age (day) Value: 14
  misc_feature: MA Experiment 20000451 PARAMETER Experiment Name: At_CS6879_Shoots-Roots_P Parameter: Organism Value: A. thaliana
  misc_feature: MA Experiment 20000451 PARAMETER Experiment Name: At_CS6879_Shoots-Roots_P Parameter: Plant Line Value: CS6879 vs. WS
  misc_feature: MA Experiment 20000451 PARAMETER Experiment Name: At_CS6879_Shoots-Roots_P Parameter: Tissue Value: Roots
  misc_feature: MA Experiment ID: 20000527 Result: Down-regulated in Transcription
  misc_feature: MA Experiment 20000527 PARAMETER Experiment Name: At_10percent_PEG_P Parameter: Age (day) Value: 20
  misc_feature: MA Experiment 20000527 PARAMETER Experiment Name: At_10percent_PEG_P Parameter: Organism Value: A. thaliana
  misc_feature: MA Experiment 20000527 PARAMETER Experiment Name: At_10percent_PEG_P Parameter: Plant Line Value: WS
  misc_feature: MA Experiment 20000527 PARAMETER Experiment Name: At_10percent_PEG_P Parameter: Timepoint (day) Value: 20
  misc_feature: MA Experiment 20000527 PARAMETER Experiment Name: At_10percent_PEG_P Parameter: Tissue Value: Whole Plant
  misc_feature: MA Experiment 20000527 PARAMETER Experiment Name: At_10percent_PEG_P Parameter: Treatment Value: 10percent PEG vs. No Treatment
  misc_feature: MA Experiment ID: 20000794 Result: Down-regulated in Transcription
  misc_feature: MA Experiment 20000794 PARAMETER Experiment Name: At_Petals_P Parameter: Age (day) Value: 23-25 days
  misc_feature: MA Experiment 20000794 PARAMETER Experiment Name: At_Petals_P Parameter: Plant Line Value: WS
  misc_feature: MA Experiment 20000794 PARAMETER Experiment Name: At_Petals_P Parameter: Tissue Value: Petals vs. Whole plant
  misc_feature: MA Experiment ID: 20001247 Result: Up-regulated in Transcription
  misc_feature: MA Experiment 20001247 PARAMETER Experiment Name: At_Far-red-induction_P Parameter: Age (day) Value: 7
  misc_feature: MA Experiment 20001247 PARAMETER Experiment Name: At_Far-red-induction_P Parameter: Light Value: Far-red vs. White
  misc_feature: MA Experiment 20001247 PARAMETER Experiment Name: At_Far-red-induction_P Parameter: Organism Value: A. thaliana
  misc_feature: MA Experiment 20001247 PARAMETER Experiment Name: At_Far-red-induction_P Parameter: Plant Line Value: Columbia
  misc_feature: MA Experiment 20001247 PARAMETER Experiment Name: At_Far-red-induction_P Parameter: Timepoint (hr) Value: 1
  misc_feature: MA Experiment 20001247 PARAMETER Experiment Name: At_Far-red-induction_P Parameter: Tissue Value: Whole Plant
  misc_feature: MA Experiment ID: 20001248 Result: Up-regulated in Transcription
  misc_feature: MA Experiment 20001248 PARAMETER Experiment Name: At_Far-red-induction_P Parameter: Age (day) Value: 7
  misc_feature: MA Experiment 20001248 PARAMETER Experiment Name: At_Far-red-induction_P Parameter: Light Value: Far-red vs. White
  misc_feature: MA Experiment 20001248 PARAMETER Experiment Name: At_Far-red-induction_P Parameter: Organism Value: A. thaliana
  misc_feature: MA Experiment 20001248 PARAMETER Experiment Name: At_Far-red-induction_P Parameter: Plant Line Value: Columbia
  misc_feature: MA Experiment 20001248 PARAMETER Experiment Name: At_Far-red-induction_P Parameter: Timepoint (hr) Value: 4
  misc_feature: MA Experiment 20001248 PARAMETER Experiment Name: At_Far-red-induction_P Parameter: Tissue Value: Whole Plant
  misc_feature: MA Experiment ID: 20001450 Result: Up-regulated in Transcription
  misc_feature: MA Experiment 20001450 PARAMETER Experiment Name: At_Far-red-induction_P Parameter: Age (day) Value: 7
  misc_feature: MA Experiment 20001450 PARAMETER Experiment Name: At_Far-red-induction_P Parameter: Light Value: Far-red vs. White
  misc_feature: MA Experiment 20001450 PARAMETER Experiment Name: At_Far-red-induction_P Parameter: Organism Value: A. thaliana
  misc_feature: MA Experiment 20001450 PARAMETER Experiment Name: At_Far-red-induction_P Parameter: Plant Line Value: Columbia
  misc_feature: MA Experiment 20001450 PARAMETER Experiment Name: At_Far-red-induction_P Parameter: Timepoint (hr) Value: 8
  misc_feature: MA Experiment 20001450 PARAMETER Experiment Name: At_Far-red-induction_P Parameter: Tissue Value: Whole Plant
  misc_feature: MA Experiment ID: 20001557 Result: Down-regulated in Transcription
  misc_feature: MA Experiment 20001557 PARAMETER Experiment Name: At_Drought_Soil_Dry_P Parameter: Age (day) Value: 27
  misc_feature: MA Experiment 20001557 PARAMETER Experiment Name: At_Drought_Soil_Dry_P Parameter: Organism Value: A. thaliana
  misc_feature: MA Experiment 20001557 PARAMETER Experiment Name: At_Drought_Soil_Dry_P Parameter: Plant Line Value: WS
  misc_feature: MA Experiment 20001557 PARAMETER Experiment Name: At_Drought_Soil_Dry_P Parameter: Post Timepoint (hr) Value: 3
  misc_feature: MA Experiment 20001557 PARAMETER Experiment Name: At_Drought_Soil_Dry_P Parameter: Post-Treatment Value: Re-Water vs. No Drought
  misc_feature: MA Experiment 20001557 PARAMETER Experiment Name: At_Drought_Soil_Dry_P Parameter: Timepoint (day) Value: 13
  misc_feature: MA Experiment 20001557 PARAMETER Experiment Name: At_Drought_Soil_Dry_P Parameter: Treatment Value: Drought vs. No Drought
  misc_feature: MA Experiment ID: 20001558 Result: Down-regulated in Transcription
  misc_feature: MA Experiment 20001558 PARAMETER Experiment Name: At_Drought_Soil_Dry_P Parameter: Age (day) Value: 27
  misc_feature: MA Experiment 20001558 PARAMETER Experiment Name: At_Drought_Soil_Dry_P Parameter: Organism Value: A. thaliana
  misc_feature: MA Experiment 20001558 PARAMETER Experiment Name: At_Drought_Soil_Dry_P Parameter: Plant Line Value: WS
  misc_feature: MA Experiment 20001558 PARAMETER Experiment Name: At_Drought_Soil_Dry_P Parameter: Post Timepoint (hr) Value: 6
  misc_feature: MA Experiment 20001558 PARAMETER Experiment Name: At_Drought_Soil_Dry_P Parameter: Post-Treatment Value: Re-Water vs. No Drought
  misc_feature: MA Experiment 20001558 PARAMETER Experiment Name: At_Drought_Soil_Dry_P Parameter: Timepoint (day) Value: 13
  misc_feature: MA Experiment 20001558 PARAMETER Experiment Name: At_Drought_Soil_Dry_P Parameter: Treatment Value: Drought vs. No Drought
  misc_feature: MA Experiment ID: 20001905 Result: Down-regulated in Transcription
  misc_feature: MA Experiment 20001905 PARAMETER Experiment Name: At_Drought_Reproduction_P Parameter: Age (day) Value: 40
  misc_feature: MA Experiment 20001905 PARAMETER Experiment Name: At_Drought_Reproduction_P Parameter: Organism Value: A. thaliana
  misc_feature: MA Experiment 20001905 PARAMETER Experiment Name: At_Drought_Reproduction_P Parameter: Plant Line Value: WS
  misc_feature: MA Experiment 20001905 PARAMETER Experiment Name: At_Drought_Reproduction_P Parameter: Timepoint (day) Value: 10
  misc_feature: MA Experiment 20001905 PARAMETER Experiment Name: At_Drought_Reproduction_P Parameter: Tissue Value: Rosettes
  misc_feature: MA Experiment 20001905 PARAMETER Experiment Name: At_Drought_Reproduction_P Parameter: Treatment Value: Drought vs. No Drought
aaagagaatgggttctaagggagacaacgttgctgtatgtaacatgaagctcgagagacttctcagcatgaaaggtggcaaaggacaagacagctacgccaataactctcaagctcaggcaatgcatgcacggtccatgcttcacctcctagaggaaacacttgaaaatgttcacctcaactcctccgccagtccgccaccgttcacggcggttgatcttggctgttcctccggcgcaaatactgtccacataatcgatttcatagtcaaacatatctctaagaggtttgatgctgccggaatcgaccctccggagttcacagctttcttctccgatctcccaagcaacgacttcaacacgcttttccagcttcttccaccacttgtctctaacacttgcatggaggagtgtcttgctgccgacgggaaccgctcctacttcgttgctggtgttcccggatcgttttaccggcgactttttccagcgagaaccattgactttttccactctgccttctccttgcattggctctctcaggtgccggaaagtgtgacggataggagatcggcggcgtacaatagagggagagttttcatacacggtgccggagagaagacaacaacggcatacaaacggcagtttcaggccgacttagcggagtttttgagggcaagagcggcggaggttaagagaggtggggccatgttcctggtctgtcttggtcgtacctctgtggatcccaccgaccagggtggtgccggtctactcttcggcactcattttcaggacgcttgggacgaccttgtccgcgagggtttggtagcagcagagaaacgagatggattcaatatcccggtgtacgcaccaagcttgcaagatttcaaggaagtagttgacgccaacggctcatttgcaattgataagctggtagtatacaaaggagggagtccacttgtggtgaatgagccagacgatgcatcagaagttggtcgtgcctttgctagtagttgtcggagtgtggccggagtgctcgtggaagctcacataggcgaagagctaagcaataaactgttctcacgagttgaaagccgagccactagccatgccaaagatgtcttggtgaatttgcagttcttccacattgtcgcttctttgtcttttacttaattagtaccaaataatatgaaaaagaaatatgttcgtgtgc

SEQ ID NO: 99455 - protein, 388 aa, Arabidopsis thaliana
  peptide (1)..(388): Ceres Seq. ID no. 13602961
  misc_feature (50)..(388): Pfam Name: SAM dependent carboxyl methyltransferase Pfam Description: SAM dependent carboxyl methyltransferase
  misc_feature (3)..(388): Homolog of NCBI NO: 15240487 NR Description: S-adenosyl-L-methionine:carboxyl
  misc_feature (15)..(388): Homolog of NCBI NO: 21593254 NR Description: S-adenosyl-L-methionine:salicylic acid carboxyl
  misc_feature (6)..(386): Homolog of NCBI NO: 32488655 NR Description: OSJNBa0087O24.5 [Oryza sativa (japonica
  misc_feature (17)..(386): Homolog of NCBI NO: 32488666 NR Description: OSJNBa0087O24.16 [Oryza sativa (japonica
  misc_feature (18)..(386): Homolog of NCBI NO: 32488662 NR Description: OSJNBa0087O24.12 [Oryza sativa (japonica
  misc_feature (17)..(386): Homolog of NCBI NO: 32488665 NR Description: OSJNBa0087O24.15 [Oryza sativa (japonica
  misc_feature (173)..(386): Homolog of NCBI NO: 32488664 NR Description: OSJNBa0087O24.14 [Oryza sativa (japonica
  misc_feature (23)..(94): Homolog of NCBI NO: 32488664 NR Description: OSJNBa0087O24.14 [Oryza sativa (japonica
  misc_feature (17)..(381): Homolog of NCBI NO: 10177828 NR Description: S-adenosyl-L-methionine:salicylic acid carboxyl
  misc_feature (17)..(381): Homolog of NCBI NO: 30696725 NR Description: S-adenosyl-L-methionine:carboxyl
KRMGSKGDNVAVCNMKLERLLSMKGGKGQDSYANNSQAQAMHARSMLHLLEETLENVHLNSSASPPPFTAVDLGCSSGANTVHIIDFIVKHISKRFDAAGIDPPEFTAFFSDLPSNDFNTLFQLLPPLVSNTCMEECLAADGNRSYFVAGVPGSFYRRLFPARTIDFFHSAFSLHWLSQVPESVTDRRSAAYNRGRVFIHGAGEKTTTAYKRQFQADLAEFLRARAAEVKRGGAMFLVCLGRTSVDPTDQGGAGLLFGTHFQDAWDDLVREGLVAAEKRDGFNIPVYAPSLQDFKEVVDANGSFAIDKLVVYKGGSPLVVNEPDDASEVGRAFASSCRSVAGVLVEAHIGEELSNKLFSRVESRATSHAKDVLVNLQFFHIVASLSFT

SEQ ID NO: 99456 - protein, 386 aa, Arabidopsis thaliana
  peptide (1)..(386): Ceres Seq. ID no. 13602962
  misc_feature (48)..(386): Pfam Name: SAM dependent carboxyl methyltransferase Pfam Description: SAM dependent carboxyl methyltransferase
  misc_feature (1)..(386): Homolog of NCBI NO: 15240487 NR Description: S-adenosyl-L-methionine:carboxyl
  misc_feature (13)..(386): Homolog of NCBI NO: 21593254 NR Description: S-adenosyl-L-methionine:salicylic acid carboxyl
  misc_feature (4)..(384): Homolog of NCBI NO: 32488655 NR Description: OSJNBa0087O24.5 [Oryza sativa (japonica
  misc_feature (15)..(384): Homolog of NCBI NO: 32488666 NR Description: OSJNBa0087O24.16 [Oryza sativa (japonica
  misc_feature (16)..(384): Homolog of NCBI NO: 32488662 NR Description: OSJNBa0087O24.12 [Oryza sativa (japonica
  misc_feature (15)..(384): Homolog of NCBI NO: 32488665 NR Description: OSJNBa0087O24.15 [Oryza sativa (japonica
  misc_feature (171)..(384): Homolog of NCBI NO: 32488664 NR Description: OSJNBa0087O24.14 [Oryza sativa (japonica
  misc_feature (21)..(92): Homolog of NCBI NO: 32488664 NR Description: OSJNBa0087O24.14 [Oryza sativa (japonica
  misc_feature (15)..(379): Homolog of NCBI NO: 10177828 NR Description: S-adenosyl-L-methionine:salicylic acid carboxyl
  misc_feature (15)..(379): Homolog of NCBI NO: 30696725 NR Description: S-adenosyl-L-methionine:carboxyl
MGSKGDNVAVCNMKLERLLSMKGGKGQDSYANNSQAQAMHARSMLHLLEETLENVHLNSSASPPPFTAVDLGCSSGANTVHIIDFIVKHISKRFDAAGIDPPEFTAFFSDLPSNDFNTLFQLLPPLVSNTCMEECLAADGNRSYFVAGVPGSFYRRLFPARTIDFFHSAFSLHWLSQVPESVTDRRSAAYNRGRVFIHGAGEKTTTAYKRQFQADLAEFLRARAAEVKRGGAMFLVCLGRTSVDPTDQGGAGLLFGTHFQDAWDDLVREGLVAAEKRDGFNIPVYAPSLQDFKEVVDANGSFAIDKLVVYKGGSPLVVNEPDDASEVGRAFASSCRSVAGVLVEAHIGEELSNKLFSRVESRATSHAKDVLVNLQFFHIVASLSFT

SEQ ID NO: 99457 - protein, 374 aa, Arabidopsis thaliana
  peptide (1)..(374): Ceres Seq. ID no. 13602963
  misc_feature (36)..(374): Pfam Name: SAM dependent carboxyl methyltransferase Pfam Description: SAM dependent carboxyl methyltransferase
  misc_feature (1)..(374): Homolog of NCBI NO: 15240487 NR Description: S-adenosyl-L-methionine:carboxyl
  misc_feature (1)..(374): Homolog of NCBI NO: 21593254 NR Description: S-adenosyl-L-methionine:salicylic acid carboxyl
  misc_feature (1)..(372): Homolog of NCBI NO: 32488655 NR Description: OSJNBa0087O24.5 [Oryza sativa (japonica
  misc_feature (3)..(372): Homolog of NCBI NO: 32488666 NR Description: OSJNBa0087O24.16 [Oryza sativa (japonica
  misc_feature (4)..(372): Homolog of NCBI NO: 32488662 NR Description: OSJNBa0087O24.12 [Oryza sativa (japonica
  misc_feature (3)..(372): Homolog of NCBI NO: 32488665 NR Description: OSJNBa0087O24.15 [Oryza sativa (japonica
  misc_feature (159)..(372): Homolog of NCBI NO: 32488664 NR Description: OSJNBa0087O24.14 [Oryza sativa (japonica
  misc_feature (9)..(80): Homolog of NCBI NO: 32488664 NR Description: OSJNBa0087O24.14 [Oryza sativa (japonica
  misc_feature (3)..(367): Homolog of NCBI NO: 10177828 NR Description: S-adenosyl-L-methionine:salicylic acid carboxyl
  misc_feature (3)..(367): Homolog of NCBI NO: 30696725 NR Description: S-adenosyl-L-methionine:carboxyl
MKLERLLSMKGGKGQDSYANNSQAQAMHARSMLHLLEETLENVHLNSSASPPPFTAVDLGCSSGANTVHIIDFIVKHISKRFDAAGIDPPEFTAFFSDLPSNDFNTLFQLLPPLVSNTCMEECLAADGNRSYFVAGVPGSFYRRLFPARTIDFFHSAFSLHWLSQVPESVTDRRSAAYNRGRVFIHGAGEKTTTAYKRQFQADLAEFLRARAAEVKRGGAMFLVCLGRTSVDPTDQGGAGLLFGTHFQDAWDDLVREGLVAAEKRDGFNIPVYAPSLQDFKEVVDANGSFAIDKLVVYKGGSPLVVNEPDDASEVGRAFASSCRSVAGVLVEAHIGEELSNKLFSRVESRATSHAKDVLVNLQFFHIVASLSFT

SEQ ID NO: 99458 - DNA, 1624 bp, Arabidopsis thaliana
  misc_feature (1)..(1624): Ceres Seq. ID no. 13602968
  misc_feature: MA Experiment ID: 108573 Result: Up-regulated in Transcription
  misc_feature: MA Experiment 108573 PARAMETER Experiment Name: At_Drought_cDNA_P Parameter: Timepoint (hr) Value: 6
  misc_feature: MA Experiment 108573 PARAMETER Experiment Name: At_Drought_cDNA_P Parameter: Tissue Value: Aerial
  misc_feature: MA Experiment 108573 PARAMETER Experiment Name: At_Drought_cDNA_P Parameter: Treatment Value: Drought vs. No Drought
  misc_feature: MA Experiment ID: 108577 Result: Down-regulated in Transcription
  misc_feature: MA Experiment 108577 PARAMETER Experiment Name: At_42deg_Heat_cDNA_P Parameter: Temperature (deg C) Value: 42 vs. 22
  misc_feature: MA Experiment 108577 PARAMETER Experiment Name: At_42deg_Heat_cDNA_P Parameter: Timepoint (hr) Value: 6
  misc_feature: MA Experiment 108577 PARAMETER Experiment Name: At_42deg_Heat_cDNA_P Parameter: Tissue Value: Aerial
  misc_feature: MA Experiment ID: 20000113 Result: Down-regulated in Transcription
  misc_feature: MA Experiment 20000113 PARAMETER Experiment Name: At_42deg_Heat_cDNA_P Parameter: Temperature (deg C) Value: 42 vs. 22
  misc_feature: MA Experiment 20000113 PARAMETER Experiment Name: At_42deg_Heat_cDNA_P Parameter: Timepoint (hr) Value: 8
  misc_feature: MA Experiment 20000113 PARAMETER Experiment Name: At_42deg_Heat_cDNA_P Parameter: Tissue Value: Aerial
ttctaactttttcttatgtaacccacccacatgcttgttcttctttctatcatcttcttacacgactacgacttgtctttctttaccctttttttttttgttttgtttaaagtttctctctttgtgggttcttgttgttagagaaatcagctgcctcagatcagagcttggttttggatttaggattgtttgttaggttttacaatggactccccacaatctgttgtttcaccattcaagattggtgagtcagagaatgagaactcaaattctgtgcagagttctggaaaccaatcgaatggcataaattccaatgggaaagattctaaaagttgtggccggcaagaccttgttggtgctcttgaggtttatgtccatcaggcaagggatatccataacatttgtatatatcacaagcaagacgtttatgccaagctttgccttacaagtgatcctgataagtctgtctcgaccaaaatcatcaatggcggtgggaggaatccggtttttgatgacaatgttaagcttgatgtcagggttctggacacttccctcaaatgtgagatttacatgatgagcagggtgaagaattatcttgaggaccagctgcttggttttactctggttcctatgtcggaactgctcttcaagaatgggaaactcgagaaagagttctctctttcttccactgatctctaccattcgccagctggttttgttcaattgtcactctcctattatggatcctaccctgacgtgatggctattccctctatgccttcgtctgtttctattgatgaaactaccaaggatccagaagggtctgaatcagttccgggtgagttggataagatagagtttccagatcctaatgttgctaatgaaaatgagaagatggtttccgagtattttgggatctcttgttccactattgactcagaaacttctgacagcttggttacttccgatgctgagaatcatgtgactaattctgtcacttctatactgaagcaagattcacctgagagcagcaatgcaacaaatggagctgcttctcctcacgcttcagctcactccgccacagaaacaccaaaccatgaacatctctctgtcgtgaactccaaagcgagttcccaggagtcagagagcgaggcttctggtgagacatctgaggagaagactgtgaaatccgtcctcactgtgaaggttgagccagagtcaaaggtggtgcagcaggatatagtcgacatgtacatgaaaagcatgcaacagtttacagattcactggctaagatgaagcttcctctggacattgacagcccaacaaaatcagaaaattcaagctctgattctcagaagctgccaacaccaaagagcaacaacggatcccgtgtgttctatgggagcaggcctttcttctgagcatctcttttaccaagttcagagaaagaacgcaggtcacccttagacttttctaatgaagaaagactaatcctaatgatgtaattttataatgtactatttcatgttgtatctcccatctggtcagcttgatgctttagttgatgtgagttattattacgtatcactagcctttactctattagaactatgtacgcattat

SEQ ID NO: 99459 - protein, 405 aa, Arabidopsis thaliana
  peptide (1)..(405): Ceres Seq. ID no. 13602969
  misc_feature (53)..(140): Pfam Name: C2 domain Pfam Description: C2 domain
  misc_feature (1)..(405): Homolog of NCBI NO: 9758185 NR Description: gene_id:MTE17.25~pir||T07080~similar to unknown
  misc_feature (1)..(405): Homolog of NCBI NO: 30696612 NR Description: C2 domain-containing protein [Arabidopsis
  misc_feature (1)..(405): Homolog of NCBI NO: 28393796 NR Description: unknown protein [Arabidopsis thaliana]
  misc_feature (19)..(405): Homolog of NCBI NO: 18403117 NR Description: C2 domain-containing protein [Arabidopsis >gi|9454555|gb|AAF87878.1|AC012561_11 Unknown protein
  misc_feature (19)..(405): Homolog of NCBI NO: 25405379 NR Description: unknown protein [imported] - Arabidopsis thaliana
  misc_feature (19)..(405): Homolog of NCBI NO: 21593485 NR Description: unknown [Arabidopsis thaliana]
  misc_feature (38)..(405): Homolog of NCBI NO: 24414275 NR Description: Unknown protein [Oryza sativa (japonica
  misc_feature (44)..(405): Homolog of NCBI NO: 18416832 NR Description: C2 domain-containing protein [Arabidopsis >gi|14586360|emb|CAC42891.1| putative protein [Arabidopsis
  misc_feature (36)..(343): Homolog of NCBI NO: 34901084 NR Description: contains ESTs
  misc_feature (53)..(405): Homolog of NCBI NO: 34906644 NR Description: P0431G06.18 [Oryza sativa (japonica
MDSPQSVVSPFKIGESENENSNSVQSSGNQSNGINSNGKDSKSCGRQDLVGALEVYVHQARDIHNICIYHKQDVYAKLCLTSDPDKSVSTKIINGGGRNPVFDDNVKLDVRVLDTSLKCEIYMMSRVKNYLEDQLLGFTLVPMSELLFKNGKLEKEFSLSSTDLYHSPAGFVQLSLSYYGSYPDVMAIPSMPSSVSIDETTKDPEGSESVPGELDKIEFPDPNVANENEKMVSEYFGISCSTIDSETSDSLVTSDAENHVTNSVTSILKQDSPESSNATNGAASPHASAHSATETPNHEHLSVVNSKASSQESESEASGETSEEKTVKSVLTVKVEPESKVVQQDIVDMYMKSMQQFTDSLAKMKLPLDIDSPTKSENSSSDSQKLPTPKSNNGSRVFYGSRPFF

SEQ ID NO: 99460 - protein, 283 aa, Arabidopsis thaliana
  peptide (1)..(283): Ceres Seq. ID no. 13602970
  misc_feature (1)..(283): Homolog of NCBI NO: 9758185 NR Description: gene_id:MTE17.25~pir||T07080~similar to unknown
  misc_feature (1)..(283): Homolog of NCBI NO: 30696612 NR Description: C2 domain-containing protein [Arabidopsis
  misc_feature (1)..(283): Homolog of NCBI NO: 28393796 NR Description: unknown protein [Arabidopsis thaliana]
  misc_feature (1)..(283): Homolog of NCBI NO: 18403117 NR Description: C2 domain-containing protein [Arabidopsis >gi|9454555|gb|AAF87878.1|AC012561_11 Unknown protein
  misc_feature (1)..(283): Homolog of NCBI NO: 25405379 NR Description: unknown protein [imported] - Arabidopsis thaliana
  misc_feature (1)..(283): Homolog of NCBI NO: 21593485 NR Description: unknown [Arabidopsis thaliana]
  misc_feature (1)..(283): Homolog of NCBI NO: 24414275 NR Description: Unknown protein [Oryza sativa (japonica
  misc_feature (1)..(283): Homolog of NCBI NO: 18416832 NR Description: C2 domain-containing protein [Arabidopsis >gi|14586360|emb|CAC42891.1| putative protein [Arabidopsis
  misc_feature (1)..(221): Homolog of NCBI NO: 34901084 NR Description: contains ESTs
  misc_feature (1)..(283): Homolog of NCBI NO: 34906644 NR Description: P0431G06.18 [Oryza sativa (japonica
MMSRVKNYLEDQLLGFTLVPMSELLFKNGKLEKEFSLSSTDLYHSPAGFVQLSLSYYGSYPDVMAIPSMPSSVSIDETTKDPEGSESVPGELDKIEFPDPNVANENEKMVSEYFGISCSTIDSETSDSLVTSDAENHVTNSVTSILKQDSPESSNATNGAASPHASAHSATETPNHEHLSVVNSKASSQESESEASGETSEEKTVKSVLTVKVEPESKVVQQDIVDMYMKSMQQFTDSLAKMKLPLDIDSPTKSENSSSDSQKLPTPKSNNGSRVFYGSRPFF

SEQ ID NO: 99461 - protein, 282 aa, Arabidopsis thaliana
  peptide (1)..(282): Ceres Seq. ID no. 13602971
  misc_feature (1)..(282): Homolog of NCBI NO: 9758185 NR Description: gene_id:MTE17.25~pir||T07080~similar to unknown
  misc_feature (1)..(282): Homolog of NCBI NO: 30696612 NR Description: C2 domain-containing protein [Arabidopsis
  misc_feature (1)..(282): Homolog of NCBI NO: 28393796 NR Description: unknown protein [Arabidopsis thaliana]
  misc_feature (1)..(282): Homolog of NCBI NO: 18403117 NR Description: C2 domain-containing protein [Arabidopsis >gi|9454555|gb|AAF87878.1|AC012561_11 Unknown protein
  misc_feature (1)..(282): Homolog of NCBI NO: 25405379 NR Description: unknown protein [imported] - Arabidopsis thaliana
  misc_feature (1)..(282): Homolog of NCBI NO: 21593485 NR Description: unknown [Arabidopsis thaliana]
  misc_feature (1)..(282): Homolog of NCBI NO: 24414275 NR Description: Unknown protein [Oryza sativa (japonica
  misc_feature (1)..(282): Homolog of NCBI NO: 18416832 NR Description: C2 domain-containing protein [Arabidopsis >gi|14586360|emb|CAC42891.1| putative protein [Arabidopsis
  misc_feature (1)..(220): Homolog of NCBI NO: 34901084 NR Description: contains ESTs
  misc_feature (1)..(282): Homolog of NCBI NO: 34906644 NR Description: P0431G06.18 [Oryza sativa (japonica
MSRVKNYLEDQLLGFTLVPMSELLFKNGKLEKEFSLSSTDLYHSPAGFVQLSLSYYGSYPDVMAIPSMPSSVSIDETTKDPEGSESVPGELDKIEFPDPNVANENEKMVSEYFGISCSTIDSETSDSLVTSDAENHVTNSVTSILKQDSPESSNATNGAASPHASAHSATETPNHEHLSVVNSKASSQESESEASGETSEEKTVKSVLTVKVEPESKVVQQDIVDMYMKSMQQFTDSLAKMKLPLDIDSPTKSENSSSDSQKLPTPKSNNGSRVFYGSRPFF

SEQ ID NO: 99462 - DNA, 1997 bp, Arabidopsis thaliana
  misc_feature (1)..(1997): Ceres Seq. ID no. 13602972
  misc_feature: MA Experiment ID: 20000496 Result: Up-regulated in Transcription
  misc_feature: MA Experiment 20000496 PARAMETER Experiment Name: At_Guard_Cells_P Parameter: Harvest Date Value: 7/19/2002
  misc_feature: MA Experiment 20000496 PARAMETER Experiment Name: At_Guard_Cells_P Parameter: Organism Value: Canola
  misc_feature: MA Experiment 20000496 PARAMETER Experiment Name: At_Guard_Cells_P Parameter: Tissue Value: Guard Cells vs. Leaves
ggaggaacgaagattatcgagagcaaaaatcatgagtagtacgatgttcgtgaaacggaatccgattagagaaaccaccgccgggaaaatctcttcgccgtcgtcaccgactttgaatgttgcagtcgcgcatataagagctggatcttattacgaaatcgatgcttcgattcttcctcagagatcgccggaaaatcttaaatcgattagagtcgtcatggtgagcaaaatcacggcgagtgacgtgtctctccggtacccaagcatgttttcactccgatcgcatttcgattacagtaggatgaaccggaataaaccgatgaagaagaggagtggtggtggtcttcttcctgttttcgacgagagtcatgtgatggcttcggagctagctggagacttgctttacagaagaatcgcacctcatgaactttctatgaatagaaattcctggggtttctgggtttctagttcttctcgcaggaacaaatttccaagaagggaggtggtttctcaaccggcgtacaatactcgtctctgtcgcgctgcttcaccggagggaaagtgctcgtctgagctgaaatcgggagggatgatcaagtggggaaggagattgcgtgtgcagtatcagagtcggcatattgatactaggaagaataaggaaggtgaggagagttctagagtgaaggatgaagtttacaaagaagaagagatggagaaagaagaggatgatgatgatgggaatgaaataggaggcactaaacaagaggcaaaggagataactaatggaaatcgtaagagaaagctgattgaatcaagtactgagagactcgctcagaaagctaaggtttatgatcagaagaaggaaactcaaattgtggtttataagaggaaatcagagaggaagttcattgatagatggtctgttgagaggtacaaactagctgagaggaacatgttaaaagtgatgaaggagaagaatgcagtgtttggcaactccatactcaggccagagttgaggtcagaagcaaggaagctgattggtgacacaggtctattggatcatctgcttaagcacatggctggtaaggtggctcctggaggtcaagataggtttatgagaaagcacaatgcagatggggcaatggagtattggttggagagttctgatttgattcacataaggaaagaagcaggagttaaagatccttactggactcctccacctggttggaagcttggtgacaacccttctcaagatcctgtctgcgctggagaaatccgtgacatcagagaagaattagctagcctgaaaagagaattgaagaaacttgcgtcaaagaaggaagaggaggagcttgttatcatgactacgcctaattcttgtgttactagtcagaatgataatctgatgactccagcaaaggaaatctacgctgatctgctgaaaaagaaatacaaaattgaggaccagctagtgattattggagaaaccttgcgtaaaatggaggaagacatgggatggcttaagaaaacagtggacgagaactatcctaaaaagccagactcaacagagacacctttgctactagaggattcaccaccaatacagacactagaaggagaagtgaaggtggtgaacaagggtaaccaaatcacagagtcacctcaaaacagagaaaaaggaaggaagcatgatcaacaagaaagatcaccactttcactaataagcaacactggtttcagaatctgcaggcctgtggggatgttcgcatggccccaattgcctgctcttgctgctgctactgatactaatgcttcttcgccaagtcacagacaagcctacccatccccttttccagtcaagccacttgcagctaagcgtcctcttggcttgacgtttcccttcaccatcatacccgaagaagctcccaagaatctcttcaacgtttgaagttgtcactggaaactgatgcatcagatcttactttccctacaag

SEQ ID NO: 99463 - protein, 649 aa, Arabidopsis thaliana
  peptide (1)..(649): Ceres Seq. ID no. 13602973
  misc_feature (72)..(649): Homolog of NCBI NO: 16033414 NR Description: SWITCH1 splice variant S [Arabidopsis thaliana]
  misc_feature (220)..(516): Homolog of NCBI NO: 15237794 NR Description: expressed protein [Arabidopsis thaliana] gb|AAD12714.1~gene_id:MQM1.12~similar to unknown protein
EERRLSRAKIMSSTMFVKRNPIRETTAGKISSPSSPTLNVAVAHIRAGSYYEIDASILPQRSPENLKSIRVVMVSKITASDVSLRYPSMFSLRSHFDYSRMNRNKPMKKRSGGGLLPVFDESHVMASELAGDLLYRRIAPHELSMNRNSWGFWVSSSSRRNKFPRREVVSQPAYNTRLCRAASPEGKCSSELKSGGMIKWGRRLRVQYQSRHIDTRKNKEGEESSRVKDEVYKEEEMEKEEDDDDGNEIGGTKQEAKEITNGNRKRKLIESSTERLAQKAKVYDQKKETQIVVYKRKSERKFIDRWSVERYKLAERNMLKVMKEKNAVFGNSILRPELRSEARKLIGDTGLLDHLLKHMAGKVAPGGQDRFMRKHNADGAMEYWLESSDLIHIRKEAGVKDPYWTPPPGWKLGDNPSQDPVCAGEIRDIREELASLKRELKKLASKKEEEELVIMTTPNSCVTSQNDNLMTPAKEIYADLLKKKYKIEDQLVIIGETLRKMEEDMGWLKKTVDENYPKKPDSTETPLLLEDSPPIQTLEGEVKVVNKGNQITESPQNREKGRKHDQQERSPLSLISNTGFRICRPVGMFAWPQLPALAAATDTNASSPSHRQAYPSPFPVKPLAAKRPLGLTFPFTIIPEEAPKNLFNV

SEQ ID NO: 99464 - protein, 639 aa, Arabidopsis thaliana
  peptide (1)..(639): Ceres Seq. ID no. 13602974
  misc_feature (62)..(639): Homolog of NCBI NO: 16033414 NR Description: SWITCH1 splice variant S [Arabidopsis thaliana]
  misc_feature (210)..(506): Homolog of NCBI NO: 15237794 NR Description: expressed protein [Arabidopsis thaliana] gb|AAD12714.1~gene_id:MQM1.12~similar to unknown protein
MSSTMFVKRNPIRETTAGKISSPSSPTLNVAVAHIRAGSYYEIDASILPQRSPENLKSIRVVMVSKITASDVSLRYPSMFSLRSHFDYSRMNRNKPMKKRSGGGLLPVFDESHVMASELAGDLLYRRIAPHELSMNRNSWGFWVSSSSRRNKFPRREVVSQPAYNTRLCRAASPEGKCSSELKSGGMIKWGRRLRVQYQSRHIDTRKNKEGEESSRVKDEVYKEEEMEKEEDDDDGNEIGGTKQEAKEITNGNRKRKLIESSTERLAQKAKVYDQKKETQIVVYKRKSERKFIDRWSVERYKLAERNMLKVMKEKNAVFGNSILRPELRSEARKLIGDTGLLDHLLKHMAGKVAPGGQDRFMRKHNADGAMEYWLESSDLIHIRKEAGVKDPYWTPPPGWKLGDNPSQDPVCAGEIRDIREELASLKRELKKLASKKEEEELVIMTTPNSCVTSQNDNLMTPAKEIYADLLKKKYKIEDQLVIIGETLRKMEEDMGWLKKTVDENYPKKPDSTETPLLLEDSPPIQTLEGEVKVVNKGNQITESPQNREKGRKHDQQERSPLSLISNTGFRICRPVGMFAWPQLPALAAATDTNASSPSHRQAYPSPFPVKPLAAKRPLGLTFPFTIIPEEAPKNLFNV

SEQ ID NO: 99465 - protein, 635 aa, Arabidopsis thaliana
  peptide (1)..(635): Ceres Seq. ID no. 13602975
  misc_feature (58)..(635): Homolog of NCBI NO: 16033414 NR Description: SWITCH1 splice variant S [Arabidopsis thaliana]
  misc_feature (206)..(502): Homolog of NCBI NO: 15237794 NR Description: expressed protein [Arabidopsis thaliana] gb|AAD12714.1~gene_id:MQM1.12~similar to unknown protein
MFVKRNPIRETTAGKISSPSSPTLNVAVAHIRAGSYYEIDASILPQRSPENLKSIRVVMVSKITASDVSLRYPSMFSLRSHFDYSRMNRNKPMKKRSGGGLLPVFDESHVMASELAGDLLYRRIAPHELSMNRNSWGFWVSSSSRRNKFPRREVVSQPAYNTRLCRAASPEGKCSSELKSGGMIKWGRRLRVQYQSRHIDTRKNKEGEESSRVKDEVYKEEEMEKEEDDDDGNEIGGTKQEAKEITNGNRKRKLIESSTERLAQKAKVYDQKKETQIVVYKRKSERKFIDRWSVERYKLAERNMLKVMKEKNAVFGNSILRPELRSEARKLIGDTGLLDHLLKHMAGKVAPGGQDRFMRKHNADGAMEYWLESSDLIHIRKEAGVKDPYWTPPPGWKLGDNPSQDPVCAGEIRDIREELASLKRELKKLASKKEEEELVIMTTPNSCVTSQNDNLMTPAKEIYADLLKKKYKIEDQLVIIGETLRKMEEDMGWLKKTVDENYPKKPDSTETPLLLEDSPPIQTLEGEVKVVNKGNQITESPQNREKGRKHDQQERSPLSLISNTGFRICRPVGMFAWPQLPALAAATDTNASSPSHRQAYPSPFPVKPLAAKRPLGLTFPFTIIPEEAPKNLFNV

SEQ ID NO: 99466 - DNA, 868 bp, Arabidopsis thaliana
  misc_feature (1)..(868): Ceres Seq. ID no. 13602979
  misc_feature: MA Experiment ID: 108434 Result: Up-regulated in Transcription
  misc_feature: MA Experiment 108434 PARAMETER Experiment Name: At_Root_Tips_cDNA_P Parameter: Tissue Value: Root Tips
  misc_feature: MA Experiment ID: 108461 Result: Down-regulated in Transcription
  misc_feature: MA Experiment 108461 PARAMETER Experiment Name: At_Germinating_Seeds_cDNA_P Parameter: Age (day) Value: 1 vs. 0
  misc_feature: MA Experiment 108461 PARAMETER Experiment Name: At_Germinating_Seeds_cDNA_P Parameter: Tissue Value: Germinating Seeds
  misc_feature: MA Experiment ID: 108488 Result: Down-regulated in Transcription
  misc_feature: MA Experiment ID: 108576 Result: Up-regulated in Transcription
  misc_feature: MA Experiment 108576 PARAMETER Experiment Name: At_42deg_Heat_cDNA_P Parameter: Temperature (deg C) Value: 42 vs. 22
  misc_feature: MA Experiment 108576 PARAMETER Experiment Name: At_42deg_Heat_cDNA_P Parameter: Timepoint (hr) Value: 1
  misc_feature: MA Experiment 108576 PARAMETER Experiment Name: At_42deg_Heat_cDNA_P Parameter: Tissue Value: Aerial
  misc_feature: MA Experiment ID: 108577 Result: Up-regulated in Transcription
  misc_feature: MA Experiment 108577 PARAMETER Experiment Name: At_42deg_Heat_cDNA_P Parameter: Temperature (deg C) Value: 42 vs. 22
  misc_feature: MA Experiment 108577 PARAMETER Experiment Name: At_42deg_Heat_cDNA_P Parameter: Timepoint (hr) Value: 6
  misc_feature: MA Experiment 108577 PARAMETER Experiment Name: At_42deg_Heat_cDNA_P Parameter: Tissue Value: Aerial
  misc_feature: MA Experiment ID: 108585 Result: Up-regulated in Transcription
  misc_feature: MA Experiment 108585 PARAMETER Experiment Name: At_5mM_NaNP_cDNA_P Parameter: Timepoint (hr) Value: 6
  misc_feature: MA Experiment 108585 PARAMETER Experiment Name: At_5mM_NaNP_cDNA_P Parameter: Tissue Value: Aerial
  misc_feature: MA Experiment 108585 PARAMETER Experiment Name: At_5mM_NaNP_cDNA_P Parameter: Treatment Value: null
  misc_feature: MA Experiment ID: 108595 Result: Up-regulated in Transcription
  misc_feature: MA Experiment 108595 PARAMETER Experiment Name: At_Ler-pi_Ovule_cDNA_P Parameter: Plant Line Value: null
  misc_feature: MA Experiment ID: 20000069 Result: Up-regulated in Transcription
  misc_feature: MA Experiment 20000069 PARAMETER Experiment Name: At_100uM_ABA_Mutants_cDNA_P Parameter: Plant Line Value: CS23
  misc_feature: MA Experiment 20000069 PARAMETER Experiment Name: At_100uM_ABA_Mutants_cDNA_P Parameter: Timepoint (hr) Value: 6
  misc_feature: MA Experiment 20000069 PARAMETER Experiment Name: At_100uM_ABA_Mutants_cDNA_P Parameter: Tissue Value: Aerial
  misc_feature: MA Experiment 20000069 PARAMETER Experiment Name: At_100uM_ABA_Mutants_cDNA_P Parameter: Treatment Value: 100uM ABA vs. No Treatment
  misc_feature: MA Experiment ID: 20000070 Result: Up-regulated in Transcription
  misc_feature: MA Experiment 20000070 PARAMETER Experiment Name: At_100uM_ABA_Mutants_cDNA_P Parameter: Plant Line Value: CS24
  misc_feature: MA Experiment 20000070 PARAMETER Experiment Name: At_100uM_ABA_Mutants_cDNA_P Parameter: Timepoint (hr) Value: 6
  misc_feature: MA Experiment 20000070 PARAMETER Experiment Name: At_100uM_ABA_Mutants_cDNA_P Parameter: Tissue Value: Aerial
  misc_feature: MA Experiment 20000070 PARAMETER Experiment Name: At_100uM_ABA_Mutants_cDNA_P Parameter: Treatment Value: 100uM ABA vs. No Treatment
  misc_feature: MA Experiment ID: 20000071 Result: Up-regulated in Transcription
  misc_feature: MA Experiment 20000071 PARAMETER Experiment Name: At_100uM_ABA_Mutants_cDNA_P Parameter: Plant Line Value: CS8104
  misc_feature: MA Experiment 20000071 PARAMETER Experiment Name: At_100uM_ABA_Mutants_cDNA_P Parameter: Timepoint (hr) Value: 6
  misc_feature: MA Experiment 20000071 PARAMETER Experiment Name: At_100uM_ABA_Mutants_cDNA_P Parameter: Tissue Value: Aerial
  misc_feature: MA Experiment 20000071 PARAMETER Experiment Name: At_100uM_ABA_Mutants_cDNA_P Parameter: Treatment Value: 100uM ABA vs. No Treatment
  misc_feature: MA Experiment ID: 20000072 Result: Up-regulated in Transcription
  misc_feature: MA Experiment 20000072 PARAMETER Experiment Name: At_100uM_ABA_Mutants_cDNA_P Parameter: Plant Line Value: CS8105
  misc_feature: MA Experiment 20000072 PARAMETER Experiment Name: At_100uM_ABA_Mutants_cDNA_P Parameter: Timepoint (hr) Value: 6
  misc_feature: MA Experiment 20000072 PARAMETER Experiment Name: At_100uM_ABA_Mutants_cDNA_P Parameter: Tissue Value: Aerial
  misc_feature: MA Experiment 20000072 PARAMETER Experiment Name: At_100uM_ABA_Mutants_cDNA_P Parameter: Treatment Value: 100uM ABA vs. No Treatment
  misc_feature: MA Experiment ID: 20000086 Result: Up-regulated in Transcription
  misc_feature: MA Experiment 20000086 PARAMETER Experiment Name: At_100uM_ABA_Mutants_cDNA_P Parameter: Plant Line Value: CS22
  misc_feature: MA Experiment 20000086 PARAMETER Experiment Name: At_100uM_ABA_Mutants_cDNA_P Parameter: Timepoint (hr) Value: 6
  misc_feature: MA Experiment 20000086 PARAMETER Experiment Name: At_100uM_ABA_Mutants_cDNA_P Parameter: Tissue Value: Aerial
  misc_feature: MA Experiment 20000086 PARAMETER Experiment Name: At_100uM_ABA_Mutants_cDNA_P Parameter: Treatment Value: 100uM ABA vs. No Treatment
  misc_feature: MA Experiment ID: 20000087 Result: Up-regulated in Transcription
  misc_feature: MA Experiment 20000087 PARAMETER Experiment Name: At_100uM_ABA_Mutants_cDNA_P Parameter: Plant Line Value: WS
  misc_feature: MA Experiment 20000087 PARAMETER Experiment Name: At_100uM_ABA_Mutants_cDNA_P Parameter: Timepoint (hr) Value: 6
  misc_feature: MA Experiment 20000087 PARAMETER Experiment Name: At_100uM_ABA_Mutants_cDNA_P Parameter: Tissue Value: Aerial
  misc_feature: MA Experiment 20000087 PARAMETER Experiment Name: At_100uM_ABA_Mutants_cDNA_P Parameter: Treatment Value: 100uM ABA vs. No Treatment
  misc_feature: MA Experiment ID: 20000088 Result: Up-regulated in Transcription
  misc_feature: MA Experiment 20000088 PARAMETER Experiment Name: At_100uM_ABA_Mutants_cDNA_P Parameter: Plant Line Value: Landsberg
  misc_feature: MA Experiment 20000088 PARAMETER Experiment Name: At_100uM_ABA_Mutants_cDNA_P Parameter: Timepoint (hr) Value: 6
  misc_feature: MA Experiment 20000088 PARAMETER Experiment Name: At_100uM_ABA_Mutants_cDNA_P Parameter: Tissue Value: Aerial
  misc_feature: MA Experiment 20000088 PARAMETER Experiment Name: At_100uM_ABA_Mutants_cDNA_P Parameter: Treatment Value: 100uM ABA vs. No Treatment
  misc_feature: MA Experiment ID: 20000093 Result: Up-regulated in Transcription
  misc_feature: MA Experiment 20000093 PARAMETER Experiment Name: At_42deg_Heat_cDNA_P Parameter: Temperature (deg C) Value: 42 vs. 22
  misc_feature: MA Experiment 20000093 PARAMETER Experiment Name: At_42deg_Heat_cDNA_P Parameter: Timepoint (hr) Value: 0.5
  misc_feature: MA Experiment 20000093 PARAMETER Experiment Name: At_42deg_Heat_cDNA_P Parameter: Tissue Value: Aerial
  misc_feature: MA Experiment ID: 20000111 Result: Up-regulated in Transcription
  misc_feature: MA Experiment 20000111 PARAMETER Experiment Name: At_42deg_Heat_cDNA_P Parameter: Temperature (deg C) Value: 42 vs. 22
  misc_feature: MA Experiment 20000111 PARAMETER Experiment Name: At_42deg_Heat_cDNA_P Parameter: Timepoint (hr) Value: 6
  misc_feature: MA Experiment 20000111 PARAMETER Experiment Name: At_42deg_Heat_cDNA_P Parameter: Tissue Value: Aerial
  misc_feature: MA Experiment ID: 20000112 Result: Up-regulated in Transcription
  misc_feature: MA Experiment 20000112 PARAMETER Experiment Name: At_42deg_Heat_cDNA_P Parameter: Temperature (deg C) Value: 42 vs. 22
  misc_feature: MA Experiment 20000112 PARAMETER Experiment Name: At_42deg_Heat_cDNA_P Parameter: Timepoint (hr) Value: 2
  misc_feature: MA Experiment 20000112 PARAMETER Experiment Name: At_42deg_Heat_cDNA_P Parameter: Tissue Value: Aerial
  misc_feature: MA Experiment ID: 20000113 Result: Up-regulated in Transcription
  misc_feature: MA Experiment 20000113 PARAMETER Experiment Name: At_42deg_Heat_cDNA_P Parameter: Temperature (deg C) Value: 42 vs. 22
  misc_feature: MA Experiment 20000113 PARAMETER Experiment Name: At_42deg_Heat_cDNA_P Parameter: Timepoint (hr) Value: 8
  misc_feature: MA Experiment 20000113 PARAMETER Experiment Name: At_42deg_Heat_cDNA_P Parameter: Tissue Value: Aerial
  misc_feature: MA Experiment ID: 20000117 Result: Up-regulated in Transcription
  misc_feature: MA Experiment 20000117 PARAMETER Experiment Name: At_100uM_ABA_Mutants_cDNA_P Parameter: Plant Line Value: Columbia
  misc_feature: MA Experiment 20000117 PARAMETER Experiment Name: At_100uM_ABA_Mutants_cDNA_P Parameter: Timepoint (hr) Value: 6
  misc_feature: MA Experiment 20000117 PARAMETER Experiment Name: At_100uM_ABA_Mutants_cDNA_P Parameter: Tissue Value: Aerial
  misc_feature: MA Experiment 20000117 PARAMETER Experiment Name: At_100uM_ABA_Mutants_cDNA_P Parameter: Treatment Value: 100uM ABA vs. No Treatment
  misc_feature: MA Experiment ID: 20000144 Result: Up-regulated in Transcription
  misc_feature: MA Experiment 20000144 PARAMETER Experiment Name: At_42deg_Heat_cDNA_P Parameter: Temperature (deg C) Value: 42 vs. 22
  misc_feature: MA Experiment 20000144 PARAMETER Experiment Name: At_42deg_Heat_cDNA_P Parameter: Timepoint (hr) Value: 1
  misc_feature: MA Experiment 20000144 PARAMETER Experiment Name: At_42deg_Heat_cDNA_P Parameter: Tissue Value: Aerial
  misc_feature: MA Experiment ID: 20000171 Result: Up-regulated in Transcription
  misc_feature: MA Experiment 20000171 PARAMETER Experiment Name: At_42deg_Heat_P Parameter: Age (day) Value: 14
  misc_feature: MA Experiment 20000171 PARAMETER Experiment Name: At_42deg_Heat_P Parameter: Organism Value: A. thaliana
  misc_feature: MA Experiment 20000171 PARAMETER Experiment Name: At_42deg_Heat_P Parameter: Plant Line Value: WS
  misc_feature: MA Experiment 20000171 PARAMETER Experiment Name: At_42deg_Heat_P Parameter: Temperature (deg C) Value: 42 vs. 22
  misc_feature: MA Experiment 20000171 PARAMETER Experiment Name: At_42deg_Heat_P Parameter: Timepoint (hr) Value: 1
  misc_feature: MA Experiment 20000171 PARAMETER Experiment Name: At_42deg_Heat_P Parameter: Tissue Value: Aerial
  misc_feature: MA Experiment ID: 20000173 Result: Up-regulated in Transcription
  misc_feature: MA Experiment 20000173 PARAMETER Experiment Name: At_42deg_Heat_P Parameter: Age (day) Value: 14
  misc_feature: MA Experiment 20000173 PARAMETER Experiment Name: At_42deg_Heat_P Parameter: Organism Value: A. thaliana
  misc_feature: MA Experiment 20000173 PARAMETER Experiment Name: At_42deg_Heat_P Parameter: Plant Line Value: WS
  misc_feature: MA Experiment 20000173 PARAMETER Experiment Name: At_42deg_Heat_P Parameter: Temperature (deg C) Value: 42 vs. 22
  misc_feature: MA Experiment 20000173 PARAMETER Experiment Name: At_42deg_Heat_P Parameter: Timepoint (hr) Value: 6
  misc_feature: MA Experiment 20000173 PARAMETER Experiment Name: At_42deg_Heat_P Parameter: Tissue Value: Aerial
  misc_feature: MA Experiment ID: 20000443 Result: Up-regulated in Transcription
  misc_feature: MA Experiment 20000443 PARAMETER Experiment Name: At_1uM_BR-BRZ__P Parameter: Tissue Value: Shoot Apices
  misc_feature: MA Experiment 20000443 PARAMETER Experiment Name: At_1uM_BR-BRZ__P Parameter: Treatment Value: 1uM BRZ vs. No Treatment
  misc_feature: MA Experiment ID: 20000709 Result: Up-regulated in Transcription
  misc_feature: MA Experiment 20000709 PARAMETER Experiment Name: At_15mM_NH4NO3_L-to-H_P Parameter: Age (hr) Value: 14
  misc_feature: MA Experiment 20000709 PARAMETER Experiment Name: At_15mM_NH4NO3_L-to-H_P Parameter: Organism Value: A. thaliana
  misc_feature: MA Experiment 20000709 PARAMETER Experiment Name: At_15mM_NH4NO3_L-to-H_P Parameter: Plant Line Value: WS
  misc_feature: MA Experiment 20000709 PARAMETER Experiment Name: At_15mM_NH4NO3_L-to-H_P Parameter: Timepoint (hr) Value: 4
  misc_feature: MA Experiment 20000709 PARAMETER Experiment Name: At_15mM_NH4NO3_L-to-H_P Parameter: Tissue Value: Aerial
  misc_feature: MA Experiment 20000709 PARAMETER Experiment Name: At_15mM_NH4NO3_L-to-H_P Parameter: Treatment Value: 15mM NH4NO3 vs. 30mM Mannitol
  misc_feature: MA Experiment ID: 20001247 Result: Down-regulated in Transcription
  misc_feature: MA Experiment 20001247 PARAMETER Experiment Name: At_Far-red-induction_P Parameter: Age (day) Value: 7
  misc_feature: MA Experiment 20001247 PARAMETER Experiment Name: At_Far-red-induction_P Parameter: Light Value: Far-red vs. White
  misc_feature: MA Experiment 20001247 PARAMETER Experiment Name: At_Far-red-induction_P Parameter: Organism Value: A. thaliana
  misc_feature: MA Experiment 20001247 PARAMETER Experiment Name: At_Far-red-induction_P Parameter: Plant Line Value: Columbia
  misc_feature: MA Experiment 20001247 PARAMETER Experiment Name: At_Far-red-induction_P Parameter: Timepoint (hr) Value: 1
  misc_feature: MA Experiment 20001247 PARAMETER Experiment Name: At_Far-red-induction_P Parameter: Tissue Value: Whole Plant
  misc_feature: MA Experiment ID: 20001248 Result: Down-regulated in Transcription
  misc_feature: MA Experiment 20001248 PARAMETER Experiment Name: At_Far-red-induction_P Parameter: Age (day) Value: 7
  misc_feature: MA Experiment 20001248 PARAMETER Experiment Name: At_Far-red-induction_P Parameter: Light Value: Far-red vs. White
  misc_feature: MA Experiment 20001248 PARAMETER Experiment Name: At_Far-red-induction_P Parameter: Organism Value: A. thaliana
  misc_feature: MA Experiment 20001248 PARAMETER Experiment Name: At_Far-red-induction_P Parameter: Plant Line Value: Columbia
  misc_feature: MA Experiment 20001248 PARAMETER Experiment Name: At_Far-red-induction_P Parameter: Timepoint (hr) Value: 4
  misc_feature: MA Experiment 20001248 PARAMETER Experiment Name: At_Far-red-induction_P Parameter: Tissue Value: Whole Plant
  misc_feature: MA Experiment ID: 20001450 Result: Down-regulated in Transcription
  misc_feature: MA Experiment 20001450 PARAMETER Experiment Name: At_Far-red-induction_P Parameter: Age (day) Value: 7
  misc_feature: MA Experiment 20001450 PARAMETER Experiment Name: At_Far-red-induction_P Parameter: Light Value: Far-red vs. White
  misc_feature: MA Experiment 20001450 PARAMETER Experiment Name: At_Far-red-induction_P Parameter: Organism Value: A. thaliana
  misc_feature: MA Experiment 20001450 PARAMETER Experiment Name: At_Far-red-induction_P Parameter: Plant Line Value: Columbia
  misc_feature: MA Experiment 20001450 PARAMETER Experiment Name: At_Far-red-induction_P Parameter: Timepoint (hr) Value: 8
  misc_feature: MA Experiment 20001450 PARAMETER Experiment Name: At_Far-red-induction_P Parameter: Tissue Value: Whole Plant
  misc_feature: MA Experiment ID: 20001451 Result: Down-regulated in Transcription
  misc_feature: MA Experiment 20001451 PARAMETER Experiment Name: At_Far-red-induction_P Parameter: Age (day) Value: 7
  misc_feature: MA Experiment 20001451 PARAMETER Experiment Name: At_Far-red-induction_P Parameter: Light Value: Far-red vs. White
  misc_feature: MA Experiment 20001451 PARAMETER Experiment Name: At_Far-red-induction_P Parameter: Organism Value: A. thaliana
  misc_feature: MA Experiment 20001451 PARAMETER Experiment Name: At_Far-red-induction_P Parameter: Plant Line Value: Columbia
  misc_feature: MA Experiment 20001451 PARAMETER Experiment Name: At_Far-red-induction_P Parameter: Timepoint (hr) Value: 24
  misc_feature: MA Experiment 20001451 PARAMETER Experiment Name: At_Far-red-induction_P Parameter: Tissue Value: Whole Plant
  misc_feature: MA Experiment ID: 20001557 Result: Up-regulated in Transcription
  misc_feature: MA Experiment 20001557 PARAMETER Experiment Name: At_Drought_Soil_Dry_P Parameter: Age (day) Value: 27
  misc_feature: MA Experiment 20001557 PARAMETER Experiment Name: At_Drought_Soil_Dry_P Parameter: Organism Value: A. thaliana
  misc_feature: MA Experiment 20001557 PARAMETER Experiment Name: At_Drought_Soil_Dry_P Parameter: Plant Line Value: WS
  misc_feature: MA Experiment 20001557 PARAMETER Experiment Name: At_Drought_Soil_Dry_P Parameter: Post Timepoint (hr) Value: 3
  misc_feature: MA Experiment 20001557 PARAMETER Experiment Name: At_Drought_Soil_Dry_P Parameter: Post-Treatment Value: Re-Water vs. No Drought
  misc_feature: MA Experiment 20001557 PARAMETER Experiment Name: At_Drought_Soil_Dry_P Parameter: Timepoint (day) Value: 13
  misc_feature: MA Experiment 20001557 PARAMETER Experiment Name: At_Drought_Soil_Dry_P Parameter: Treatment Value: Drought vs. No Drought
  misc_feature: MA Experiment ID: 20001560 Result: Up-regulated in Transcription
  misc_feature: MA Experiment 20001560 PARAMETER Experiment Name: At_Drought_Soil_Dry_P Parameter: Age (day) Value: 28
  misc_feature: MA Experiment 20001560 PARAMETER Experiment Name: At_Drought_Soil_Dry_P Parameter: Organism Value: A. thaliana
  misc_feature: MA Experiment 20001560 PARAMETER Experiment Name: At_Drought_Soil_Dry_P Parameter: Plant Line Value: WS
  misc_feature: MA Experiment 20001560 PARAMETER Experiment Name: At_Drought_Soil_Dry_P Parameter: Post Timepoint (hr) Value: None
  misc_feature: MA Experiment 20001560 PARAMETER Experiment Name: At_Drought_Soil_Dry_P Parameter: Post-Treatment Value: None
  misc_feature: MA Experiment 20001560 PARAMETER Experiment Name: At_Drought_Soil_Dry_P Parameter: Timepoint (day) Value: 14
  misc_feature: MA Experiment 20001560 PARAMETER Experiment Name: At_Drought_Soil_Dry_P Parameter: Treatment Value: Drought vs. No Drought
  misc_feature: MA Experiment ID: 20001905 Result: Up-regulated in Transcription
  misc_feature: MA Experiment 20001905 PARAMETER Experiment Name: At_Drought_Reproduction_P Parameter: Age (day) Value: 40
  misc_feature: MA Experiment 20001905 PARAMETER Experiment Name: At_Drought_Reproduction_P Parameter: Organism Value: A. thaliana
  misc_feature: MA Experiment 20001905 PARAMETER Experiment Name: At_Drought_Reproduction_P Parameter: Plant Line Value: WS
  misc_feature: MA Experiment 20001905 PARAMETER Experiment Name: At_Drought_Reproduction_P Parameter: Timepoint (day) Value: 10
  misc_feature: MA Experiment 20001905 PARAMETER Experiment Name: At_Drought_Reproduction_P Parameter: Tissue Value: Rosettes
  misc_feature: MA Experiment 20001905 PARAMETER Experiment Name: At_Drought_Reproduction_P Parameter: Treatment Value: Drought vs. No Drought
aatcacttgctaattctaagcttcttctctttccaaaaatggcgtcatcatcggctttagctctcaggagacttctctcttcttccaccgtcgccgtccctcgcgccttaagagccgttcgtccggtggctgcttcatctcgcctcttcaataccaacgccgccagaaactatgaagacggtgtcgataggaaccatcactcaaaccgacatgtttctcgccacggcggcgatttcttctcacatatactcgatccgtttactccaacgagaagcttgagccagatgctgaatttcatggaccaggtaagcgaaatccctttggtatcagctactcgtggaatgggagcttctggagttagacgtggttggaacgtgaaagagaaagacgacgcgttgcatctaaggatagatatgccgggactaagcagagaggatgtgaaattggctttggaacagaacacattggtgattagaggagaaggggaaacagaggagggagaagatgtttctggagatggacggaggtttacgagtaggattgagttaccggagaaagtatacaagactgatgagattaaggcggaaatgaagaatggtgtgttgaaagtggtgattccaaagattaaagaggatgagcgtaacaatattcgtcacataaacgttgactagagtgttttattttggattgtttgagatggaatggaagtaagtgagtgaatttgtgaactttaaggtgtcctttggtgaatcaaggagaatgacatttcccacggtcctatgtgttcgggattttgacttttttcgttacatcaatgatctatgtacgtttgactactttcatatcataggttcggattttgtttccc

SEQ ID NO: 99467 - protein, 222 aa, Arabidopsis thaliana
  peptide (1)..(222): Ceres Seq. ID no. 13602980
  misc_feature (13)..(222): Homolog of NCBI NO: 15242086 NR Description: heat shock protein, putative [Arabidopsis
  misc_feature (13)..(222): Homolog of NCBI NO: 21554988 NR Description: mitochondrial heat shock 22 kd protein-like
  misc_feature (16)..(222): Homolog of NCBI NO: 15234969 NR Description: mitochondrion-localized small heat shock protein thaliana] >gi|3122232|sp|Q96331|HS2M_ARATH Heat shock 22 kDa mitochondrial precursor >gi|7441312|pir||T05541 heat shock heat
  misc_feature (16)..(222): Homolog of NCBI NO: 2326354 NR Description: LMW heat shock protein [Arabidopsis thaliana]
  misc_feature (48)..(222): Homolog of NCBI NO: 2326361 NR Description: hypothetical protein [Arabidopsis thaliana]
  misc_feature (16)..(222): Homolog of NCBI NO: 7159338 NR Description: LMW heat shock protein [Euphorbia esula]
  misc_feature (16)..(222): Homolog of NCBI NO: 1170368 NR Description: Heat shock 22 kDa protein, mitochondrial precursor
  misc_feature (17)..(222): Homolog of NCBI NO: 7441310 NR Description: heat shock protein MTSHP precursor, mitochondrial tomato >gi|3492854|dbj|BAA32547.1| mitochondrial small heat shock
  misc_feature (17)..(222): Homolog of NCBI NO: 123564 NR Description: Small heat shock protein, chloroplast precursor
  misc_feature (20)..(222): Homolog of NCBI NO: 7441311 NR Description: heat shock protein hsp22 precursor, mitochondrial maize >gi|3015621|gb|AAC12279.1| low molecular weight heat shock
SLANSKLLLFPKMASSSALALRRLLSSSTVAVPRALRAVRPVAASSRLFNTNAARNYEDGVDRNHHSNRHVSRHGGDFFSHILDPFTPTRSLSQMLNFMDQVSEIPLVSATRGMGASGVRRGWNVKEKDDALHLRIDMPGLSREDVKLALEQNTLVIRGEGETEEGEDVSGDGRRFTSRIELPEKVYKTDEIKAEMKNGVLKVVIPKIKEDERNNIRHINVD

SEQ ID NO: 99468 - protein, 210 aa, Arabidopsis thaliana; identical to SEQ ID NO: 37214
  peptide (1)..(210): Ceres Seq. ID no. 13602981
  misc_feature (1)..(210): Homolog of NCBI NO: 15242086 NR Description: heat shock protein, putative [Arabidopsis
  misc_feature (1)..(210): Homolog of NCBI NO: 21554988 NR Description: mitochondrial heat shock 22 kd protein-like
  misc_feature (4)..(210): Homolog of NCBI NO: 15234969 NR Description: mitochondrion-localized small heat shock protein thaliana] >gi|3122232|sp|Q96331|HS2M_ARATH Heat shock 22 kDa mitochondrial precursor >gi|7441312|pir||T05541 heat shock heat
  misc_feature (4)..(210): Homolog of NCBI NO: 2326354 NR Description: LMW heat shock protein [Arabidopsis thaliana]
  misc_feature (36)..(210): Homolog of NCBI NO: 2326361 NR Description: hypothetical protein [Arabidopsis thaliana]
  misc_feature (4)..(210): Homolog of NCBI NO: 7159338 NR Description: LMW heat shock protein [Euphorbia esula]
  misc_feature (4)..(210): Homolog of NCBI NO: 1170368 NR Description: Heat shock 22 kDa protein, mitochondrial precursor
  misc_feature (5)..(210): Homolog of NCBI NO: 7441310 NR Description: heat shock protein MTSHP precursor, mitochondrial tomato >gi|3492854|dbj|BAA32547.1| mitochondrial small heat shock
  misc_feature (5)..(210): Homolog of NCBI NO: 123564 NR Description: Small heat shock protein, chloroplast precursor
  misc_feature (8)..(210): Homolog of NCBI NO: 7441311 NR Description: heat shock protein hsp22 precursor, mitochondrial maize >gi|3015621|gb|AAC12279.1| low molecular weight heat shock

SEQ ID NO: 99469 - protein, 128 aa, Arabidopsis thaliana; identical to SEQ ID NO: 37215
  peptide (1)..(128): Ceres Seq. ID no. 13602982
  misc_feature (1)..(128): Homolog of NCBI NO: 15242086 NR Description: heat shock protein, putative [Arabidopsis
  misc_feature (1)..(128): Homolog of NCBI NO: 21554988 NR Description: mitochondrial heat shock 22 kd protein-like
  misc_feature (1)..(128): Homolog of NCBI NO: 15234969 NR Description: mitochondrion-localized small heat shock protein thaliana] >gi|3122232|sp|Q96331|HS2M_ARATH Heat shock 22 kDa mitochondrial precursor >gi|7441312|pir||T05541 heat shock heat
  misc_feature (1)..(128): Homolog of NCBI NO: 2326354 NR Description: LMW heat shock protein [Arabidopsis thaliana]
  misc_feature (1)..(128): Homolog of NCBI NO: 2326361 NR Description: hypothetical protein [Arabidopsis thaliana]
  misc_feature (1)..(128): Homolog of NCBI NO: 7159338 NR Description: LMW heat shock protein [Euphorbia esula]
  misc_feature (1)..(128): Homolog of NCBI NO: 1170368 NR Description: Heat shock 22 kDa protein, mitochondrial precursor
  misc_feature (1)..(128): Homolog of NCBI NO: 7441310 NR Description: heat shock protein MTSHP precursor, mitochondrial tomato >gi|3492854|dbj|BAA32547.1| mitochondrial small heat shock
  misc_feature (1)..(128): Homolog of NCBI NO: 123564 NR Description: Small heat shock protein, chloroplast precursor
  misc_feature (1)..(128): Homolog of NCBI NO: 7441311 NR Description: heat shock protein hsp22 precursor, mitochondrial maize >gi|3015621|gb|AAC12279.1| low molecular weight heat shock

SEQ ID NO: 99470 - DNA, 2140 bp, Arabidopsis thaliana
  misc_feature (1)..(2140): Ceres Seq. ID no. 13602999
  misc_feature: MA Experiment ID: 20000173 Result: Down-regulated in Transcription
  misc_feature: MA Experiment 20000173 PARAMETER Experiment Name: At_42deg_Heat_P Parameter: Age (day) Value: 14
  misc_feature: MA Experiment 20000173 PARAMETER Experiment Name: At_42deg_Heat_P Parameter: Organism Value: A. thaliana
  misc_feature: MA Experiment 20000173 PARAMETER Experiment Name: At_42deg_Heat_P Parameter: Plant Line Value: WS
  misc_feature: MA Experiment 20000173 PARAMETER Experiment Name: At_42deg_Heat_P Parameter: Temperature (deg C) Value: 42 vs. 22
  misc_feature: MA Experiment 20000173 PARAMETER Experiment Name: At_42deg_Heat_P Parameter: Timepoint (hr) Value: 6
  misc_feature: MA Experiment 20000173 PARAMETER Experiment Name: At_42deg_Heat_P Parameter: Tissue Value: Aerial
  misc_feature: MA Experiment ID: 20000180 Result: Up-regulated in Transcription
  misc_feature: MA Experiment 20000180 PARAMETER Experiment Name: At_Germinating_Seeds_P Parameter: Age (hr) Value: 24 vs. 0
  misc_feature: MA Experiment 20000180 PARAMETER Experiment Name: At_Germinating_Seeds_P Parameter: Tissue Value: Germinating Seeds
  misc_feature: MA Experiment ID: 20000182 Result: Down-regulated in Transcription
  misc_feature: MA Experiment 20000182 PARAMETER Experiment Name: At_2mM_SA_P Parameter: Age (day) Value: 14
  misc_feature: MA Experiment 20000182 PARAMETER Experiment Name: At_2mM_SA_P Parameter: Organism Value: A. thaliana
  misc_feature: MA Experiment 20000182 PARAMETER Experiment Name: At_2mM_SA_P Parameter: Plant Line Value: WS
  misc_feature: MA Experiment 20000182 PARAMETER Experiment Name: At_2mM_SA_P Parameter: Timepoint (hr) Value: 6
  misc_feature: MA Experiment 20000182 PARAMETER Experiment Name: At_2mM_SA_P Parameter: Tissue Value: Aerial
  misc_feature: MA Experiment 20000182 PARAMETER Experiment Name: At_2mM_SA_P Parameter: Treatment Value: 2mM SA vs. No Treatment
  misc_feature: MA Experiment ID: 20000185 Result: Down-regulated in Transcription
  misc_feature: MA Experiment 20000185 PARAMETER Experiment Name: At_Roots__P Parameter: Age (day) Value: 7 vs. 21
  misc_feature: MA Experiment 20000185 PARAMETER Experiment Name: At_Roots__P Parameter: Organism Value: A. thaliana
  misc_feature: MA Experiment 20000185 PARAMETER Experiment Name: At_Roots__P Parameter: Tissue Value: Roots vs. Whole Plant
  misc_feature: MA Experiment ID: 20000439 Result: Down-regulated in Transcription
  misc_feature: MA Experiment 20000439 PARAMETER Experiment Name: At_Roots__P Parameter: Age (day) Value: 14 vs. 21
  misc_feature: MA Experiment 20000439 PARAMETER Experiment Name: At_Roots__P Parameter: Organism Value: A. thaliana
  misc_feature: MA Experiment 20000439 PARAMETER Experiment Name: At_Roots__P Parameter: Tissue Value: Roots vs. Whole Plant
  misc_feature: MA Experiment ID: 20000794 Result: Down-regulated in Transcription
  misc_feature: MA Experiment 20000794 PARAMETER Experiment Name: At_Petals_P Parameter: Age (day) Value: 23-25 days
  misc_feature: MA Experiment 20000794 PARAMETER Experiment Name: At_Petals_P Parameter: Plant Line Value: WS
  misc_feature: MA Experiment 20000794 PARAMETER Experiment Name: At_Petals_P Parameter: Tissue Value: Petals vs. Whole plant
  misc_feature: MA Experiment ID: 20001247 Result: Down-regulated in Transcription
  misc_feature: MA Experiment 20001247 PARAMETER Experiment Name: At_Far-red-induction_P Parameter: Age (day) Value: 7
  misc_feature: MA Experiment 20001247 PARAMETER Experiment Name: At_Far-red-induction_P Parameter: Light Value: Far-red vs. White
  misc_feature: MA Experiment 20001247 PARAMETER Experiment Name: At_Far-red-induction_P Parameter: Organism Value: A. thaliana
  misc_feature: MA Experiment 20001247 PARAMETER Experiment Name: At_Far-red-induction_P Parameter: Plant Line Value: Columbia
  misc_feature: MA Experiment 20001247 PARAMETER Experiment Name: At_Far-red-induction_P Parameter: Timepoint (hr) Value: 1
  misc_feature: MA Experiment 20001247 PARAMETER Experiment Name: At_Far-red-induction_P Parameter: Tissue Value: Whole Plant
  misc_feature: MA Experiment ID: 20001451 Result: Down-regulated in Transcription
  misc_feature: MA Experiment 20001451 PARAMETER Experiment Name: At_Far-red-induction_P Parameter: Age (day) Value: 7
  misc_feature: MA Experiment 20001451 PARAMETER Experiment Name: At_Far-red-induction_P Parameter: Light Value: Far-red vs. White
  misc_feature: MA Experiment 20001451 PARAMETER Experiment Name: At_Far-red-induction_P Parameter: Organism Value: A. thaliana
  misc_feature: MA Experiment 20001451 PARAMETER Experiment Name: At_Far-red-induction_P Parameter: Plant Line Value: Columbia
  misc_feature: MA Experiment 20001451 PARAMETER Experiment Name: At_Far-red-induction_P Parameter: Timepoint (hr) Value: 24
  misc_feature: MA Experiment 20001451 PARAMETER Experiment Name: At_Far-red-induction_P Parameter: Tissue Value: Whole Plant
  misc_feature: MA Experiment ID: 20001557 Result: Down-regulated in Transcription
  misc_feature: MA Experiment 20001557 PARAMETER Experiment Name: At_Drought_Soil_Dry_P Parameter: Age (day) Value: 27
  misc_feature: MA Experiment 20001557 PARAMETER Experiment Name: At_Drought_Soil_Dry_P Parameter: Organism Value: A. thaliana
  misc_feature: MA Experiment 20001557 PARAMETER Experiment Name: At_Drought_Soil_Dry_P Parameter: Plant Line Value: WS
  misc_feature: MA Experiment 20001557 PARAMETER Experiment Name: At_Drought_Soil_Dry_P Parameter: Post Timepoint (hr) Value: 3
  misc_feature: MA Experiment 20001557 PARAMETER Experiment Name: At_Drought_Soil_Dry_P Parameter: Post-Treatment Value: Re-Water vs. No Drought
  misc_feature: MA Experiment 20001557 PARAMETER Experiment Name: At_Drought_Soil_Dry_P Parameter: Timepoint (day) Value: 13
  misc_feature: MA Experiment 20001557 PARAMETER Experiment Name: At_Drought_Soil_Dry_P Parameter: Treatment Value: Drought vs. No Drought
  misc_feature: MA Experiment ID: 20001558 Result: Down-regulated in Transcription
  misc_feature: MA Experiment 20001558 PARAMETER Experiment Name: At_Drought_Soil_Dry_P Parameter: Age (day) Value: 27
  misc_feature: MA Experiment 20001558 PARAMETER Experiment Name: At_Drought_Soil_Dry_P Parameter: Organism Value: A. thaliana
  misc_feature: MA Experiment 20001558 PARAMETER Experiment Name: At_Drought_Soil_Dry_P Parameter: Plant Line Value: WS
  misc_feature: MA Experiment 20001558 PARAMETER Experiment Name: At_Drought_Soil_Dry_P Parameter: Post Timepoint (hr) Value: 6
  misc_feature: MA Experiment 20001558 PARAMETER Experiment Name: At_Drought_Soil_Dry_P Parameter: Post-Treatment Value: Re-Water vs. No Drought
  misc_feature: MA Experiment 20001558 PARAMETER Experiment Name: At_Drought_Soil_Dry_P Parameter: Timepoint (day) Value: 13
  misc_feature: MA Experiment 20001558 PARAMETER Experiment Name: At_Drought_Soil_Dry_P Parameter: Treatment Value: Drought vs. No Drought
  misc_feature: MA Experiment ID: 20001757 Result: Up-regulated in Transcription
  misc_feature: MA Experiment 20001757 PARAMETER Experiment Name: At_50mM_NH4NO3_L-to-H_P Parameter: Timepoint (hr) Value: 6
  misc_feature: MA Experiment 20001757 PARAMETER Experiment Name: At_50mM_NH4NO3_L-to-H_P Parameter: Tissue Value: Leaf
  misc_feature: MA Experiment 20001757 PARAMETER Experiment Name: At_50mM_NH4NO3_L-to-H_P Parameter: Treatment Value: 50mM NH4NO3 vs 100mM Mannitol
  misc_feature: MA Experiment ID: 20001904 Result: Down-regulated in Transcription
  misc_feature: MA Experiment 20001904 PARAMETER Experiment Name: At_Drought_Reproduction_P Parameter: Age (day) Value: 37
  misc_feature: MA Experiment 20001904 PARAMETER Experiment Name: At_Drought_Reproduction_P Parameter: Organism Value: A. thaliana
  misc_feature: MA Experiment 20001904 PARAMETER Experiment Name: At_Drought_Reproduction_P Parameter: Plant Line Value: WS
  misc_feature: MA Experiment 20001904 PARAMETER Experiment Name: At_Drought_Reproduction_P Parameter: Timepoint (day) Value: 7
  misc_feature: MA Experiment 20001904 PARAMETER Experiment Name: At_Drought_Reproduction_P Parameter: Tissue Value: Rosettes
  misc_feature: MA Experiment 20001904 PARAMETER Experiment Name: At_Drought_Reproduction_P Parameter: Treatment Value: Drought vs. No Drought
  misc_feature: MA Experiment ID: 20001905 Result: Down-regulated in Transcription
  misc_feature: MA Experiment 20001905 PARAMETER Experiment Name: At_Drought_Reproduction_P Parameter: Age (day) Value: 40
  misc_feature: MA Experiment 20001905 PARAMETER Experiment Name: At_Drought_Reproduction_P Parameter: Organism Value: A. thaliana
  misc_feature: MA Experiment 20001905 PARAMETER Experiment Name: At_Drought_Reproduction_P Parameter: Plant Line Value: WS
  misc_feature: MA Experiment 20001905 PARAMETER Experiment Name: At_Drought_Reproduction_P Parameter: Timepoint (day) Value: 10
  misc_feature: MA Experiment 20001905 PARAMETER Experiment Name: At_Drought_Reproduction_P Parameter: Tissue Value: Rosettes
  misc_feature: MA Experiment 20001905 PARAMETER Experiment Name: At_Drought_Reproduction_P Parameter: Treatment Value: Drought vs. No Drought
tcaatatctcttccccagatcctcctctctcttcttcactcttttaacggacacttttcactgatctattcactcactcaaatcgccgccggagctaaatcaatcaacaatgacgtcgacctacacgagattcgataccgtatttctcttttctaggttcgccggcgctaagtattcgccgttattgccgtctccgtcgtttactttatctacttccggcattcatatcagaaccaaaccgaattctcgttttcactcgattatagcatcctcctcatcttcatctgtagtcgccggaactgatagcattgagattaaatcgttgccgacgaagcctattgaaggacaaaagactggaactagcggactccggaagaaggtgaaagttttcatggaagataattatttagccaactggattcaggcattgtttaattcattgccacttgaggattataagaatgcaacgttggttttaggaggtgatggtcgttactttaacaaagaagcttcacagatcattatcaaaattgctgctgggaatggagttggacaaattttagttggaaaggaaggcattttgtcaaccccagcggtttccgctgtaatcaggaaaagaaaggcaaatggaggattcattatgagtgcaagccataatcctggtggacctgaatatgactggggtatcaagttcaattacagcagtggtcagcctgctcctgaaaccattactgacaaaatatatggaaatacactttcaatctctgagattaaggtggcagagattcctgatattgatctttctcaagttggagtgaccaaatatgggaatttcagtgtagaagttatagatcctgtttccgactatttggagctcatggaggatgttttcgactttgatctcatcagaggtcttctttcaagatcagattttgggttcatgtttgatgccatgcatgctgttactggtgcttatgcgaaaccaatttttgtcgacaatcttggagccaaaccggattcaatttccaacggagttcccctggaagattttgggcatggccatcctgatcctaatttgacatatgcaaaggatttggttgatgtcatgtatcgtgacaatggaccggatttcggagcagcaagtgatggtgatggtgacagaaatatggttttaggaaacaaattctttgtcactccttcagactctgtagctatcatcgcagccaatgcacaagaagcaattccatatttccgtgctggtcctaaggggctggcacgttctatgccgacaagtggtgctcttgatcgtgttgccgagaagttgaagcttcctttcttcgaggttcccactggatggaaattttttggaaatcttatggatgctggaaaattgtcaatctgtggagaagagagctttggcacaggttctgatcacatccgtgagaaggatggaatatgggctgtgttggcgtggctttcgatccttgctcatcgcaacaaggacacgaaaccaggggacaagttggtgtctgttgcagatgttgtgaaagagtattgggcgacatacggaaggaactttttttcaagatacgactatgaagaatgtgaatctgaaggagccaataaaatgatcgagtatcttagagaaatcttgtctaagagcaaggccggtgacgtttatggaaactatgtcctccagtttgcagatgacttctcatacacagaccctgttgatggaagtgttgcatccaagcaaggtgttcggtttgtgttcacggatggatccagaatcatatttcgtttatccggaactggctcagctggagctacagtgcgaatatacattgaacaatttgagccagacgtttcaaaacatgatgtggatgcacaaatagctcttaaacctttaatcgatcttgcattgtctgtatcaaagctgaaggacttcacagggagggagaagcccactgtcattacatgaagagaagtgtcacatggtcctttcgataaggcaatttgggttcctgacttcagttttgtctgccatgtttatttgaaaattccagagcaatgaaatgcttatccttgtaacatatataacttatatacgtctttctatataaataaaagcatttctttt

SEQ ID NO: 99471 - protein, 623 aa, Arabidopsis thaliana
  peptide (1)..(623): Ceres Seq. ID no. 13603000
  misc_feature (362)..(486): Pfam Name: Phosphoglucomutase/phosphomannomutase, Pfam Description: Phosphoglucomutase/phosphomannomutase,
  misc_feature (1)..(623): Homolog of NCBI NO: 12585325 NR Description: Phosphoglucomutase, chloroplast precursor phosphomutase) (PGM) >gi|6272125|emb|CAB60109.1| plastidial
  misc_feature (29)..(623): Homolog of NCBI NO: 12585295 NR Description: Phosphoglucomutase, chloroplast precursor phosphomutase) (PGM) >gi|6272283|emb|CAB60128.1| plastidial
  misc_feature (50)..(623): Homolog of NCBI NO: 12585317 NR Description: Phosphoglucomutase, chloroplast precursor phosphomutase) (PGM) >gi|8250622|emb|CAB93680.1| plastidic
  misc_feature (47)..(623): Homolog of NCBI NO: 22725961 NR Description: putative plastidic phosphoglucomutase [Oryza
  misc_feature (74)..(623): Homolog of NCBI NO: 12585326 NR Description: Phosphoglucomutase, cytoplasmic (Glucose (PGM) >gi|6166505|gb|AAF04862.1|AF197925_1 putative cytosolic
  misc_feature (68)..(623): Homolog of NCBI NO: 12643355 NR Description: Probable phosphoglucomutase, cytoplasmic 1 phosphomutase 1) (PGM 1) >gi|25292702|pir||B86366
  misc_feature (74)..(623): Homolog of NCBI NO: 18076790 NR Description: phosphoglucomutase [Triticum aestivum]
  misc_feature (44)..(623): Homolog of NCBI NO: 33876434 NR Description: PGM1 protein [Homo sapiens]
  misc_feature (53)..(623): Homolog of NCBI NO: 33416468 NR Description: Unknown (protein for IMAGE:6403536) [Mus musculus]
  misc_feature (67)..(623): Homolog of NCBI NO: 12847638 NR Description: unnamed protein product [Mus musculus]
MTSTYTRFDTVFLFSRFAGAKYSPLLPSPSFTLSTSGIHIRTKPNSRFHSIIASSSSSSVVAGTDSIEIKSLPTKPIEGQKTGTSGLRKKVKVFMEDNYLANWIQALFNSLPLEDYKNATLVLGGDGRYFNKEASQIIIKIAAGNGVGQILVGKEGILSTPAVSAVIRKRKANGGFIMSASHNPGGPEYDWGIKFNYSSGQPAPETITDKIYGNTLSISEIKVAEIPDIDLSQVGVTKYGNFSVEVIDPVSDYLELMEDVFDFDLIRGLLSRSDFGFMFDAMHAVTGAYAKPIFVDNLGAKPDSISNGVPLEDFGHGHPDPNLTYAKDLVDVMYRDNGPDFGAASDGDGDRNMVLGNKFFVTPSDSVAIIAANAQEAIPYFRAGPKGLARSMPTSGALDRVAEKLKLPFFEVPTGWKFFGNLMDAGKLSICGEESFGTGSDHIREKDGIWAVLAWLSILAHRNKDTKPGDKLVSVADVVKEYWATYGRNFFSRYDYEECESEGANKMIEYLREILSKSKAGDVYGNYVLQFADDFSYTDPVDGSVASKQGVRFVFTDGSRIIFRLSGTGSAGATVRIYIEQFEPDVSKHDVDAQIALKPLIDLALSVSKLKDFTGREKPTVIT

SEQ ID NO: 99472 - protein, 529 aa, Arabidopsis thaliana
  peptide (1)..(529): Ceres Seq. ID no. 13603001
  misc_feature (268)..(392): Pfam Name: Phosphoglucomutase/phosphomannomutase, Pfam Description: Phosphoglucomutase/phosphomannomutase,
  misc_feature (1)..(529): Homolog of NCBI NO: 12585325 NR Description: Phosphoglucomutase, chloroplast precursor phosphomutase) (PGM) >gi|6272125|emb|CAB60109.1| plastidial
  misc_feature (1)..(529): Homolog of NCBI NO: 12585295 NR Description: Phosphoglucomutase, chloroplast precursor phosphomutase) (PGM) >gi|6272283|emb|CAB60128.1| plastidial
  misc_feature (1)..(529): Homolog of NCBI NO: 12585317 NR Description: Phosphoglucomutase, chloroplast precursor phosphomutase) (PGM) >gi|8250622|emb|CAB93680.1| plastidic
  misc_feature (1)..(529): Homolog of NCBI NO: 22725961 NR Description: putative plastidic phosphoglucomutase [Oryza
  misc_feature (1)..(529): Homolog of NCBI NO: 12585326 NR Description: Phosphoglucomutase, cytoplasmic (Glucose (PGM) >gi|6166505|gb|AAF04862.1|AF197925_1 putative cytosolic
  misc_feature (1)..(529): Homolog of NCBI NO: 12643355 NR Description: Probable phosphoglucomutase, cytoplasmic 1 phosphomutase 1) (PGM 1) >gi|25292702|pir||B86366
  misc_feature (1)..(529): Homolog of NCBI NO: 18076790 NR Description: phosphoglucomutase [Triticum aestivum]
  misc_feature (1)..(529): Homolog of NCBI NO: 33876434 NR Description: PGM1 protein [Homo sapiens]
  misc_feature (1)..(529): Homolog of NCBI NO: 33416468 NR Description: Unknown (protein for IMAGE:6403536) [Mus musculus]
  misc_feature (1)..(529): Homolog of NCBI NO: 12847638 NR Description: unnamed protein product [Mus musculus]
MEDNYLANWIQALFNSLPLEDYKNATLVLGGDGRYFNKEASQIIIKIAAGNGVGQILVGKEGILSTPAVSAVIRKRKANGGFIMSASHNPGGPEYDWGIKFNYSSGQPAPETITDKIYGNTLSISEIKVAEIPDIDLSQVGVTKYGNFSVEVIDPVSDYLELMEDVFDFDLIRGLLSRSDFGFMFDAMHAVTGAYAKPIFVDNLGAKPDSISNGVPLEDFGHGHPDPNLTYAKDLVDVMYRDNGPDFGAASDGDGDRNMVLGNKFFVTPSDSVAIIAANAQEAIPYFRAGPKGLARSMPTSGALDRVAEKLKLPFFEVPTGWKFFGNLMDAGKLSICGEESFGTGSDHIREKDGIWAVLAWLSILAHRNKDTKPGDKLVSVADVVKEYWATYGRNFFSRYDYEECESEGANKMIEYLREILSKSKAGDVYGNYVLQFADDFSYTDPVDGSVASKQGVRFVFTDGSRIIFRLSGTGSAGATVRIYIEQFEPDVSKHDVDAQIALKPLIDLALSVSKLKDFTGREKPTVIT

SEQ ID NO: 99473 - protein, 446 aa, Arabidopsis thaliana
  peptide (1)..(446): Ceres Seq. ID no. 13603002
  misc_feature (185)..(309): Pfam Name: Phosphoglucomutase/phosphomannomutase, Pfam Description: Phosphoglucomutase/phosphomannomutase,
  misc_feature (1)..(446): Homolog of NCBI NO: 12585325 NR Description: Phosphoglucomutase, chloroplast precursor phosphomutase) (PGM) >gi|6272125|emb|CAB60109.1| plastidial
  misc_feature (1)..(446): Homolog of NCBI NO: 12585295 NR Description: Phosphoglucomutase, chloroplast precursor phosphomutase) (PGM) >gi|6272283|emb|CAB60128.1| plastidial
  misc_feature (1)..(446): Homolog of NCBI NO: 12585317 NR Description: Phosphoglucomutase, chloroplast precursor phosphomutase) (PGM) >gi|8250622|emb|CAB93680.1| plastidic
  misc_feature (1)..(446): Homolog of NCBI NO: 22725961 NR Description: putative plastidic phosphoglucomutase [Oryza
  misc_feature (1)..(446): Homolog of NCBI NO: 12585326 NR Description: Phosphoglucomutase, cytoplasmic (Glucose (PGM) >gi|6166505|gb|AAF04862.1|AF197925_1 putative cytosolic
  misc_feature (1)..(446): Homolog of NCBI NO: 12643355 NR Description: Probable phosphoglucomutase, cytoplasmic 1 phosphomutase 1) (PGM 1) >gi|25292702|pir||B86366
  misc_feature (1)..(446): Homolog of NCBI NO: 18076790 NR Description: phosphoglucomutase [Triticum aestivum]
  misc_feature (1)..(446): Homolog of NCBI NO: 33876434 NR Description: PGM1 protein [Homo sapiens]
  misc_feature (1)..(446): Homolog of NCBI NO: 33416468 NR Description: Unknown (protein for IMAGE:6403536) [Mus musculus]
  misc_feature (1)..(446): Homolog of NCBI NO: 12847638 NR Description: unnamed protein product [Mus musculus]
MSASHNPGGPEYDWGIKFNYSSGQPAPETITDKIYGNTLSISEIKVAEIPDIDLSQVGVTKYGNFSVEVIDPVSDYLELMEDVFDFDLIRGLLSRSDFGFMFDAMHAVTGAYAKPIFVDNLGAKPDSISNGVPLEDFGHGHPDPNLTYAKDLVDVMYRDNGPDFGAASDGDGDRNMVLGNKFFVTPSDSVAIIAANAQEAIPYFRAGPKGLARSMPTSGALDRVAEKLKLPFFEVPTGWKFFGNLMDAGKLSICGEESFGTGSDHIREKDGIWAVLAWLSILAHRNKDTKPGDKLVSVADVVKEYWATYGRNFFSRYDYEECESEGANKMIEYLREILSKSKAGDVYGNYVLQFADDFSYTDPVDGSVASKQGVRFVFTDGSRIIFRLSGTGSAGATVRIYIEQFEPDVSKHDVDAQIALKPLIDLALSVSKLKDFTGREKPTVIT

SEQ ID NO: 99474 - DNA, 973 bp, Arabidopsis thaliana
  misc_feature (1)..(973): Ceres Seq. ID no. 13603003
  misc_feature: MA Experiment ID: 20000441 Result: Down-regulated in Transcription
  misc_feature: MA Experiment 20000441 PARAMETER Experiment Name: At_1uM_BR-BRZ__P Parameter: Tissue Value: Shoot Apices
  misc_feature: MA Experiment 20000441 PARAMETER Experiment Name: At_1uM_BR-BRZ__P Parameter: Treatment Value: 1uM BR vs. No Treatment
  misc_feature: MA Experiment ID: 20000443 Result: Down-regulated in Transcription
  misc_feature: MA Experiment 20000443 PARAMETER Experiment Name: At_1uM_BR-BRZ__P Parameter: Tissue Value: Shoot Apices
  misc_feature: MA Experiment 20000443 PARAMETER Experiment Name: At_1uM_BR-BRZ__P Parameter: Treatment Value: 1uM BRZ vs. No Treatment
aatttccatcaaattatttttcttttccttcttatgtaaattattccttatctatccaaattcgtcttcttgagtgaatttttaaagcgaatctcgacaaaactagctctcaaaaggggttttgggagttaccttttgtttctcagattttcccacattttcttggaagtaactgaaatggtgagaggaaagatcgaaatcaagaagattgagaacgtgacaagtagacaagtcacgttttcgaagcgaaggagtggtctctttaagaaggctcatgagctttctgttctatgtgatgctcaagtggcagctatgatcttctctcagaaaggaagattatatgaattcgctagctccgatatcaggaacacgataaagcgatacgctgagtacaagagagagtattttgttgcagaaactcatcctatagagcaatacgtgcaggggctaaagaaggaaatggtgacaatggtgaaaaagattgaagtgcttgaagtccataaccggaagatgatgggacaaagtttggattcttgttcggtaaaagaactttcagagatagccacacagatagagaaaagccttcatatggttagattaagaaaggctaagttatatgaagatgagctacagaaactaaaagccaaggagagggaactcaaggacgagagagtcaggctttctctaaaggttggagaaagaccaatggggatgccgtcgggaagcaaagagaaagaggatgttgaaactgatctatttattggatttctgaagaaccgaccataaaatcgtccttggtcattaaacgtcatttctagctatctatctcaattaatgttatgtatatgagtaatagtgtttcaaaatttcaatcacttgtcttttcgtataaactcagaataatgtaatgtgtaagagttctaactatgcttttgtttgtggatgtaatgtaatgtaaactcttaagtttctg

SEQ ID NO: 99475 - protein, 202 aa, Arabidopsis thaliana
  peptide (1)..(202): Ceres Seq. ID no. 13603004
  misc_feature (85)..(171): Pfam Name: K-box region Pfam Description: K-box region
  misc_feature (1)..(202): Homolog of NCBI NO: 15242208 NR Description: MADS-box protein [Arabidopsis thaliana]
  misc_feature (1)..(196): Homolog of NCBI NO: 8809681 NR Description: MADS box transcription factor-like [Arabidopsis
  misc_feature (1)..(201): Homolog of NCBI NO: 18424559 NR Description: MADS-box protein [Arabidopsis thaliana]
  misc_feature (1)..(196): Homolog of NCBI NO: 13384058 NR Description: MADS-box transcription factor FBP22 [Petunia x
  misc_feature (1)..(145): Homolog of NCBI NO: 30696115 NR Description: MADS-box protein [Arabidopsis thaliana]
  misc_feature (1)..(196): Homolog of NCBI NO: 30575600 NR Description: SOC1-like floral activator MADS4 [Eucalyptus
  misc_feature (1)..(196): Homolog of NCBI NO: 30983946 NR Description: SOC1-like floral activator [Eucalyptus
  misc_feature (1)..(196): Homolog of NCBI NO: 30575598 NR Description: SOC1-like floral activator MADS3 [Eucalyptus
  misc_feature (1)..(196): Homolog of NCBI NO: 30171307 NR Description: MADS-box protein [Brassica rapa subsp. pekinensis]
  misc_feature (1)..(196): Homolog of NCBI NO: 31295609 NR Description: MADS-box protein PTM5 [Populus tremuloides]
MVRGKIEIKKIENVTSRQVTFSKRRSGLFKKAHELSVLCDAQVAAMIFSQKGRLYEFASSDIRNTIKRYAEYKREYFVAETHPIEQYVQGLKKEMVTMVKKIEVLEVHNRKMMGQSLDSCSVKELSEIATQIEKSLHMVRLRKAKLYEDELQKLKAKERELKDERVRLSLKVGERPMGMPSGSKEKEDVETDLFIGFLKNRP

SEQ ID NO: 99476 - protein, 157 aa, Arabidopsis thaliana
  peptide (1)..(157): Ceres Seq. ID no. 13603005
  misc_feature (40)..(126): Pfam Name: K-box region Pfam Description: K-box region
  misc_feature (1)..(157): Homolog of NCBI NO: 15242208 NR Description: MADS-box protein [Arabidopsis thaliana]
  misc_feature (1)..(151): Homolog of NCBI NO: 8809681 NR Description: MADS box transcription factor-like [Arabidopsis
  misc_feature (1)..(156): Homolog of NCBI NO: 18424559 NR Description: MADS-box protein [Arabidopsis thaliana]
  misc_feature (1)..(151): Homolog of NCBI NO: 13384058 NR Description: MADS-box transcription factor FBP22 [Petunia x
  misc_feature (1)..(100): Homolog of NCBI NO: 30696115 NR Description: MADS-box protein [Arabidopsis thaliana]
  misc_feature (1)..(151): Homolog of NCBI NO: 30575600 NR Description: SOC1-like floral activator MADS4 [Eucalyptus
  misc_feature (1)..(151): Homolog of NCBI NO: 30983946 NR Description: SOC1-like floral activator [Eucalyptus
  misc_feature (1)..(151): Homolog of NCBI NO: 30575598 NR Description: SOC1-like floral activator MADS3 [Eucalyptus
  misc_feature (1)..(151): Homolog of NCBI NO: 30171307 NR Description: MADS-box protein [Brassica rapa subsp. pekinensis]
  misc_feature (1)..(151): Homolog of NCBI NO: 31295609 NR Description: MADS-box protein PTM5 [Populus tremuloides]
MIFSQKGRLYEFASSDIRNTIKRYAEYKREYFVAETHPIEQYVQGLKKEMVTMVKKIEVLEVHNRKMMGQSLDSCSVKELSEIATQIEKSLHMVRLRKAKLYEDELQKLKAKERELKDERVRLSLKVGERPMGMPSGSKEKEDVETDLFIGFLKNRP

SEQ ID NO: 99477 - protein, 108 aa, Arabidopsis thaliana
  peptide (1)..(108): Ceres Seq. ID no. 13603006
  misc_feature (1)..(77): Pfam Name: K-box region Pfam Description: K-box region
  misc_feature (1)..(108): Homolog of NCBI NO: 15242208 NR Description: MADS-box protein [Arabidopsis thaliana]
  misc_feature (1)..(102): Homolog of NCBI NO: 8809681 NR Description: MADS box transcription factor-like [Arabidopsis
  misc_feature (1)..(107): Homolog of NCBI NO: 18424559 NR Description: MADS-box protein [Arabidopsis thaliana]
  misc_feature (1)..(102): Homolog of NCBI NO: 13384058 NR Description: MADS-box transcription factor FBP22 [Petunia x
  misc_feature (1)..(51): Homolog of NCBI NO: 30696115 NR Description: MADS-box protein [Arabidopsis thaliana]
  misc_feature (1)..(102): Homolog of NCBI NO: 30575600 NR Description: SOC1-like floral activator MADS4 [Eucalyptus
  misc_feature (1)..(102): Homolog of NCBI NO: 30983946 NR Description: SOC1-like floral activator [Eucalyptus
  misc_feature (1)..(102): Homolog of NCBI NO: 30575598 NR Description: SOC1-like floral activator MADS3 [Eucalyptus
  misc_feature (1)..(102): Homolog of NCBI NO: 30171307 NR Description: MADS-box protein [Brassica rapa subsp. pekinensis]
  misc_feature (1)..(102): Homolog of NCBI NO: 31295609 NR Description: MADS-box protein PTM5 [Populus tremuloides]
MVTMVKKIEVLEVHNRKMMGQSLDSCSVKELSEIATQIEKSLHMVRLRKAKLYEDELQKLKAKERELKDERVRLSLKVGERPMGMPSGSKEKEDVETDLFIGFLKNRP

SEQ ID NO: 99478 - DNA, 1156 bp, Arabidopsis thaliana
  misc_feature (1)..(1156): Ceres Seq. ID no. 13603007
  misc_feature: MA Experiment ID: 108434 Result: Up-regulated in Transcription
  misc_feature: MA Experiment 108434 PARAMETER Experiment Name: At_Root_Tips_cDNA_P Parameter: Tissue Value: Root Tips
  misc_feature: MA Experiment ID: 108435 Result: Up-regulated in Transcription
  misc_feature: MA Experiment 108435 PARAMETER Experiment Name: At_stm_Mutants_cDNA_P Parameter: Plant Line Value: wt Landsburg vs stm
  misc_feature: MA Experiment 108435 PARAMETER Experiment Name: At_stm_Mutants_cDNA_P Parameter: Tissue Value: Shoot Apical Meristem Region
  misc_feature: MA Experiment ID: 108462 Result: Down-regulated in Transcription
  misc_feature: MA Experiment 108462 PARAMETER Experiment Name: At_Germinating_Seeds_cDNA_P Parameter: Age (day) Value: 2 vs. 0
  misc_feature: MA Experiment 108462 PARAMETER Experiment Name: At_Germinating_Seeds_cDNA_P Parameter: Tissue Value: Germinating Seeds
  misc_feature: MA Experiment ID: 108463 Result: Down-regulated in Transcription
  misc_feature: MA Experiment 108463 PARAMETER Experiment Name: At_Germinating_Seeds_cDNA_P Parameter: Age (day) Value: 3 vs. 0
  misc_feature: MA Experiment 108463 PARAMETER Experiment Name: At_Germinating_Seeds_cDNA_P Parameter: Tissue Value: Germinating Seeds
  misc_feature: MA Experiment ID: 108464 Result: Down-regulated in Transcription
  misc_feature: MA Experiment 108464 PARAMETER Experiment Name: At_Germinating_Seeds_cDNA_P Parameter: Age (day) Value: 4 vs. 0
  misc_feature: MA Experiment 108464 PARAMETER Experiment Name: At_Germinating_Seeds_cDNA_P Parameter: Tissue Value: Germinating Seeds
  misc_feature: MA Experiment ID: 108594 Result: Up-regulated in Transcription
  misc_feature: MA Experiment 108594 PARAMETER Experiment Name: At_Ler-rhl_Root_cDNA_P Parameter: Plant Line Value: null
  misc_feature: MA Experiment ID: 20000069 Result: Down-regulated in Transcription
  misc_feature: MA Experiment 20000069 PARAMETER Experiment Name: At_100uM_ABA_Mutants_cDNA_P Parameter: Plant Line Value: CS23
  misc_feature: MA Experiment 20000069 PARAMETER Experiment Name: At_100uM_ABA_Mutants_cDNA_P Parameter: Timepoint (hr) Value: 6
  misc_feature: MA Experiment 20000069 PARAMETER Experiment Name: At_100uM_ABA_Mutants_cDNA_P Parameter: Tissue Value: Aerial
  misc_feature: MA Experiment 20000069 PARAMETER Experiment Name: At_100uM_ABA_Mutants_cDNA_P Parameter: Treatment Value: 100uM ABA vs. No Treatment
  misc_feature: MA Experiment ID: 20000180 Result: Down-regulated in Transcription
  misc_feature: MA Experiment 20000180 PARAMETER Experiment Name: At_Germinating_Seeds_P Parameter: Age (hr) Value: 24 vs. 0
  misc_feature: MA Experiment 20000180 PARAMETER Experiment Name: At_Germinating_Seeds_P Parameter: Tissue Value: Germinating Seeds
  misc_feature: MA Experiment ID: 20000184 Result: Up-regulated in Transcription
  misc_feature: MA Experiment 20000184 PARAMETER Experiment Name: At_Shoots__P Parameter: Age (day) Value: 7
  misc_feature: MA Experiment 20000184 PARAMETER Experiment Name: At_Shoots__P Parameter: Tissue Value: Shoots vs. Whole Plant
atttttcgtcaaaagaatcagtaaaaactaaacattttgactatatcctacttgaatcaattcttcggctgattttgaagttttgtgacattcagatattctagggttttgtggtaaatggaatcgaatcacgaaggcaacgcgatacaagtgattgaccaagtaacaaccatgacccatctgtctgacccgaatccgaaaaccaaaccgggtatgatgctcatgaaacaagaagacgggtatttgcagccggtgaagactaaaccggctccgaagagaccgacttctaaagaccgtcacacgaaagtagaaggacgaggtcggaggatccgaatgccggcgggttgcgctgctcgggtctttcaattgacccgtgaacttggtcacaaatccgacggagaaacgatacggtggttattggaacgagctgaaccggcgataattgaagcaaccggaaccggaactgtaccggctattgctgtatcggttaacggaactttaaaaatcccgacgagctctccagtgttgaatgacggcggccgtgacggtgacggtgacctaataaagaaacggaggaagagaaactgtacgagcgatttcgtagacgttaatgacagctgtcatagctccgttacttctgggttagctccgataacggcgtcaaactacggcgttaatatcctgaacgttaatacacaggggtttgtgccgttttggcctatgggtatgggtactgcgtttgttactggtgggccggatcaaatgggccaaatgtgggctattcctaccgttgctacagctccgtttctgaatgttggtgctagaccggtgtctagttatgtctcaaacgcttcagacgctgaggcggagatggaaacgagcggtggcggaacgacgcaaccgctgagggatttttcgttggagatttatgataagagagagcttcagtttttgggtggctcagggaactcatctccgtcttcatgtcatgagacttaaggaattttaactcttagttctagtttctttttagtttttagtaagtttgattcctgatttaggttaagtaagatttgtaaaagaattgggagcacaatttcaattttatgtttctgtcaaacattttggtaattaatggaactatcctatcattttt

SEQ ID NO: 99479 - protein, 293 aa, Arabidopsis thaliana
  peptide (1)..(293): Ceres Seq. ID no. 13603008
  misc_feature (46)..(252): Pfam Name: TCP family transcription factor Pfam Description: TCP family transcription factor
  misc_feature (1)..(293): Homolog of NCBI NO: 15242216 NR Description: TCP family transcription factor, putative thaliana] >gi|30696122|ref|NP_851173.1| TCP family transcription putative [Arabidopsis thaliana] >gi|8809685|dbj|BAA97226.1|
  misc_feature (34)..(293): Homolog of NCBI NO: 21592496 NR Description: unknown [Arabidopsis thaliana]
  misc_feature (27)..(235): Homolog of NCBI NO: 15225538 NR Description: TCP family transcription factor, putative
  misc_feature (49)..(238): Homolog of NCBI NO: 7489534 NR Description: probable DNA binding protein PCF2 - rice
  misc_feature (11)..(134): Homolog of NCBI NO: 11357581 NR Description: hypothetical protein F1P2.170 - Arabidopsis >gi|6522545|emb|CAB61988.1| putative protein [Arabidopsis
  misc_feature (11)..(134): Homolog of NCBI NO: 22331641 NR Description: TCP family transcription factor, putative thaliana] >gi|16604511|gb|AAL24261.1| AT3g47620/F1P2_170 thaliana] >gi|21655289|gb|AAM65356.1| AT3g47620/F1P2_170
  misc_feature (49)..(134): Homolog of NCBI NO: 18409345 NR Description: TCP family transcription factor, putative
  misc_feature (43)..(134): Homolog of NCBI NO: 5731257 NR Description: auxin-induced basic helix-loop-helix
  misc_feature (49)..(148): Homolog of NCBI NO: 15218305 NR Description: TCP family transcription factor, putative
  misc_feature (52)..(123): Homolog of NCBI NO: 15232059 NR Description: TCP family transcription factor, putative thaliana] >gi|9279624|dbj|BAB01082.1| gene_id:MOJ10.8~unknown [Arabidopsis thaliana] >gi|11595501|emb|CAC18326.1| putative
MESNHEGNAIQVIDQVTTMTHLSDPNPKTKPGMMLMKQEDGYLQPVKTKPAPKRPTSKDRHTKVEGRGRRIRMPAGCAARVFQLTRELGHKSDGETIRWLLERAEPAIIEATGTGTVPAIAVSVNGTLKIPTSSPVLNDGGRDGDGDLIKKRRKRNCTSDFVDVNDSCHSSVTSGLAPITASNYGVNILNVNTQGFVPFWPMGMGTAFVTGGPDQMGQMWAIPTVATAPFLNVGARPVSSYVSNASDAEAEMETSGGGTTQPLRDFSLEIYDKRELQFLGGSGNSSPSSCHET

SEQ ID NO: 99480 - protein, 275 aa, Arabidopsis thaliana
  peptide (1)..(275): Ceres Seq. ID no. 13603009
  misc_feature (28)..(234): Pfam Name: TCP family transcription factor Pfam Description: TCP family transcription factor
  misc_feature (1)..(275): Homolog of NCBI NO: 15242216 NR Description: TCP family transcription factor, putative thaliana] >gi|30696122|ref|NP_851173.1| TCP family transcription putative [Arabidopsis thaliana] >gi|8809685|dbj|BAA97226.1|
  misc_feature (16)..(275): Homolog of NCBI NO: 21592496 NR Description: unknown [Arabidopsis thaliana]
  misc_feature (9)..(217): Homolog of NCBI NO: 15225538 NR Description: TCP family transcription factor, putative
  misc_feature (31)..(220): Homolog of NCBI NO: 7489534 NR Description: probable DNA binding protein PCF2 - rice
  misc_feature (1)..(116): Homolog of NCBI NO: 11357581 NR Description: hypothetical protein F1P2.170 - Arabidopsis >gi|6522545|emb|CAB61988.1| putative protein [Arabidopsis
  misc_feature (1)..(116): Homolog of NCBI NO: 22331641 NR Description: TCP family transcription factor, putative thaliana] >gi|16604511|gb|AAL24261.1| AT3g47620/F1P2_170 thaliana] >gi|21655289|gb|AAM65356.1| AT3g47620/F1P2_170
  misc_feature (31)..(116): Homolog of NCBI NO: 18409345 NR Description: TCP family transcription factor, putative
  misc_feature (25)..(116): Homolog of NCBI NO: 5731257 NR Description: auxin-induced basic helix-loop-helix
  misc_feature (31)..(130): Homolog of NCBI NO: 15218305 NR Description: TCP family transcription factor, putative
  misc_feature (34)..(105): Homolog of NCBI NO: 15232059 NR Description: TCP family transcription factor, putative thaliana] >gi|9279624|dbj|BAB01082.1| gene_id:MOJ10.8~unknown [Arabidopsis thaliana] >gi|11595501|emb|CAC18326.1| putative
MTHLSDPNPKTKPGMMLMKQEDGYLQPVKTKPAPKRPTSKDRHTKVEGRGRRIRMPAGCAARVFQLTRELGHKSDGETIRWLLERAEPAIIEATGTGTVPAIAVSVNGTLKIPTSSPVLNDGGRDGDGDLIKKRRKRNCTSDFVDVNDSCHSSVTSGLAPITASNYGVNILNVNTQGFVPFWPMGMGTAFVTGGPDQMGQMWAIPTVATAPFLNVGARPVSSYVSNASDAEAEMETSGGGTTQPLRDFSLEIYDKRELQFLGGSGNSSPSSCHET

SEQ ID NO: 99481 - protein, 261 aa, Arabidopsis thaliana
  peptide (1)..(261): Ceres Seq. ID no. 13603010
  misc_feature (14)..(220): Pfam Name: TCP family transcription factor Pfam Description: TCP family transcription factor
  misc_feature (1)..(261): Homolog of NCBI NO: 15242216 NR Description: TCP family transcription factor, putative thaliana] >gi|30696122|ref|NP_851173.1| TCP family transcription putative [Arabidopsis thaliana] >gi|8809685|dbj|BAA97226.1|
  misc_feature (2)..(261): Homolog of NCBI NO: 21592496 NR Description: unknown [Arabidopsis thaliana]
  misc_feature (1)..(203): Homolog of NCBI NO: 15225538 NR Description: TCP family transcription factor, putative
  misc_feature (17)..(206): Homolog of NCBI NO: 7489534 NR Description: probable DNA binding protein PCF2 - rice
  misc_feature (1)..(102): Homolog of NCBI NO: 11357581 NR Description: hypothetical protein F1P2.170 - Arabidopsis >gi|6522545|emb|CAB61988.1| putative protein [Arabidopsis
  misc_feature (1)..(102): Homolog of NCBI NO: 22331641 NR Description: TCP family transcription factor, putative thaliana] >gi|16604511|gb|AAL24261.1| AT3g47620/F1P2_170 thaliana] >gi|21655289|gb|AAM65356.1| AT3g47620/F1P2_170
  misc_feature (17)..(102): Homolog of NCBI NO: 18409345 NR Description: TCP family transcription factor, putative
  misc_feature (11)..(102): Homolog of NCBI NO: 5731257 NR Description: auxin-induced basic helix-loop-helix
  misc_feature (17)..(116): Homolog of NCBI NO: 15218305 NR Description: TCP family transcription factor, putative
  misc_feature (20)..(91): Homolog of NCBI NO: 15232059 NR Description: TCP family transcription factor, putative thaliana] >gi|9279624|dbj|BAB01082.1| gene_id:MOJ10.8~unknown [Arabidopsis thaliana] >gi|11595501|emb|CAC18326.1| putative
MMLMKQEDGYLQPVKTKPAPKRPTSKDRHTKVEGRGRRIRMPAGCAARVFQLTRELGHKSDGETIRWLLERAEPAIIEATGTGTVPAIAVSVNGTLKIPTSSPVLNDGGRDGDGDLIKKRRKRNCTSDFVDVNDSCHSSVTSGLAPITASNYGVNILNVNTQGFVPFWPMGMGTAFVTGGPDQMGQMWAIPTVATAPFLNVGARPVSSYVSNASDAEAEMETSGGGTTQPLRDFSLEIYDKRELQFLGGSGNSSPSSCHET

SEQ ID NO: 99482 - DNA, 1305 bp, Arabidopsis thaliana
  misc_feature (1)..(1305): Ceres Seq. ID no. 13603034
  misc_feature: MA Experiment ID: 108461 Result: Up-regulated in Transcription
  misc_feature: MA Experiment 108461 PARAMETER Experiment Name: At_Germinating_Seeds_cDNA_P Parameter: Age (day) Value: 1 vs. 0
  misc_feature: MA Experiment 108461 PARAMETER Experiment Name: At_Germinating_Seeds_cDNA_P Parameter: Tissue Value: Germinating Seeds
  misc_feature: MA Experiment ID: 108462 Result: Up-regulated in Transcription
  misc_feature: MA Experiment 108462 PARAMETER Experiment Name: At_Germinating_Seeds_cDNA_P Parameter: Age (day) Value: 2 vs. 0
  misc_feature: MA Experiment 108462 PARAMETER Experiment Name: At_Germinating_Seeds_cDNA_P Parameter: Tissue Value: Germinating Seeds
  misc_feature: MA Experiment ID: 108463 Result: Up-regulated in Transcription
  misc_feature: MA Experiment 108463 PARAMETER Experiment Name: At_Germinating_Seeds_cDNA_P Parameter: Age (day) Value: 3 vs. 0
  misc_feature: MA Experiment 108463 PARAMETER Experiment Name: At_Germinating_Seeds_cDNA_P Parameter: Tissue Value: Germinating Seeds
  misc_feature: MA Experiment ID: 108464 Result: Up-regulated in Transcription
  misc_feature: MA Experiment 108464 PARAMETER Experiment Name: At_Germinating_Seeds_cDNA_P Parameter: Age (day) Value: 4 vs. 0
  misc_feature: MA Experiment 108464 PARAMETER Experiment Name: At_Germinating_Seeds_cDNA_P Parameter: Tissue Value: Germinating Seeds
  misc_feature: MA Experiment ID: 108577 Result: Up-regulated in Transcription
  misc_feature: MA Experiment 108577 PARAMETER Experiment Name: At_42deg_Heat_cDNA_P Parameter: Temperature (deg C) Value: 42 vs. 22
  misc_feature: MA Experiment 108577 PARAMETER Experiment Name: At_42deg_Heat_cDNA_P Parameter: Timepoint (hr) Value: 6
  misc_feature: MA Experiment 108577 PARAMETER Experiment Name: At_42deg_Heat_cDNA_P Parameter: Tissue Value: Aerial
  misc_feature: MA Experiment ID: 108594 Result: Up-regulated in Transcription
  misc_feature: MA Experiment 108594 PARAMETER Experiment Name: At_Ler-rhl_Root_cDNA_P Parameter: Plant Line Value: null
  misc_feature: MA Experiment ID: 20000166 Result: Down-regulated in Transcription
  misc_feature: MA Experiment 20000166 PARAMETER Experiment Name: At_100uM_ABA_P Parameter: Age (day) Value: 14
  misc_feature: MA Experiment 20000166 PARAMETER Experiment Name: At_100uM_ABA_P Parameter: Organism Value: A. thaliana
  misc_feature: MA Experiment 20000166 PARAMETER Experiment Name: At_100uM_ABA_P Parameter: Plant Line Value: WS
  misc_feature: MA Experiment 20000166 PARAMETER Experiment Name: At_100uM_ABA_P Parameter: Timepoint (hr) Value: 1
  misc_feature: MA Experiment 20000166 PARAMETER Experiment Name: At_100uM_ABA_P Parameter: Tissue Value: Aerial
  misc_feature: MA Experiment 20000166 PARAMETER Experiment Name: At_100uM_ABA_P Parameter: Treatment Value: 100uM ABA vs. No Treatment
  misc_feature: MA Experiment ID: 20000184 Result: Up-regulated in Transcription
  misc_feature: MA Experiment 20000184 PARAMETER Experiment Name: At_Shoots__P Parameter: Age (day) Value: 7
  misc_feature: MA Experiment 20000184 PARAMETER Experiment Name: At_Shoots__P Parameter: Tissue Value: Shoots vs. Whole Plant
  misc_feature: MA Experiment ID: 20000213 Result: Down-regulated in Transcription
  misc_feature: MA Experiment 20000213 PARAMETER Experiment Name: At_4deg_Cold_P Parameter: Timepoint (hr) Value: 2
  misc_feature: MA Experiment ID: 20000224 Result: Down-regulated in Transcription
  misc_feature: MA Experiment ID: 20000227 Result: Up-regulated in Transcription
  misc_feature: MA Experiment 20000227 PARAMETER Experiment Name: At_Root-Tips-vs-Tops_P Parameter: Tissue Value: Root Tips vs. Root Tops
  misc_feature: MA Experiment ID: 20000234 Result: Down-regulated in Transcription
  misc_feature: MA Experiment 20000234 PARAMETER Experiment Name: At_Siliques_P Parameter: Age (day) Value: 21
  misc_feature: MA Experiment 20000234 PARAMETER Experiment Name: At_Siliques_P Parameter: Organism Value: A. thaliana
  misc_feature: MA Experiment 20000234 PARAMETER Experiment Name: At_Siliques_P Parameter: Plant Line Value: WS
  misc_feature: MA Experiment 20000234 PARAMETER Experiment Name: At_Siliques_P Parameter: Tissue Value: Less Than 5mm Siliques vs. Whole Plant
  misc_feature: MA Experiment ID: 20000308 Result: Down-regulated in Transcription
  misc_feature: MA Experiment 20000308 PARAMETER Experiment Name: At_100mM_NaCl__P Parameter: Age (day) Value: 17
  misc_feature: MA Experiment 20000308 PARAMETER Experiment Name: At_100mM_NaCl__P Parameter: Organism Value: A. thaliana
  misc_feature: MA Experiment 20000308 PARAMETER Experiment Name: At_100mM_NaCl__P Parameter: Plant Line Value: WS
  misc_feature: MA Experiment 20000308 PARAMETER Experiment Name: At_100mM_NaCl__P Parameter: Timepoint (hr) Value: 72
  misc_feature: MA Experiment 20000308 PARAMETER Experiment Name: At_100mM_NaCl__P Parameter: Tissue Value: Whole Plant
  misc_feature: MA Experiment 20000308 PARAMETER Experiment Name: At_100mM_NaCl__P Parameter: Treatment Value: 100mM NaCl vs. No Treatment
  misc_feature: MA Experiment ID: 20000576 Result: Down-regulated in Transcription
  misc_feature: MA Experiment 20000576 PARAMETER Experiment Name: At_100uM_ABA_Mutants__P Parameter: Organism Value: A. thaliana
  misc_feature: MA Experiment 20000576 PARAMETER Experiment Name: At_100uM_ABA_Mutants__P Parameter: Plant Line Value: CS23
  misc_feature: MA Experiment 20000576 PARAMETER Experiment Name: At_100uM_ABA_Mutants__P Parameter: Timepoint (hr) Value: 6
  misc_feature: MA Experiment 20000576 PARAMETER Experiment Name: At_100uM_ABA_Mutants__P Parameter: Tissue Value: Whole Plant
  misc_feature: MA Experiment 20000576 PARAMETER Experiment Name: At_100uM_ABA_Mutants__P Parameter: Treatment Value: 1uM ABA vs. No Treatment
  misc_feature: MA Experiment ID: 20000794 Result: Up-regulated in Transcription
  misc_feature: MA Experiment 20000794 PARAMETER Experiment Name: At_Petals_P Parameter: Age (day) Value: 23-25 days
  misc_feature: MA Experiment 20000794 PARAMETER Experiment Name: At_Petals_P Parameter: Plant Line Value: WS
  misc_feature: MA Experiment 20000794 PARAMETER Experiment Name: At_Petals_P Parameter: Tissue Value: Petals vs. Whole plant
  misc_feature: MA Experiment ID: 20001247 Result: Up-regulated in Transcription
  misc_feature: MA Experiment 20001247 PARAMETER Experiment Name: At_Far-red-induction_P Parameter: Age (day) Value: 7
  misc_feature: MA Experiment 20001247 PARAMETER Experiment Name: At_Far-red-induction_P Parameter: Light Value: Far-red vs. White
  misc_feature: MA Experiment 20001247 PARAMETER Experiment Name: At_Far-red-induction_P Parameter: Organism Value: A. thaliana
  misc_feature: MA Experiment 20001247 PARAMETER Experiment Name: At_Far-red-induction_P Parameter: Plant Line Value: Columbia
  misc_feature: MA Experiment 20001247 PARAMETER Experiment Name: At_Far-red-induction_P Parameter: Timepoint (hr) Value: 1
  misc_feature: MA Experiment 20001247 PARAMETER Experiment Name: At_Far-red-induction_P Parameter: Tissue Value: Whole Plant
  misc_feature: MA Experiment ID: 20001248 Result: Up-regulated in Transcription
  misc_feature: MA Experiment 20001248 PARAMETER Experiment Name: At_Far-red-induction_P Parameter: Age (day) Value: 7
  misc_feature: MA Experiment 20001248 PARAMETER Experiment Name: At_Far-red-induction_P Parameter: Light Value: Far-red vs. White
  misc_feature: MA Experiment 20001248 PARAMETER Experiment Name: At_Far-red-induction_P Parameter: Organism Value: A. thaliana
  misc_feature: MA Experiment 20001248 PARAMETER Experiment Name: At_Far-red-induction_P Parameter: Plant Line Value: Columbia
  misc_feature: MA Experiment 20001248 PARAMETER Experiment Name: At_Far-red-induction_P Parameter: Timepoint (hr) Value: 4
  misc_feature: MA Experiment 20001248 PARAMETER Experiment Name: At_Far-red-induction_P Parameter: Tissue Value: Whole Plant
  misc_feature: MA Experiment ID: 20001450 Result: Up-regulated in Transcription
  misc_feature: MA Experiment 20001450 PARAMETER Experiment Name: At_Far-red-induction_P Parameter: Age (day) Value: 7
  misc_feature: MA Experiment 20001450 PARAMETER Experiment Name: At_Far-red-induction_P Parameter: Light Value: Far-red vs. White
  misc_feature: MA Experiment 20001450 PARAMETER Experiment Name: At_Far-red-induction_P Parameter: Organism Value: A. thaliana
  misc_feature: MA Experiment 20001450 PARAMETER Experiment Name: At_Far-red-induction_P Parameter: Plant Line Value: Columbia
  misc_feature: MA Experiment 20001450 PARAMETER Experiment Name: At_Far-red-induction_P Parameter: Timepoint (hr) Value: 8
  misc_feature: MA Experiment 20001450 PARAMETER Experiment Name: At_Far-red-induction_P Parameter: Tissue Value: Whole Plant
  misc_feature: MA Experiment ID: 20001451 Result: Up-regulated in Transcription
  misc_feature: MA Experiment 20001451 PARAMETER Experiment Name: At_Far-red-induction_P Parameter: Age (day) Value: 7
  misc_feature: MA Experiment 20001451 PARAMETER Experiment Name: At_Far-red-induction_P Parameter: Light Value: Far-red vs. White
  misc_feature: MA Experiment 20001451 PARAMETER Experiment Name: At_Far-red-induction_P Parameter: Organism Value: A. thaliana
  misc_feature: MA Experiment 20001451 PARAMETER Experiment Name: At_Far-red-induction_P Parameter: Plant Line Value: Columbia
  misc_feature: MA Experiment 20001451 PARAMETER Experiment Name: At_Far-red-induction_P Parameter: Timepoint (hr) Value: 24
  misc_feature: MA Experiment 20001451 PARAMETER Experiment Name: At_Far-red-induction_P Parameter: Tissue Value: Whole Plant
  misc_feature: MA Experiment ID: 20001557 Result: Up-regulated in Transcription
  misc_feature: MA Experiment 20001557 PARAMETER Experiment Name: At_Drought_Soil_Dry_P Parameter: Age (day) Value: 27
  misc_feature: MA Experiment 20001557 PARAMETER Experiment Name: At_Drought_Soil_Dry_P Parameter: Organism Value: A. thaliana
  misc_feature: MA Experiment 20001557 PARAMETER Experiment Name: At_Drought_Soil_Dry_P Parameter: Plant Line Value: WS
  misc_feature: MA Experiment 20001557 PARAMETER Experiment Name: At_Drought_Soil_Dry_P Parameter: Post Timepoint (hr) Value: 3
  misc_feature: MA Experiment 20001557 PARAMETER Experiment Name: At_Drought_Soil_Dry_P Parameter: Post-Treatment Value: Re-Water vs. No Drought
  misc_feature: MA Experiment 20001557 PARAMETER Experiment Name: At_Drought_Soil_Dry_P Parameter: Timepoint (day) Value: 13
  misc_feature: MA Experiment 20001557 PARAMETER Experiment Name: At_Drought_Soil_Dry_P Parameter: Treatment Value: Drought vs. No Drought
  misc_feature: MA Experiment ID: 20001904 Result: Up-regulated in Transcription
  misc_feature: MA Experiment 20001904 PARAMETER Experiment Name: At_Drought_Reproduction_P Parameter: Age (day) Value: 37
  misc_feature: MA Experiment 20001904 PARAMETER Experiment Name: At_Drought_Reproduction_P Parameter: Organism Value: A. thaliana
  misc_feature: MA Experiment 20001904 PARAMETER Experiment Name: At_Drought_Reproduction_P Parameter: Plant Line Value: WS
  misc_feature: MA Experiment 20001904 PARAMETER Experiment Name: At_Drought_Reproduction_P Parameter: Timepoint (day) Value: 7
  misc_feature: MA Experiment 20001904 PARAMETER Experiment Name: At_Drought_Reproduction_P Parameter: Tissue Value: Rosettes
  misc_feature: MA Experiment 20001904 PARAMETER Experiment Name: At_Drought_Reproduction_P Parameter: Treatment Value: Drought vs. No Drought
  misc_feature: MA Experiment ID: 20001905 Result: Up-regulated in Transcription
  misc_feature: MA Experiment 20001905 PARAMETER Experiment Name: At_Drought_Reproduction_P Parameter: Age (day) Value: 40
  misc_feature: MA Experiment 20001905 PARAMETER Experiment Name: At_Drought_Reproduction_P Parameter: Organism Value: A. thaliana
  misc_feature: MA Experiment 20001905 PARAMETER Experiment Name: At_Drought_Reproduction_P Parameter: Plant Line Value: WS
  misc_feature: MA Experiment 20001905 PARAMETER Experiment Name: At_Drought_Reproduction_P Parameter: Timepoint (day) Value: 10
  misc_feature: MA Experiment 20001905 PARAMETER Experiment Name: At_Drought_Reproduction_P Parameter: Tissue Value: Rosettes
  misc_feature: MA Experiment 20001905 PARAMETER Experiment Name: At_Drought_Reproduction_P Parameter: Treatment Value: Drought vs. No Drought
atagtttcgtgtggacctaactaaaactagtcgtaactcattcatggaggctttgttctgctctgagatacccaacaacaacatcagatcttccattaacgatctatcttcttcttcttcatatacatggccaatgatcatgacctcctcttcttcttcttcttcatctcccacaatcatgaacatagagaacattcctagatgcgactgggatctctctctttccgccgttgtttcctccgcatccaccggatcagacgctatcggagcaatcgagttcgaccctaccggagagatcatagctacgggaggaatcgcaagaaagatcagatcgtatcgtttaagctctttgttagagtcacgtgacgatcacgtaacagcttcagagagctatatttgcacgccggcgaagcttagtagtctcaaatggagacccgatttttccggtcgggttatcgggtcaggagattacgacggagttgtcaccgagtacgacgtggagaaacaagtgcctgtttccgagagagacgagcatggaggtagaaggatttggagcgtggactacacgctttacaatggctctcttataggcgcgtcaggctccgacgacggaacggttcaaatgtgggatccacgtaacggagggacgttagaagaaacggttaggcccggtggtggagcggcgatttgttcggtagagttcgatccgttcggtggatcttccatagccgttggatgtgctgaccggaatgcctacgtgtatgacatcagaagactagtggaccctttgatcgtattagacggccataccaaaacggtgacgtatgctcgattcatggattctcacacgatcgttaccggttcgaccgacgggagcttgaagcaatgggatatagataatggacggcgcgtggttcgcacgtaccgagggcatgtgaatagccggaactttgttgggttgtcggtttggagacatggtggtttggtcgtgtccgggtcagagaataaccaagtgtttgtgtacgataagaggtgggaggaaccggtttgggtttgtggattgggtcatacgaaccggtttggatctgaccgacggtttgttagtagtgtgtgtttgagacaagtggatgaagattggtgcacacttgtggccggaggatccgatggggctttagaaattttctcgggcaaacaaagctaatcagtatttatattatttttttctgctcatgattaatacaaactgtttttcagttgattttatactgtctatagttattaattttaatatgattgaatgttact

SEQ ID NO: 99483 - protein, 385 aa, Arabidopsis thaliana
  peptide (1)..(385): Ceres Seq. ID no. 13603035
  misc_feature (1)..(385): Homolog of NCBI NO: 15242945 NR Description: transducin / WD-40 repeat protein family thaliana] >gi|8885538|dbj|BAA97468.1| contains similarity to repressor COP1~gene_id:F17P19.15 [Arabidopsis thaliana]
  misc_feature (1)..(385): Homolog of NCBI NO: 21592812 NR Description: contains similarity to photomorphogenesis
  misc_feature (53)..(384): Homolog of NCBI NO: 10176840 NR Description: contains similarity to photomorphogenesis
  misc_feature (149)..(384): Homolog of NCBI NO: 18420709 NR Description: transducin / WD-40 repeat protein family thaliana] >gi|14532634|gb|AAK64045.1| unknown protein
  misc_feature (71)..(379): Homolog of NCBI NO: 9294263 NR Description: photomorphogenesis repressor protein-like
  misc_feature (71)..(379): Homolog of NCBI NO: 11127996 NR Description: COP1 [Ipomoea nil]
  misc_feature (71)..(379): Homolog of NCBI NO: 15219179 NR Description: WD-40 repeat protein family [Arabidopsis thaliana]
  misc_feature (71)..(379): Homolog of NCBI NO: 4090943 NR Description: COP1 homolog [Lycopersicon esculentum]
  misc_feature (71)..(379): Homolog of NCBI NO: 34910754 NR Description: P0042A10.6 [Oryza sativa (japonica
  misc_feature (71)..(379): Homolog of NCBI NO: 15029364 NR Description: photoregulatory zinc-finger protein COP1 [Rosa
MEALFCSEIPNNNIRSSINDLSSSSSYTWPMIMTSSSSSSSSPTIMNIENIPRCDWDLSLSAVVSSASTGSDAIGAIEFDPTGEIIATGGIARKIRSYRLSSLLESRDDHVTASESYICTPAKLSSLKWRPDFSGRVIGSGDYDGVVTEYDVEKQVPVSERDEHGGRRIWSVDYTLYNGSLIGASGSDDGTVQMWDPRNGGTLEETVRPGGGAAICSVEFDPFGGSSIAVGCADRNAYVYDIRRLVDPLIVLDGHTKTVTYARFMDSHTIVTGSTDGSLKQWDIDNGRRVVRTYRGHVNSRNFVGLSVWRHGGLVVSGSENNQVFVYDKRWEEPVWVCGLGHTNRFGSDRRFVSSVCLRQVDEDWCTLVAGGSDGALEIFSGKQS

SEQ ID NO: 99484 - protein, 355 aa, Arabidopsis thaliana
  peptide (1)..(355): Ceres Seq. ID no. 13603036
  misc_feature (1)..(355): Homolog of NCBI NO: 15242945 NR Description: transducin / WD-40 repeat protein family thaliana] >gi|8885538|dbj|BAA97468.1| contains similarity to repressor COP1~gene_id:F17P19.15 [Arabidopsis thaliana]
  misc_feature (1)..(355): Homolog of NCBI NO: 21592812 NR Description: contains similarity to photomorphogenesis
  misc_feature (23)..(354): Homolog of NCBI NO: 10176840 NR Description: contains similarity to photomorphogenesis
  misc_feature (119)..(354): Homolog of NCBI NO: 18420709 NR Description: transducin / WD-40 repeat protein family thaliana] >gi|14532634|gb|AAK64045.1| unknown protein
  misc_feature (41)..(349): Homolog of NCBI NO: 9294263 NR Description: photomorphogenesis repressor protein-like
  misc_feature (41)..(349): Homolog of NCBI NO: 11127996 NR Description: COP1 [Ipomoea nil]
  misc_feature (41)..(349): Homolog of NCBI NO: 15219179 NR Description: WD-40 repeat protein family [Arabidopsis thaliana]
  misc_feature (41)..(349): Homolog of NCBI NO: 4090943 NR Description: COP1 homolog [Lycopersicon esculentum]
  misc_feature (41)..(349): Homolog of NCBI NO: 34910754 NR Description: P0042A10.6 [Oryza sativa (japonica
  misc_feature (41)..(349): Homolog of NCBI NO: 15029364 NR Description: photoregulatory zinc-finger protein COP1 [Rosa
MIMTSSSSSSSSPTIMNIENIPRCDWDLSLSAVVSSASTGSDAIGAIEFDPTGEIIATGGIARKIRSYRLSSLLESRDDHVTASESYICTPAKLSSLKWRPDFSGRVIGSGDYDGVVTEYDVEKQVPVSERDEHGGRRIWSVDYTLYNGSLIGASGSDDGTVQMWDPRNGGTLEETVRPGGGAAICSVEFDPFGGSSIAVGCADRNAYVYDIRRLVDPLIVLDGHTKTVTYARFMDSHTIVTGSTDGSLKQWDIDNGRRVVRTYRGHVNSRNFVGLSVWRHGGLVVSGSENNQVFVYDKRWEEPVWVCGLGHTNRFGSDRRFVSSVCLRQVDEDWCTLVAGGSDGALEIFSGKQS

SEQ ID NO: 99485 - protein, 353 aa, Arabidopsis thaliana
  peptide (1)..(353): Ceres Seq. ID no. 13603037
  misc_feature (1)..(353): Homolog of NCBI NO: 15242945 NR Description: transducin / WD-40 repeat protein family thaliana] >gi|8885538|dbj|BAA97468.1| contains similarity to repressor COP1~gene_id:F17P19.15 [Arabidopsis thaliana]
  misc_feature (1)..(353): Homolog of NCBI NO: 21592812 NR Description: contains similarity to photomorphogenesis
  misc_feature (21)..(352): Homolog of NCBI NO: 10176840 NR Description: contains similarity to photomorphogenesis
  misc_feature (117)..(352): Homolog of NCBI NO: 18420709 NR Description: transducin / WD-40 repeat protein family thaliana] >gi|14532634|gb|AAK64045.1| unknown protein
  misc_feature (39)..(347): Homolog of NCBI NO: 9294263 NR Description: photomorphogenesis repressor protein-like
  misc_feature (39)..(347): Homolog of NCBI NO: 11127996 NR Description: COP1 [Ipomoea nil]
  misc_feature (39)..(347): Homolog of NCBI NO: 15219179 NR Description: WD-40 repeat protein family [Arabidopsis thaliana]
  misc_feature (39)..(347): Homolog of NCBI NO: 4090943 NR Description: COP1 homolog [Lycopersicon esculentum]
  misc_feature (39)..(347): Homolog of NCBI NO: 34910754 NR Description: P0042A10.6 [Oryza sativa (japonica
  misc_feature (39)..(347): Homolog of NCBI NO: 15029364 NR Description: photoregulatory zinc-finger protein COP1 [Rosa
MTSSSSSSSSPTIMNIENIPRCDWDLSLSAVVSSASTGSDAIGAIEFDPTGEIIATGGIARKIRSYRLSSLLESRDDHVTASESYICTPAKLSSLKWRPDFSGRVIGSGDYDGVVTEYDVEKQVPVSERDEHGGRRIWSVDYTLYNGSLIGASGSDDGTVQMWDPRNGGTLEETVRPGGGAAICSVEFDPFGGSSIAVGCADRNAYVYDIRRLVDPLIVLDGHTKTVTYARFMDSHTIVTGSTDGSLKQWDIDNGRRVVRTYRGHVNSRNFVGLSVWRHGGLVVSGSENNQVFVYDKRWEEPVWVCGLGHTNRFGSDRRFVSSVCLRQVDEDWCTLVAGGSDGALEIFSGKQS

SEQ ID NO: 99486 - DNA, 5045 bp, Arabidopsis thaliana
  misc_feature (1)..(5045): Ceres Seq. ID no. 13603040
  misc_feature: MA Experiment ID: 20001556 Result: Up-regulated in Transcription
  misc_feature: MA Experiment 20001556 PARAMETER Experiment Name: At_Drought_Soil_Dry_P Parameter: Age (day) Value: 26
  misc_feature: MA Experiment 20001556 PARAMETER Experiment Name: At_Drought_Soil_Dry_P Parameter: Organism Value: A. thaliana
  misc_feature: MA Experiment 20001556 PARAMETER Experiment Name: At_Drought_Soil_Dry_P Parameter: Plant Line Value: WS
  misc_feature: MA Experiment 20001556 PARAMETER Experiment Name: At_Drought_Soil_Dry_P Parameter: Post Timepoint (hr) Value: None
  misc_feature: MA Experiment 20001556 PARAMETER Experiment Name: At_Drought_Soil_Dry_P Parameter: Post-Treatment Value: None
  misc_feature: MA Experiment 20001556 PARAMETER Experiment Name: At_Drought_Soil_Dry_P Parameter: Timepoint (day) Value: 12
  misc_feature: MA Experiment 20001556 PARAMETER Experiment Name: At_Drought_Soil_Dry_P Parameter: Treatment Value: Drought vs. No Drought
  misc_feature: MA Experiment ID: 20001557 Result: Up-regulated in Transcription
  misc_feature: MA Experiment 20001557 PARAMETER Experiment Name: At_Drought_Soil_Dry_P Parameter: Age (day) Value: 27
  misc_feature: MA Experiment 20001557 PARAMETER Experiment Name: At_Drought_Soil_Dry_P Parameter: Organism Value: A. thaliana
  misc_feature: MA Experiment 20001557 PARAMETER Experiment Name: At_Drought_Soil_Dry_P Parameter: Plant Line Value: WS
  misc_feature: MA Experiment 20001557 PARAMETER Experiment Name: At_Drought_Soil_Dry_P Parameter: Post Timepoint (hr) Value: 3
  misc_feature: MA Experiment 20001557 PARAMETER Experiment Name: At_Drought_Soil_Dry_P Parameter: Post-Treatment Value: Re-Water vs. No Drought
  misc_feature: MA Experiment 20001557 PARAMETER Experiment Name: At_Drought_Soil_Dry_P Parameter: Timepoint (day) Value: 13
  misc_feature: MA Experiment 20001557 PARAMETER Experiment Name: At_Drought_Soil_Dry_P Parameter: Treatment Value: Drought vs. No Drought
atgccgccaagaagagcaagacgccccgcgaacgctcggataaaccgagtagcgaaggcaccagttgttgggcaagaccagccacctgtggtagctcaaccagctcaggcagctcaagcagatgaggcagctcaggcagctaatgcagctcatgcagcagagattgcagcgaatccacctggagttgctgcacctcagtaccatcagccaccgccgccgccaccagcacctagggttgaagttcgcgctgatgattggaggcagatgttggagaagaatttcaggacagcgaggtgcccagaggaatttaagaaggatcttgcagtgcattacctaaggggagaagcagatcattggtggaaaaattttaagaggggcttgcctgctggatatgtgcctacgtgggaggatttcttaagggagttcaataataagtactttccgcgggaagctatggaacagtttgatcatgagttcatggagcttcgtcagggcacgaggaccgttcgtgagtatgatgaggagttcagtcgtctaaggaggttcactatgaagaattttggagagcaggatatgattcaaagattcatgaggggactcagggttgatattcgtactcgtacctccattcgagggtgcactagcctcgttgagttagttgaggaggctgctaggttagagataggacttgtggaggaagttatggatctcaagaaggctcaagcaaaggtaacaaaaggagctgaatctcagaagcgcacttgggataatcgtggtgcagtatcagtccaaaatggtcagcattgcgccacatgtggaaaagacaataattgcaggaggtgttggaagccaggtcattttgcaagggattgtagagtgaatttggcagggggacaaccaggaaatcagaacagaggaattatgccaccaccgccaaagcggcaagcagtgggacctcgagtgtatgccatagcaggcgaggaggatgttgatgaggatggcgccgacccgattgttggaccaggattggtgaagtcgtcacggacctatcgggatgtccctgtagagattgaaggtgtggagttgtttgggaatttcctagagatggagttgaagcgttatgagataatcctcgggatgggttggttgaagagacataatgctaatttggattgcccaaggttgcgggttaattttactcgagaagagggtaatttgatgtttcagggagtcgaaactcgtagcgggccgatcttttcgatgattcaagcagataatttacagtggactggacctgaagcttacttggcaacaatctctattgacggaggagatacaggaatggaattaaaggatattcttgtagcagcagagtactcagatatttttgaaccgctccaaggaccgccaccagatagaggagatgctttcatcattgagttagagccagggactgctccagtatccaagacaccttaccgattagctccaacagaaatggctgaactgaagaagcagttagaggagcttacagacaaaggatttgtgaggccaagtagttcgctgtggggagcgcctgttctttttgtgaagaagaaagatggaactttcaggctttgtattgattaccgtggcttgaataaggtgactatcaagaacaaatatcctttaccgagaattgatgaattgttggaccaacttcagggagcatcttggttttcgaagatagatttggcatcaggttaccatcatattgctatctctgaggcagatgtgagtaaaacagctttcaggacacgttatgggcattatgagtttgttgtcatgccgtttggattgacgaatgcccctgcagcttttatgaagctaatgaataacatattccgggagtttttggacaagtttgttattgtgtttatcgatgacatcttgatatactctaggagtaaggaggagcatgttgagcatctaaggattgtgttacaacggttgcgagaccaccagctttttgcaaaattatcaaagtgcagtttttggcagaaaaagattggatttttgggtcatgtcatttcagaggaaggtgtagctgtggatccagagaagatcacgactatcactcattggcctagacccaagaacgctacagagattcgtagttttcttggacttgctggttattatcggaaatttgtggaaggatttgccagcattgccaaaccactaacacagttgacatgtaaggatgccaagtttgagtggacagaagcatgtgaagaaagttttggaaagttaaaggagcatttaactcagacacctatactagtattaccgaaggctggggtaccttatgcggtttatacggatgcatcgggaactgggttaggatgtgtatttgcatatgcatcatggcagttgagaaaacacgagattaattaccctactcatgaattggagttagctgcagtggtttttgctcttaaggtttggagagcctacttgtatggggagaaggtacaagtatttactgatcataagagtctgaagtatatcttcacccaagcagatttgaatctgagacagaggagatggacggagtttcttgcagactatgatttggatattgcttaccatccaggaaaagcaaatctggtggcagatgcactaagtagaaggagacatgatgtgcatgcaaccaaagaggttgaagagcttgtttcagctttgacaagtctcaatatctgtgaagctttagtggatgatgaagtagttggcttgaaagcgaaagaagatgtggtattaaagaaatcagtggagagtgaagttgaaggttatcacattaccaagaatgggacatttgtttttaaaggccgagtatgcgtcccagatgataaagatttgaaggaagagatcttgagacaggcgcatcagtcacgttttgctattcatccagggtctaccaaaatgtacagagacttgaagaggtactatcattgggttaagatgaaacgagaggttgctgactgggtagcaaagtgcacgacttgtcagttggtgaaagcagaacacaagtctccaagtggacttttacaaggtctaccattgccagaatggaaatgggatatggtgactatggattttgttactggacttccgagaacagcaagtaagcaggatgcaatttgggtaattgtagatcgacttactaagtcagctcattttctagcagtcaataaaaaagacacagctgaccgcttagctcaaaagtatatggatgagatagtgagacgtcatggagttccggtaagcattgtttctgatagagattcgaagttcacatcgttgttttggaaagcatttcagaaagctttgggaaccaaggtgcacttgagtaaagcatatcaccctcagacagatggtcaatttgagcggacgattcagactttggaggacatgcttagagcttgtatgctggattggggaggacgttgggaaaaatatctacctttggtagaatttgcttataacaacagttatcattcaagcataggcatgccgccatttgaggctctttatggaagaccttgtcgcacaccactttgttggacagaagtgggggagcgccaagacattaagcctgaaataattcaagagtcaactgagcaagtagagctgcttaaaaacaggctaagagaagctcatgaccgccaaaagagttatgcagataaaagaaggaaagggcttgagtttaaagttggtgacttggtgtatcttaaaatgagattgttcaaaggactgaatcgttgggctaagagaggaaaacttaagtcgagatacatgggtccttaccctatcatagagagagttggagctgtagcttaccgtttggacctaccagcagatttggcagcatttcatgatgtatttcacatatcggtgcttagaaaagttgtcacagaaccaaagcttatcatttcacggccaccagaggatcttgagttagacttatcggtaaaaggaaaaccggtatcaattgtgagtcatagagaaaatggttcacgggggaagaaagttaagtcgattcaagtttgctgggaaagggatggaattcaagagttgtcatgggaatcagaaagaatgatgcgggaagactacccagaactttttaaggacgaagaggaggatcatggtgatggatcgaattcgaggacgaattccattgtagtgggggagaattgtaacacccctattttacaattagaccatgaggcccaagtccaacccgctaatgatttgaacccaagtgaaaacctaatgatcccacgtgattataaaaggagaacgcaaactccaaatcaagtcataaaaaccctaagccggcaacctcgcaccactcagaccaccggagatcgttgttgtgttgagccggagtcaccgcgtgaatcatcctaaccggagagatttgtgccactccgccgttccaaccgccaagcaaaccgtaagggagactcgtcgagaaaagccaccgacaaaggtgaggaagagaatgttgagtagctgctcgcttggtgttatttcgggactttgggttttatttgatttatcgatatttcttatatttctaaacacggtttctttatacatttttatccaacgattttaatttatttatgctattattttgagacaatttatttctgatttttaataaaagaaagtttcccgaaattatgatattttatttcaagatctgatttgaagaagttgattaaatgaatggaaaagatgaaagtacgtcgtctcaaggttgagagagacgggtattataatactatctttcaagattcttttgaaatcgttgccttgcgatttcttatagtttctcattatgatttgtattgtctatctatctcttttttaaccatcgtttggtggtcttttgggtattcgtttaattacccttatgttggtttttttccatttttttggatgtaatccctcctctgatagagtttgaggcgtaactctaatgaagttatcagttggtc

SEQ ID NO: 99487 - protein, 1482 aa, Arabidopsis thaliana
  peptide (1)..(1482): Ceres Seq. ID no. 13603041
  misc_feature (521)..(690): Pfam Name: Reverse transcriptase (RNA-dependent DNA polymerase) Pfam Description: Reverse transcriptase (RNA-dependent DNA
  misc_feature (353)..(964): Homolog of NCBI NO: 8096399 NR Description: Similar to Sorghum bicolor 22 kDa kafirin cluster;
  misc_feature (908)..(1399): Homolog of NCBI NO: 8096399 NR Description: Similar to Sorghum bicolor 22 kDa kafirin cluster;
  misc_feature (45)..(262): Homolog of NCBI NO: 8096399 NR Description: Similar to Sorghum bicolor 22 kDa kafirin cluster;
  misc_feature (905)..(1390): Homolog of NCBI NO: 21741860 NR Description: OSJNBa0019D11.8 [Oryza sativa (japonica
  misc_feature (446)..(913): Homolog of NCBI NO: 21741860 NR Description: OSJNBa0019D11.8 [Oryza sativa (japonica
  misc_feature (58)..(227): Homolog of NCBI NO: 21741860 NR Description: OSJNBa0019D11.8 [Oryza sativa (japonica
  misc_feature (342)..(422): Homolog of NCBI NO: 21741860 NR Description: OSJNBa0019D11.8 [Oryza sativa (japonica
  misc_feature (448)..(949): Homolog of NCBI NO: 21740445 NR Description: OSJNBa0091D06.6 [Oryza sativa (japonica
  misc_feature (908)..(1399): Homolog of NCBI NO: 21740445 NR Description: OSJNBa0091D06.6 [Oryza sativa (japonica
  misc_feature (28)..(320): Homolog of NCBI NO: 21740445 NR Description: OSJNBa0091D06.6 [Oryza sativa (japonica
MPPRRARRPANARINRVAKAPVVGQDQPPVVAQPAQAAQADEAAQAANAAHAAEIAANPPGVAAPQYHQPPPPPPAPRVEVRADDWRQMLEKNFRTARCPEEFKKDLAVHYLRGEADHWWKNFKRGLPAGYVPTWEDFLREFNNKYFPREAMEQFDHEFMELRQGTRTVREYDEEFSRLRRFTMKNFGEQDMIQRFMRGLRVDIRTRTSIRGCTSLVELVEEAARLEIGLVEEVMDLKKAQAKVTKGAESQKRTWDNRGAVSVQNGQHCATCGKDNNCRRCWKPGHFARDCRVNLAGGQPGNQNRGIMPPPPKRQAVGPRVYAIAGEEDVDEDGADPIVGPGLVKSSRTYRDVPVEIEGVELFGNFLEMELKRYEIILGMGWLKRHNANLDCPRLRVNFTREEGNLMFQGVETRSGPIFSMIQADNLQWTGPEAYLATISIDGGDTGMELKDILVAAEYSDIFEPLQGPPPDRGDAFIIELEPGTAPVSKTPYRLAPTEMAELKKQLEELTDKGFVRPSSSLWGAPVLFVKKKDGTFRLCIDYRGLNKVTIKNKYPLPRIDELLDQLQGASWFSKIDLASGYHHIAISEADVSKTAFRTRYGHYEFVVMPFGLTNAPAAFMKLMNNIFREFLDKFVIVFIDDILIYSRSKEEHVEHLRIVLQRLRDHQLFAKLSKCSFWQKKIGFLGHVISEEGVAVDPEKITTITHWPRPKNATEIRSFLGLAGYYRKFVEGFASIAKPLTQLTCKDAKFEWTEACEESFGKLKEHLTQTPILVLPKAGVPYAVYTDASGTGLGCVFAYASWQLRKHEINYPTHELELAAVVFALKVWRAYLYGEKVQVFTDHKSLKYIFTQADLNLRQRRWTEFLADYDLDIAYHPGKANLVADALSRRRHDVHATKEVEELVSALTSLNICEALVDDEVVGLKAKEDVVLKKSVESEVEGYHITKNGTFVFKGRVCVPDDKDLKEEILRQAHQSRFAIHPGSTKMYRDLKRYYHWVKMKREVADWVAKCTTCQLVKAEHKSPSGLLQGLPLPEWKWDMVTMDFVTGLPRTASKQDAIWVIVDRLTKSAHFLAVNKKDTADRLAQKYMDEIVRRHGVPVSIVSDRDSKFTSLFWKAFQKALGTKVHLSKAYHPQTDGQFERTIQTLEDMLRACMLDWGGRWEKYLPLVEFAYNNSYHSSIGMPPFEALYGRPCRTPLCWTEVGERQDIKPEIIQESTEQVELLKNRLREAHDRQKSYADKRRKGLEFKVGDLVYLKMRLFKGLNRWAKRGKLKSRYMGPYPIIERVGAVAYRLDLPADLAAFHDVFHISVLRKVVTEPKLIISRPPEDLELDLSVKGKPVSIVSHRENGSRGKKVKSIQVCWERDGIQELSWESERMMREDYPELFKDEEEDHGDGSNSRTNSIVVGENCNTPILQLDHEAQVQPANDLNPSENLMIPRDYKRRTQTPNQVIKTLSRQPRTTQTTGDRCCVEPESPRESS

SEQ ID NO: 99488 - protein, 1394 aa, Arabidopsis thaliana
  peptide (1)..(1394): Ceres Seq. ID no. 13603042
  misc_feature (433)..(602): Pfam Name: Reverse transcriptase (RNA-dependent DNA polymerase) Pfam Description: Reverse transcriptase (RNA-dependent DNA
  misc_feature (265)..(876): Homolog of NCBI NO: 8096399 NR Description: Similar to Sorghum bicolor 22 kDa kafirin cluster;
  misc_feature (820)..(1311): Homolog of NCBI NO: 8096399 NR Description: Similar to Sorghum bicolor 22 kDa kafirin cluster;
  misc_feature (1)..(174): Homolog of NCBI NO: 8096399 NR Description: Similar to Sorghum bicolor 22 kDa kafirin cluster;
  misc_feature (817)..(1302): Homolog of NCBI NO: 21741860 NR Description: OSJNBa0019D11.8 [Oryza sativa (japonica
  misc_feature (358)..(825): Homolog of NCBI NO: 21741860 NR Description: OSJNBa0019D11.8 [Oryza sativa (japonica
  misc_feature (1)..(139): Homolog of NCBI NO: 21741860 NR Description: OSJNBa0019D11.8 [Oryza sativa (japonica
  misc_feature (254)..(334): Homolog of NCBI NO: 21741860 NR Description: OSJNBa0019D11.8 [Oryza sativa (japonica
  misc_feature (360)..(861): Homolog of NCBI NO: 21740445 NR Description: OSJNBa0091D06.6 [Oryza sativa (japonica
  misc_feature (820)..(1311): Homolog of NCBI NO: 21740445 NR Description: OSJNBa0091D06.6 [Oryza sativa (japonica
  misc_feature (1)..(232): Homolog of NCBI NO: 21740445 NR Description: OSJNBa0091D06.6 [Oryza sativa (japonica
MLEKNFRTARCPEEFKKDLAVHYLRGEADHWWKNFKRGLPAGYVPTWEDFLREFNNKYFPREAMEQFDHEFMELRQGTRTVREYDEEFSRLRRFTMKNFGEQDMIQRFMRGLRVDIRTRTSIRGCTSLVELVEEAARLEIGLVEEVMDLKKAQAKVTKGAESQKRTWDNRGAVSVQNGQHCATCGKDNNCRRCWKPGHFARDCRVNLAGGQPGNQNRGIMPPPPKRQAVGPRVYAIAGEEDVDEDGADPIVGPGLVKSSRTYRDVPVEIEGVELFGNFLEMELKRYEIILGMGWLKRHNANLDCPRLRVNFTREEGNLMFQGVETRSGPIFSMIQADNLQWTGPEAYLATISIDGGDTGMELKDILVAAEYSDIFEPLQGPPPDRGDAFIIELEPGTAPVSKTPYRLAPTEMAELKKQLEELTDKGFVRPSSSLWGAPVLFVKKKDGTFRLCIDYRGLNKVTIKNKYPLPRIDELLDQLQGASWFSKIDLASGYHHIAISEADVSKTAFRTRYGHYEFVVMPFGLTNAPAAFMKLMNNIFREFLDKFVIVFIDDILIYSRSKEEHVEHLRIVLQRLRDHQLFAKLSKCSFWQKKIGFLGHVISEEGVAVDPEKITTITHWPRPKNATEIRSFLGLAGYYRKFVEGFASIAKPLTQLTCKDAKFEWTEACEESFGKLKEHLTQTPILVLPKAGVPYAVYTDASGTGLGCVFAYASWQLRKHEINYPTHELELAAVVFALKVWRAYLYGEKVQVFTDHKSLKYIFTQADLNLRQRRWTEFLADYDLDIAYHPGKANLVADALSRRRHDVHATKEVEELVSALTSLNICEALVDDEVVGLKAKEDVVLKKSVESEVEGYHITKNGTFVFKGRVCVPDDKDLKEEILRQAHQSRFAIHPGSTKMYRDLKRYYHWVKMKREVADWVAKCTTCQLVKAEHKSPSGLLQGLPLPEWKWDMVTMDFVTGLPRTASKQDAIWVIVDRLTKSAHFLAVNKKDTADRLAQKYMDEIVRRHGVPVSIVSDRDSKFTSLFWKAFQKALGTKVHLSKAYHPQTDGQFERTIQTLEDMLRACMLDWGGRWEKYLPLVEFAYNNSYHSSIGMPPFEALYGRPCRTPLCWTEVGERQDIKPEIIQESTEQVELLKNRLREAHDRQKSYADKRRKGLEFKVGDLVYLKMRLFKGLNRWAKRGKLKSRYMGPYPIIERVGAVAYRLDLPADLAAFHDVFHISVLRKVVTEPKLIISRPPEDLELDLSVKGKPVSIVSHRENGSRGKKVKSIQVCWERDGIQELSWESERMMREDYPELFKDEEEDHGDGSNSRTNSIVVGENCNTPILQLDHEAQVQPANDLNPSENLMIPRDYKRRTQTPNQVIKTLSRQPRTTQTTGDRCCVEPESPRESS

SEQ ID NO: 99489 - protein, 1331 aa, Arabidopsis thaliana
  peptide (1)..(1331): Ceres Seq. ID no. 13603043
  misc_feature (370)..(539): Pfam Name: Reverse transcriptase (RNA-dependent DNA polymerase) Pfam Description: Reverse transcriptase (RNA-dependent DNA
  misc_feature (202)..(813): Homolog of NCBI NO: 8096399 NR Description: Similar to Sorghum bicolor 22 kDa kafirin cluster;
  misc_feature (757)..(1248): Homolog of NCBI NO: 8096399 NR Description: Similar to Sorghum bicolor 22 kDa kafirin cluster;
  misc_feature (1)..(111): Homolog of NCBI NO: 8096399 NR Description: Similar to Sorghum bicolor 22 kDa kafirin cluster;
  misc_feature (754)..(1239): Homolog of NCBI NO: 21741860 NR Description: OSJNBa0019D11.8 [Oryza sativa (japonica
  misc_feature (295)..(762): Homolog of NCBI NO: 21741860 NR Description: OSJNBa0019D11.8 [Oryza sativa (japonica
  misc_feature (1)..(76): Homolog of NCBI NO: 21741860 NR Description: OSJNBa0019D11.8 [Oryza sativa (japonica
  misc_feature (191)..(271): Homolog of NCBI NO: 21741860 NR Description: OSJNBa0019D11.8 [Oryza sativa (japonica
  misc_feature (297)..(798): Homolog of NCBI NO: 21740445 NR Description: OSJNBa0091D06.6 [Oryza sativa (japonica
  misc_feature (757)..(1248): Homolog of NCBI NO: 21740445 NR Description: OSJNBa0091D06.6 [Oryza sativa (japonica
  misc_feature (1)..(169): Homolog of NCBI NO: 21740445 NR Description: OSJNBa0091D06.6 [Oryza sativa (japonica
MEQFDHEFMELRQGTRTVREYDEEFSRLRRFTMKNFGEQDMIQRFMRGLRVDIRTRTSIRGCTSLVELVEEAARLEIGLVEEVMDLKKAQAKVTKGAESQKRTWDNRGAVSVQNGQHCATCGKDNNCRRCWKPGHFARDCRVNLAGGQPGNQNRGIMPPPPKRQAVGPRVYAIAGEEDVDEDGADPIVGPGLVKSSRTYRDVPVEIEGVELFGNFLEMELKRYEIILGMGWLKRHNANLDCPRLRVNFTREEGNLMFQGVETRSGPIFSMIQADNLQWTGPEAYLATISIDGGDTGMELKDILVAAEYSDIFEPLQGPPPDRGDAFIIELEPGTAPVSKTPYRLAPTEMAELKKQLEELTDKGFVRPSSSLWGAPVLFVKKKDGTFRLCIDYRGLNKVTIKNKYPLPRIDELLDQLQGASWFSKIDLASGYHHIAISEADVSKTAFRTRYGHYEFVVMPFGLTNAPAAFMKLMNNIFREFLDKFVIVFIDDILIYSRSKEEHVEHLRIVLQRLRDHQLFAKLSKCSFWQKKIGFLGHVISEEGVAVDPEKITTITHWPRPKNATEIRSFLGLAGYYRKFVEGFASIAKPLTQLTCKDAKFEWTEACEESFGKLKEHLTQTPILVLPKAGVPYAVYTDASGTGLGCVFAYASWQLRKHEINYPTHELELAAVVFALKVWRAYLYGEKVQVFTDHKSLKYIFTQADLNLRQRRWTEFLADYDLDIAYHPGKANLVADALSRRRHDVHATKEVEELVSALTSLNICEALVDDEVVGLKAKEDVVLKKSVESEVEGYHITKNGTFVFKGRVCVPDDKDLKEEILRQAHQSRFAIHPGSTKMYRDLKRYYHWVKMKREVADWVAKCTTCQLVKAEHKSPSGLLQGLPLPEWKWDMVTMDFVTGLPRTASKQDAIWVIVDRLTKSAHFLAVNKKDTADRLAQKYMDEIVRRHGVPVSIVSDRDSKFTSLFWKAFQKALGTKVHLSKAYHPQTDGQFERTIQTLEDMLRACMLDWGGRWEKYLPLVEFAYNNSYHSSIGMPPFEALYGRPCRTPLCWTEVGERQDIKPEIIQESTEQVELLKNRLREAHDRQKSYADKRRKGLEFKVGDLVYLKMRLFKGLNRWAKRGKLKSRYMGPYPIIERVGAVAYRLDLPADLAAFHDVFHISVLRKVVTEPKLIISRPPEDLELDLSVKGKPVSIVSHRENGSRGKKVKSIQVCWERDGIQELSWESERMMREDYPELFKDEEEDHGDGSNSRTNSIVVGENCNTPILQLDHEAQVQPANDLNPSENLMIPRDYKRRTQTPNQVIKTLSRQPRTTQTTGDRCCVEPESPRESS

SEQ ID NO: 99490 - DNA, 1003 bp, Arabidopsis thaliana
  misc_feature (1)..(1003): Ceres Seq. ID no. 13603052
  misc_feature: MA Experiment ID: 20000328 Result: Up-regulated in Transcription
  misc_feature: MA Experiment 20000328 PARAMETER Experiment Name: At_42deg_Heat_Sub_P Parameter: Age (day) Value: 14
  misc_feature: MA Experiment 20000328 PARAMETER Experiment Name: At_42deg_Heat_Sub_P Parameter: Organism Value: A. thaliana
  misc_feature: MA Experiment 20000328 PARAMETER Experiment Name: At_42deg_Heat_Sub_P Parameter: Plant Line Value: WS
  misc_feature: MA Experiment 20000328 PARAMETER Experiment Name: At_42deg_Heat_Sub_P Parameter: Temperature (deg C) Value: 42 vs. 22
  misc_feature: MA Experiment 20000328 PARAMETER Experiment Name: At_42deg_Heat_Sub_P Parameter: Timepoint (hr) Value: 6
  misc_feature: MA Experiment 20000328 PARAMETER Experiment Name: At_42deg_Heat_Sub_P Parameter: Tissue Value: Aerial
ctcacacacacaccaacgcaaacctccaaaacagggccggggcgattcattcacaatctcggcgattctctcttccgtctcgagtcgctgagatccatcagtaaaaggtctgcaaaatggttgctcagggattcactgtggatcttaaaaagccccttgtatttcaggttggtcatcttggagaagattatgaggaatgggttcaccaacctatcgcgaccaaggaaggccctcggttttttcagagtgacttttgggagttcttgacacttacagtttggtgggcagttcctgtcatttggttgccagttgtagtctggtgcatatcaaggtcagtaagtatgggatgttcacttccagaaatcgtcccaattgttgtcatgggaatattcatctggacattttttgaatacgttcttcaccggttcgttttccacataaaaacgaagagttactggggaaacactgcacactatcttattcacggatgccatcataagcacccgatggaccaccttcggctcgtctttcctcctactgcaacagcgattttatgctttccgttctggaacattgcgaaggctatctcaactccttcaaccgcacctgcattgtttggtggaggcatgctcggatatgtgatgtacgatgtcactcattattaccttcaccatgcccaacctactagaccagtgaccaaaaatctcaagaagtaccatttgaatcatcacttcaggattcaggacaaaggatttggtataacttcgtcgttatgggacatagtctttgggacacttcccaccacaaaagcccccagaaaagagcaatagtagtaaaaggcaaaaactaaaaagatgtttgtaatacatttaatttaatcttaagttattaatcatccttctgaattttgagatgtttaatctgaggtttcatttggatcactgtcttttgtagtttgtaaatcaatacttcacaatcctaatataatatttttctgcgaaag

SEQ ID NO: 99491 - protein, 237 aa, Arabidopsis thaliana; identical to SEQ ID NO: 29663
  peptide (1)..(237): Ceres Seq. ID no. 13603053
  misc_feature (86)..(229): Pfam Name: Fatty acid hydroxylase Pfam Description: Fatty acid hydroxylase
  misc_feature (1)..(237): Homolog of NCBI NO: 15226828 NR Description: fatty acid hydroxylase (FAH1) [Arabidopsis
  misc_feature (1)..(236): Homolog of NCBI NO: 15233426 NR Description: fatty acid hydroxylase, putative [Arabidopsis
  misc_feature (1)..(235): Homolog of NCBI NO: 34897078 NR Description: putative fatty acid hydroxylase [Oryza sativa
  misc_feature (8)..(233): Homolog of NCBI NO: 6323928 NR Description: Required for the hydroxylation of the very long fatty acid (VLCFA), located in the endoplasmic reticulum; Scs7p
  misc_feature (8)..(226): Homolog of NCBI NO: 32404274 NR Description: hypothetical protein [Neurospora crassa]
  misc_feature (8)..(227): Homolog of NCBI NO: 39589620 NR Description: Hypothetical protein CBG12227 [Caenorhabditis
  misc_feature (8)..(227): Homolog of NCBI NO: 17505701 NR Description: Fatty acid hydroxylase (36.3 kD) [Caenorhabditis
  misc_feature (8)..(226): Homolog of NCBI NO: 18447515 NR Description: RE63157p [Drosophila melanogaster]
  misc_feature (8)..(231): Homolog of NCBI NO: 40746791 NR Description: hypothetical protein AN0918.2 [Aspergillus
  misc_feature (6)..(226): Homolog of NCBI NO: 31200833 NR Description: ENSANGP00000014963 [Anopheles gambiae]

SEQ ID NO: 99492 - protein, 162 aa, Arabidopsis thaliana; identical to SEQ ID NO: 29664
  peptide (1)..(162): Ceres Seq. ID no. 13603054
  misc_feature (11)..(154): Pfam Name: Fatty acid hydroxylase Pfam Description: Fatty acid hydroxylase
  misc_feature (1)..(162): Homolog of NCBI NO: 15226828 NR Description: fatty acid hydroxylase (FAH1) [Arabidopsis
  misc_feature (1)..(161): Homolog of NCBI NO: 15233426 NR Description: fatty acid hydroxylase, putative [Arabidopsis
  misc_feature (1)..(160): Homolog of NCBI NO: 34897078 NR Description: putative fatty acid hydroxylase [Oryza sativa
  misc_feature (1)..(158): Homolog of NCBI NO: 6323928 NR Description: Required for the hydroxylation of the very long fatty acid (VLCFA), located in the endoplasmic reticulum; Scs7p
  misc_feature (1)..(151): Homolog of NCBI NO: 32404274 NR Description: hypothetical protein [Neurospora crassa]
  misc_feature (1)..(152): Homolog of NCBI NO: 39589620 NR Description: Hypothetical protein CBG12227 [Caenorhabditis
  misc_feature (1)..(152): Homolog of NCBI NO: 17505701 NR Description: Fatty acid hydroxylase (36.3 kD) [Caenorhabditis
  misc_feature (1)..(151): Homolog of NCBI NO: 18447515 NR Description: RE63157p [Drosophila melanogaster]
  misc_feature (1)..(156): Homolog of NCBI NO: 40746791 NR Description: hypothetical protein AN0918.2 [Aspergillus
  misc_feature (1)..(151): Homolog of NCBI NO: 31200833 NR Description: ENSANGP00000014963 [Anopheles gambiae]

SEQ ID NO: 99493 - protein, 149 aa, Arabidopsis thaliana; identical to SEQ ID NO: 29665
  peptide (1)..(149): Ceres Seq. ID no. 13603055
  misc_feature (1)..(141): Pfam Name: Fatty acid hydroxylase Pfam Description: Fatty acid hydroxylase
  misc_feature (1)..(149): Homolog of NCBI NO: 15226828 NR Description: fatty acid hydroxylase (FAH1) [Arabidopsis
  misc_feature (1)..(148): Homolog of NCBI NO: 15233426 NR Description: fatty acid hydroxylase, putative [Arabidopsis
  misc_feature (1)..(147): Homolog of NCBI NO: 34897078 NR Description: putative fatty acid hydroxylase [Oryza sativa
  misc_feature (1)..(145): Homolog of NCBI NO: 6323928 NR Description: Required for the hydroxylation of the very long fatty acid (VLCFA), located in the endoplasmic reticulum; Scs7p
  misc_feature (1)..(138): Homolog of NCBI NO: 32404274 NR Description: hypothetical protein [Neurospora crassa]
  misc_feature (1)..(139): Homolog of NCBI NO: 39589620 NR Description: Hypothetical protein CBG12227 [Caenorhabditis
  misc_feature (1)..(139): Homolog of NCBI NO: 17505701 NR Description: Fatty acid hydroxylase (36.3 kD) [Caenorhabditis
  misc_feature (1)..(138): Homolog of NCBI NO: 18447515 NR Description: RE63157p [Drosophila melanogaster]
  misc_feature (1)..(143): Homolog of NCBI NO: 40746791 NR Description: hypothetical protein AN0918.2 [Aspergillus
  misc_feature (1)..(138): Homolog of NCBI NO: 31200833 NR Description: ENSANGP00000014963 [Anopheles gambiae]

SEQ ID NO: 99494 - DNA, 1970 bp, Arabidopsis thaliana
  misc_feature (1)..(1970): Ceres Seq. ID no. 13603059
  misc_feature: MA Experiment ID: 108433 Result: Down-regulated in Transcription
  misc_feature: MA Experiment 108433 PARAMETER Experiment Name: At_rhl_Mutant2_cDNA_P Parameter: Age (day) Value: 7
  misc_feature: MA Experiment 108433 PARAMETER Experiment Name: At_rhl_Mutant2_cDNA_P Parameter: Organism Value: A. thaliana
  misc_feature: MA Experiment 108433 PARAMETER Experiment Name: At_rhl_Mutant2_cDNA_P Parameter: Plant Line Value: rhl Mutant vs. wt landsburg
  misc_feature: MA Experiment 108433 PARAMETER Experiment Name: At_rhl_Mutant2_cDNA_P Parameter: Tissue Value: Roots
  misc_feature: MA Experiment ID: 108434 Result: Up-regulated in Transcription
  misc_feature: MA Experiment 108434 PARAMETER Experiment Name: At_Root_Tips_cDNA_P Parameter: Tissue Value: Root Tips
  misc_feature: MA Experiment ID: 108435 Result: Up-regulated in Transcription
  misc_feature: MA Experiment 108435 PARAMETER Experiment Name: At_stm_Mutants_cDNA_P Parameter: Plant Line Value: wt Landsburg vs stm
  misc_feature: MA Experiment 108435 PARAMETER Experiment Name: At_stm_Mutants_cDNA_P Parameter: Tissue Value: Shoot Apical Meristem Region
  misc_feature: MA Experiment ID: 108461 Result: Down-regulated in Transcription
  misc_feature: MA Experiment 108461 PARAMETER Experiment Name: At_Germinating_Seeds_cDNA_P Parameter: Age (day) Value: 1 vs. 0
  misc_feature: MA Experiment 108461 PARAMETER Experiment Name: At_Germinating_Seeds_cDNA_P Parameter: Tissue Value: Germinating Seeds
  misc_feature: MA Experiment ID: 108462 Result: Down-regulated in Transcription
  misc_feature: MA Experiment 108462 PARAMETER Experiment Name: At_Germinating_Seeds_cDNA_P Parameter: Age (day) Value: 2 vs. 0
  misc_feature: MA Experiment 108462 PARAMETER Experiment Name: At_Germinating_Seeds_cDNA_P Parameter: Tissue Value: Germinating Seeds
  misc_feature: MA Experiment ID: 108463 Result: Down-regulated in Transcription
  misc_feature: MA Experiment 108463 PARAMETER Experiment Name: At_Germinating_Seeds_cDNA_P Parameter: Age (day) Value: 3 vs. 0
  misc_feature: MA Experiment 108463 PARAMETER Experiment Name: At_Germinating_Seeds_cDNA_P Parameter: Tissue Value: Germinating Seeds
  misc_feature: MA Experiment ID: 108576 Result: Up-regulated in Transcription
  misc_feature: MA Experiment 108576 PARAMETER Experiment Name: At_42deg_Heat_cDNA_P Parameter: Temperature (deg C) Value: 42 vs. 22
  misc_feature: MA Experiment 108576 PARAMETER Experiment Name: At_42deg_Heat_cDNA_P Parameter: Timepoint (hr) Value: 1
  misc_feature: MA Experiment 108576 PARAMETER Experiment Name: At_42deg_Heat_cDNA_P Parameter: Tissue Value: Aerial
  misc_feature: MA Experiment ID: 108577 Result: Up-regulated in Transcription
  misc_feature: MA Experiment 108577 PARAMETER Experiment Name: At_42deg_Heat_cDNA_P Parameter: Temperature (deg C) Value: 42 vs. 22
  misc_feature: MA Experiment 108577 PARAMETER Experiment Name: At_42deg_Heat_cDNA_P Parameter: Timepoint (hr) Value: 6
  misc_feature: MA Experiment 108577 PARAMETER Experiment Name: At_42deg_Heat_cDNA_P Parameter: Tissue Value: Aerial
  misc_feature: MA Experiment ID: 108595 Result: Down-regulated in Transcription
  misc_feature: MA Experiment 108595 PARAMETER Experiment Name: At_Ler-pi_Ovule_cDNA_P Parameter: Plant Line Value: null
  misc_feature: MA Experiment ID: 20000093 Result: Up-regulated in Transcription
  misc_feature: MA Experiment 20000093 PARAMETER Experiment Name: At_42deg_Heat_cDNA_P Parameter: Temperature (deg C) Value: 42 vs. 22
  misc_feature: MA Experiment 20000093 PARAMETER Experiment Name: At_42deg_Heat_cDNA_P Parameter: Timepoint (hr) Value: 0.5
  misc_feature: MA Experiment 20000093 PARAMETER Experiment Name: At_42deg_Heat_cDNA_P Parameter: Tissue Value: Aerial
  misc_feature: MA Experiment ID: 20000111 Result: Up-regulated in Transcription
  misc_feature: MA Experiment 20000111 PARAMETER Experiment Name: At_42deg_Heat_cDNA_P Parameter: Temperature (deg C) Value: 42 vs. 22
  misc_feature: MA Experiment 20000111 PARAMETER Experiment Name: At_42deg_Heat_cDNA_P Parameter: Timepoint (hr) Value: 6
  misc_feature: MA Experiment 20000111 PARAMETER Experiment Name: At_42deg_Heat_cDNA_P Parameter: Tissue Value: Aerial
  misc_feature: MA Experiment ID: 20000112 Result: Up-regulated in Transcription
  misc_feature: MA Experiment 20000112 PARAMETER Experiment Name: At_42deg_Heat_cDNA_P Parameter: Temperature (deg C) Value: 42 vs. 22
  misc_feature: MA Experiment 20000112 PARAMETER Experiment Name: At_42deg_Heat_cDNA_P Parameter: Timepoint (hr) Value: 2
  misc_feature: MA Experiment 20000112 PARAMETER Experiment Name: At_42deg_Heat_cDNA_P Parameter: Tissue Value: Aerial
  misc_feature: MA Experiment ID: 20000144 Result: Up-regulated in Transcription
  misc_feature: MA Experiment 20000144 PARAMETER Experiment Name: At_42deg_Heat_cDNA_P Parameter: Temperature (deg C) Value: 42 vs. 22
  misc_feature: MA Experiment 20000144 PARAMETER Experiment Name: At_42deg_Heat_cDNA_P Parameter: Timepoint (hr) Value: 1
  misc_feature: MA Experiment 20000144 PARAMETER Experiment Name: At_42deg_Heat_cDNA_P Parameter: Tissue Value: Aerial
  misc_feature: MA Experiment ID: 20000224 Result: Up-regulated in Transcription
  misc_feature: MA Experiment ID: 20000307 Result: Down-regulated in Transcription
  misc_feature: MA Experiment 20000307 PARAMETER Experiment Name: At_Germinating_Seeds_Sub_P Parameter: Age (hr) Value: 24 vs. 0
  misc_feature: MA Experiment 20000307 PARAMETER Experiment Name: At_Germinating_Seeds_Sub_P Parameter: Organism Value: A. thaliana
  misc_feature: MA Experiment 20000307 PARAMETER Experiment Name: At_Germinating_Seeds_Sub_P Parameter: Plant Line Value: WS
  misc_feature: MA Experiment 20000307 PARAMETER Experiment Name: At_Germinating_Seeds_Sub_P Parameter: Tissue Value: Germinating Seeds
  misc_feature: MA Experiment ID: 20000327 Result: Up-regulated in Transcription
  misc_feature: MA Experiment 20000327 PARAMETER Experiment Name: At_42deg_Heat_Sub_P Parameter: Age (day) Value: 14
  misc_feature: MA Experiment 20000327 PARAMETER Experiment Name: At_42deg_Heat_Sub_P Parameter: Organism Value: A. thaliana
  misc_feature: MA Experiment 20000327 PARAMETER Experiment Name: At_42deg_Heat_Sub_P Parameter: Plant Line Value: WS
  misc_feature: MA Experiment 20000327 PARAMETER Experiment Name: At_42deg_Heat_Sub_P Parameter: Temperature (deg C) Value: 42 vs. 22
  misc_feature: MA Experiment 20000327 PARAMETER Experiment Name: At_42deg_Heat_Sub_P Parameter: Timepoint (hr) Value: 1
  misc_feature: MA Experiment 20000327 PARAMETER Experiment Name: At_42deg_Heat_Sub_P Parameter: Tissue Value: Aerial
  misc_feature: MA Experiment ID: 20000328 Result: Up-regulated in Transcription
  misc_feature: MA Experiment 20000328 PARAMETER Experiment Name: At_42deg_Heat_Sub_P Parameter: Age (day) Value: 14
  misc_feature: MA Experiment 20000328 PARAMETER Experiment Name: At_42deg_Heat_Sub_P Parameter: Organism Value: A. thaliana
  misc_feature: MA Experiment 20000328 PARAMETER Experiment Name: At_42deg_Heat_Sub_P Parameter: Plant Line Value: WS
  misc_feature: MA Experiment 20000328 PARAMETER Experiment Name: At_42deg_Heat_Sub_P Parameter: Temperature (deg C) Value: 42 vs. 22
  misc_feature: MA Experiment 20000328 PARAMETER Experiment Name: At_42deg_Heat_Sub_P Parameter: Timepoint (hr) Value: 6
  misc_feature: MA Experiment 20000328 PARAMETER Experiment Name: At_42deg_Heat_Sub_P Parameter: Tissue Value: Aerial
aaaagaaaaaagtttcactctttggaggttggaacttaattccttgattaagaaaccccagaaaaaccctaaacccttgaagcgtctccttctctagttctttgcaagcggaaatgtatcgagtgctatcaaagttatcttcttcaattggctcgtctacttccaggaaactggtttctgggcggattataagtagcagaaactatgcggccaaggatatcagtttcgggatcggagctcgggcagctatgttgcagggtgtatccgaggttgcagaagctgtgaaagtcactatgggaccaaagggaagaaatgtgataattgagagcagttatggcggaccaaagatcacaaaggatggtgtcaccgtggcaaaaagcatatcatttcaagctaaagctaagaacattggtgccgaactcgtcaaacaggttgcaagtgccactaacaaggttgctggagatggtaccacttgtgccactgttttgactcaggcgatactcatcgaaggctgcaagtcggtggctgcaggtgtaaatgtgatggatttgcgtgttggaattaatatggcaattgctgcagttgtctctgatttgaaaagcagagctgttatgattagcaccccagaagagatcacacaggttgccactatatctgcaaatggggagcgtgaaataggggaactaattgcaagagccatggagaaagttggaaaggaaggggttatcactgttgctgatggtaacactttagataacgagctggaagtagtggaaggaatgaagctagccagaggttacatttctccttattttatcacggatgagaagacccagaaatgcgagcttgaaaatcccatcatcctcattcatgagaagaagatttcagacattaactctttgttgaaagttttagaagcggctgtgaaaagtagtagaccacttcttattgtagcagaagatgttgagagtgatgcattagctatgcttattctcaataagcatcatggtgggcttaaggtatgtgctatcaaggctccggggtttggtgacaacaggaaagcaagcttggatgatcttgcagttcttactggtgcagaggttatctctgaggagcgtgggctatctctagaaaaaattcgccctgaattgcttggaactgcgaagaaggttaccgttacccgtgatgacactattatcctacatggtggtggtgataaaaagctaattgaagaaagatgtgaagagttaagatcagccaatgaaaagagtacatccacttttgatcaagagaaaacgcaagaaagactctcaaagctatcaggtggtgttgcagtcttcaaggtgggaggggcaagtgaatctgaagttggagagagaaaagacagagtcactgatgctttaaacgccacaagagcagctgtagaagaaggcatcataccgggtggtggtgtggctctattatatgcgacaaaggctttagacaaccttcaaactgaaaacgaggatcaaagaagaggtgttcagattgttcagaatgctctcaaggctcctgcatttacaatagctgcaaatgccggttacgatggttctttagtggttggcaagttattagagcaagacgattgcaattttggtttcgatgcagccaaaggtaaatatgtggatatggtgaaagctggaatcatagacccagtcaaggtgatcagaaccgccttaaccgatgctgctagcgtttctttgcttttgacaacaacagaggcctcagtgcttgtgaaggcagacgagaacactccaaaccatgtccctgatatggccagcatgggcatgtgatcttgtgacctctacaaaaaaagaaacattcaaatttttatttttctctactaaagttagaaacttttctcgatttaaatttggttgtctggttctatatatattgttacagtgaatttttaatgaattttgttgaat

SEQ ID NO: 99495 - protein, 572 aa, Arabidopsis thaliana
  peptide (1)..(572): Ceres Seq. ID no. 13603060
  misc_feature (53)..(556): Pfam Name: TCP-1/cpn60 chaperonin family Pfam Description: TCP-1/cpn60 chaperonin family
  misc_feature (1)..(572): Homolog of NCBI NO: 18400195 NR Description: chaperonin, putative [Arabidopsis thaliana] chaperonin; similar to GroEL protein [Arabidopsis thaliana]
  misc_feature (1)..(423): Homolog of NCBI NO: 15982717 NR Description: AT3g13860/MCP4_7 [Arabidopsis thaliana]
  misc_feature (1)..(571): Homolog of NCBI NO: 15229559 NR Description: chaperonin (CPN60/HSP60) [Arabidopsis thaliana] Chaperonin CPN60, mitochondrial precursor (HSP60) chaperonin hsp60, mitochondrial precursor (HSP60) [Arabidopsis
  misc_feature (1)..(559): Homolog of NCBI NO: 99676 NR Description: chaperonin hsp60 precursor - Arabidopsis thaliana
  misc_feature (1)..(571): Homolog of NCBI NO: 2493646 NR Description: CHAPERONIN CPN60-2, MITOCHONDRIAL PRECURSOR >gi|309559|gb|AAA33451.1| chaperonin 60 >gi|309561|gb|AAA33452.1|
  misc_feature (1)..(572): Homolog of NCBI NO: 2506275 NR Description: CHAPERONIN CPN60-1, MITOCHONDRIAL PRECURSOR
  misc_feature (1)..(572): Homolog of NCBI NO: 283035 NR Description: chaperonin hsp60 - maize >gi|22248|emb|CAA78100.1|
  misc_feature (1)..(572): Homolog of NCBI NO: 309557 NR Description: chaperonin 60
  misc_feature (1)..(572): Homolog of NCBI NO: 461736 NR Description: CHAPERONIN CPN60-2, MITOCHONDRIAL PRECURSOR
  misc_feature (19)..(572): Homolog of NCBI NO: 4680247 NR Description: chaperonine protein HSP60 [Onchocerca volvulus]
MYRVLSKLSSSIGSSTSRKLVSGRIISSRNYAAKDISFGIGARAAMLQGVSEVAEAVKVTMGPKGRNVIIESSYGGPKITKDGVTVAKSISFQAKAKNIGAELVKQVASATNKVAGDGTTCATVLTQAILIEGCKSVAAGVNVMDLRVGINMAIAAVVSDLKSRAVMISTPEEITQVATISANGEREIGELIARAMEKVGKEGVITVADGNTLDNELEVVEGMKLARGYISPYFITDEKTQKCELENPIILIHEKKISDINSLLKVLEAAVKSSRPLLIVAEDVESDALAMLILNKHHGGLKVCAIKAPGFGDNRKASLDDLAVLTGAEVISEERGLSLEKIRPELLGTAKKVTVTRDDTIILHGGGDKKLIEERCEELRSANEKSTSTFDQEKTQERLSKLSGGVAVFKVGGASESEVGERKDRVTDALNATRAAVEEGIIPGGGVALLYATKALDNLQTENEDQRRGVQIVQNALKAPAFTIAANAGYDGSLVVGKLLEQDDCNFGFDAAKGKYVDMVKAGIIDPVKVIRTALTDAASVSLLLTTTEASVLVKADENTPNHVPDMASMGM

SEQ ID NO: 99496 - protein, 527 aa, Arabidopsis thaliana
  peptide (1)..(527): Ceres Seq. ID no. 13603061
  misc_feature (8)..(511): Pfam Name: TCP-1/cpn60 chaperonin family Pfam Description: TCP-1/cpn60 chaperonin family
  misc_feature (1)..(527): Homolog of NCBI NO: 18400195 NR Description: chaperonin, putative [Arabidopsis thaliana] chaperonin; similar to GroEL protein [Arabidopsis thaliana]
  misc_feature (1)..(378): Homolog of NCBI NO: 15982717 NR Description: AT3g13860/MCP4_7 [Arabidopsis thaliana]
  misc_feature (1)..(526): Homolog of NCBI NO: 15229559 NR Description: chaperonin (CPN60/HSP60) [Arabidopsis thaliana] Chaperonin CPN60, mitochondrial precursor (HSP60) chaperonin hsp60, mitochondrial precursor (HSP60) [Arabidopsis
  misc_feature (1)..(514): Homolog of NCBI NO: 99676 NR Description: chaperonin hsp60 precursor - Arabidopsis thaliana
  misc_feature (1)..(526): Homolog of NCBI NO: 2493646 NR Description: CHAPERONIN CPN60-2, MITOCHONDRIAL PRECURSOR >gi|309559|gb|AAA33451.1| chaperonin 60 >gi|309561|gb|AAA33452.1|
  misc_feature (1)..(527): Homolog of NCBI NO: 2506275 NR Description: CHAPERONIN CPN60-1, MITOCHONDRIAL PRECURSOR
  misc_feature (1)..(527): Homolog of NCBI NO: 283035 NR Description: chaperonin hsp60 - maize >gi|22248|emb|CAA78100.1|
  misc_feature (1)..(527): Homolog of NCBI NO: 309557 NR Description: chaperonin 60
  misc_feature (1)..(527): Homolog of NCBI NO: 461736 NR Description: CHAPERONIN CPN60-2, MITOCHONDRIAL PRECURSOR
  misc_feature (1)..(527): Homolog of NCBI NO: 4680247 NR Description: chaperonine protein HSP60 [Onchocerca volvulus]
MLQGVSEVAEAVKVTMGPKGRNVIIESSYGGPKITKDGVTVAKSISFQAKAKNIGAELVKQVASATNKVAGDGTTCATVLTQAILIEGCKSVAAGVNVMDLRVGINMAIAAVVSDLKSRAVMISTPEEITQVATISANGEREIGELIARAMEKVGKEGVITVADGNTLDNELEVVEGMKLARGYISPYFITDEKTQKCELENPIILIHEKKISDINSLLKVLEAAVKSSRPLLIVAEDVESDALAMLILNKHHGGLKVCAIKAPGFGDNRKASLDDLAVLTGAEVISEERGLSLEKIRPELLGTAKKVTVTRDDTIILHGGGDKKLIEERCEELRSANEKSTSTFDQEKTQERLSKLSGGVAVFKVGGASESEVGERKDRVTDALNATRAAVEEGIIPGGGVALLYATKALDNLQTENEDQRRGVQIVQNALKAPAFTIAANAGYDGSLVVGKLLEQDDCNFGFDAAKGKYVDMVKAGIIDPVKVIRTALTDAASVSLLLTTTEASVLVKADENTPNHVPDMASMGM

SEQ ID NO: 99497 - protein, 512 aa, Arabidopsis thaliana
  peptide (1)..(512): Ceres Seq. ID no. 13603062
  misc_feature (1)..(496): Pfam Name: TCP-1/cpn60 chaperonin family Pfam Description: TCP-1/cpn60 chaperonin family
  misc_feature (1)..(512): Homolog of NCBI NO: 18400195 NR Description: chaperonin, putative [Arabidopsis thaliana] chaperonin; similar to GroEL protein [Arabidopsis thaliana]
  misc_feature (1)..(363): Homolog of NCBI NO: 15982717 NR Description: AT3g13860/MCP4_7 [Arabidopsis thaliana]
  misc_feature (1)..(511): Homolog of NCBI NO: 15229559 NR Description: chaperonin (CPN60/HSP60) [Arabidopsis thaliana] Chaperonin CPN60, mitochondrial precursor (HSP60) chaperonin hsp60, mitochondrial precursor (HSP60) [Arabidopsis
  misc_feature (1)..(499): Homolog of NCBI NO: 99676 NR Description: chaperonin hsp60 precursor - Arabidopsis thaliana
  misc_feature (1)..(511): Homolog of NCBI NO: 2493646 NR Description: CHAPERONIN CPN60-2, MITOCHONDRIAL PRECURSOR >gi|309559|gb|AAA33451.1| chaperonin 60 >gi|309561|gb|AAA33452.1|
  misc_feature (1)..(512): Homolog of NCBI NO: 2506275 NR Description: CHAPERONIN CPN60-1, MITOCHONDRIAL PRECURSOR
  misc_feature (1)..(512): Homolog of NCBI NO: 283035 NR Description: chaperonin hsp60 - maize >gi|22248|emb|CAA78100.1|
  misc_feature (1)..(512): Homolog of NCBI NO: 309557 NR Description: chaperonin 60
  misc_feature (1)..(512): Homolog of NCBI NO: 461736 NR Description: CHAPERONIN CPN60-2, MITOCHONDRIAL PRECURSOR
  misc_feature (1)..(512): Homolog of NCBI NO: 4680247 NR Description: chaperonine protein HSP60 [Onchocerca volvulus]
MGPKGRNVIIESSYGGPKITKDGVTVAKSISFQAKAKNIGAELVKQVASATNKVAGDGTTCATVLTQAILIEGCKSVAAGVNVMDLRVGINMAIAAVVSDLKSRAVMISTPEEITQVATISANGEREIGELIARAMEKVGKEGVITVADGNTLDNELEVVEGMKLARGYISPYFITDEKTQKCELENPIILIHEKKISDINSLLKVLEAAVKSSRPLLIVAEDVESDALAMLILNKHHGGLKVCAIKAPGFGDNRKASLDDLAVLTGAEVISEERGLSLEKIRPELLGTAKKVTVTRDDTIILHGGGDKKLIEERCEELRSANEKSTSTFDQEKTQERLSKLSGGVAVFKVGGASESEVGERKDRVTDALNATRAAVEEGIIPGGGVALLYATKALDNLQTENEDQRRGVQIVQNALKAPAFTIAANAGYDGSLVVGKLLEQDDCNFGFDAAKGKYVDMVKAGIIDPVKVIRTALTDAASVSLLLTTTEASVLVKADENTPNHVPDMASMGM

SEQ ID NO: 99498 - DNA, 1719 bp, Arabidopsis thaliana
  misc_feature (1)..(1719): Ceres Seq. ID no. 13603083
  misc_feature: MA Experiment ID: 108569 Result: Up-regulated in Transcription
  misc_feature: MA Experiment 108569 PARAMETER Experiment Name: At_0.001%_MeJA__cDNA_P Parameter: Timepoint (hr) Value: 6
  misc_feature: MA Experiment 108569 PARAMETER Experiment Name: At_0.001%_MeJA__cDNA_P Parameter: Tissue Value: Aerial
  misc_feature: MA Experiment 108569 PARAMETER Experiment Name: At_0.001%_MeJA__cDNA_P Parameter: Treatment Value: 0.001% MeJA vs. No Treatment
  misc_feature: MA Experiment ID: 108573 Result: Up-regulated in Transcription
  misc_feature: MA Experiment 108573 PARAMETER Experiment Name: At_Drought_cDNA_P Parameter: Timepoint (hr) Value: 6
  misc_feature: MA Experiment 108573 PARAMETER Experiment Name: At_Drought_cDNA_P Parameter: Tissue Value: Aerial
  misc_feature: MA Experiment 108573 PARAMETER Experiment Name: At_Drought_cDNA_P Parameter: Treatment Value: Drought vs. No Drought
  misc_feature: MA Experiment ID: 20000185 Result: Down-regulated in Transcription
  misc_feature: MA Experiment 20000185 PARAMETER Experiment Name: At_Roots__P Parameter: Age (day) Value: 7 vs. 21
  misc_feature: MA Experiment 20000185 PARAMETER Experiment Name: At_Roots__P Parameter: Organism Value: A. thaliana
  misc_feature: MA Experiment 20000185 PARAMETER Experiment Name: At_Roots__P Parameter: Tissue Value: Roots vs. Whole Plant
  misc_feature: MA Experiment ID: 20000227 Result: Down-regulated in Transcription
  misc_feature: MA Experiment 20000227 PARAMETER Experiment Name: At_Root-Tips-vs-Tops_P Parameter: Tissue Value: Root Tips vs. Root Tops
  misc_feature: MA Experiment ID: 20000234 Result: Down-regulated in Transcription
  misc_feature: MA Experiment 20000234 PARAMETER Experiment Name: At_Siliques_P Parameter: Age (day) Value: 21
  misc_feature: MA Experiment 20000234 PARAMETER Experiment Name: At_Siliques_P Parameter: Organism Value: A. thaliana
  misc_feature: MA Experiment 20000234 PARAMETER Experiment Name: At_Siliques_P Parameter: Plant Line Value: WS
  misc_feature: MA Experiment 20000234 PARAMETER Experiment Name: At_Siliques_P Parameter: Tissue Value: Less Than 5mm Siliques vs. Whole Plant
  misc_feature: MA Experiment ID: 20000264 Result: Down-regulated in Transcription
  misc_feature: MA Experiment 20000264 PARAMETER Experiment Name: At_Open_Flower_P Parameter: Age (day) Value: 21
  misc_feature: MA Experiment 20000264 PARAMETER Experiment Name: At_Open_Flower_P Parameter: Plant Line Value: WS
  misc_feature: MA Experiment 20000264 PARAMETER Experiment Name: At_Open_Flower_P Parameter: Tissue Value: Open Flower vs. Whole Plant
  misc_feature: MA Experiment ID: 20000265 Result: Down-regulated in Transcription
  misc_feature: MA Experiment 20000265 PARAMETER Experiment Name: At_Open_Flower_P Parameter: Age (day) Value: 21
  misc_feature: MA Experiment 20000265 PARAMETER Experiment Name: At_Open_Flower_P Parameter: Plant Line Value: WS
  misc_feature: MA Experiment 20000265 PARAMETER Experiment Name: At_Open_Flower_P Parameter: Tissue Value: Closed Flower vs. Whole Plant
  misc_feature: MA Experiment ID: 20001451 Result: Up-regulated in Transcription
  misc_feature: MA Experiment 20001451 PARAMETER Experiment Name: At_Far-red-induction_P Parameter: Age (day) Value: 7
  misc_feature: MA Experiment 20001451 PARAMETER Experiment Name: At_Far-red-induction_P Parameter: Light Value: Far-red vs. White
  misc_feature: MA Experiment 20001451 PARAMETER Experiment Name: At_Far-red-induction_P Parameter: Organism Value: A. thaliana
  misc_feature: MA Experiment 20001451 PARAMETER Experiment Name: At_Far-red-induction_P Parameter: Plant Line Value: Columbia
  misc_feature: MA Experiment 20001451 PARAMETER Experiment Name: At_Far-red-induction_P Parameter: Timepoint (hr) Value: 24
  misc_feature: MA Experiment 20001451 PARAMETER Experiment Name: At_Far-red-induction_P Parameter: Tissue Value: Whole Plant
  misc_feature: MA Experiment ID: 20001560 Result: Down-regulated in Transcription
  misc_feature: MA Experiment 20001560 PARAMETER Experiment Name: At_Drought_Soil_Dry_P Parameter: Age (day) Value: 28
  misc_feature: MA Experiment 20001560 PARAMETER Experiment Name: At_Drought_Soil_Dry_P Parameter: Organism Value: A. thaliana
  misc_feature: MA Experiment 20001560 PARAMETER Experiment Name: At_Drought_Soil_Dry_P Parameter: Plant Line Value: WS
  misc_feature: MA Experiment 20001560 PARAMETER Experiment Name: At_Drought_Soil_Dry_P Parameter: Post Timepoint (hr) Value: None
  misc_feature: MA Experiment 20001560 PARAMETER Experiment Name: At_Drought_Soil_Dry_P Parameter: Post-Treatment Value: None
  misc_feature: MA Experiment 20001560 PARAMETER Experiment Name: At_Drought_Soil_Dry_P Parameter: Timepoint (day) Value: 14
  misc_feature: MA Experiment 20001560 PARAMETER Experiment Name: At_Drought_Soil_Dry_P Parameter: Treatment Value: Drought vs. No Drought
atcttctacggacagcttctttctctttcctctctgattttttttttctctttctacctttttctttttttattttctttcttttttttttgttagtttttttttttttctttcttcatctcgtgaacgatatagtacctgaaccctagcggaggaaaatcaaaaattgtctaggagaaacaaacagagatatctttctttctttttatcagtggggaaaaaaaatgcagaatccgagactgaagcaacatcagcagcaacaacaacaacaagctatgatgcagcaacaagctctgatgcagcaacactctctttaccatcctggtgttttggctcctcctcagttagagcctgttccaagtggaaaccttcctcctggttttgatcccagtacttgccgtagcgtgtatgttggaaacatccatacacaggtcacagagcctttgcttcaagagatttttacaagcactggccctgttgaaagcagtaaactcatcagaaaggataagtcatcatatggatttgttcactactttgatcgaagatccgctgctctggctatactgtctctgaacggaaggcatctgtttggacagcctatcaaagtcaattgggcgtatgccactggtcagagggaagatacatcaagtcatttcaacatttttgttggagatctcagtccagaggtcactgatgcaacattatatcaaagcttttctgtcttttccagttgttcggatgcgagagttatgtgggaccaaaaaactgggcgctcgagaggctttgggtttgtttccttccgcaatcaacaggatgctcaaactgccattaatgagatgaatggtaagtggttaagtagcagacaaatcagatgcaactgggccacgaagggcgctacttctggtgatgataagctcagttctgatggaaaaagtgttgtggaacttacaactggctcatcagaggatggtaaagagacattaaatgaggaaacacctgaaaataattctcagtttaccactgtttatgtgggaaaccttgctccagaggtaactcagcttgatctacaccgttacttccatgctcttggcgctggagttattgaggaggtccgtgtccaacgagacaaaggctttggtttcgtgagatataacactcatcccgaagctgctcttgctattcagatgggtaacactcagccttacctctttaacagacagataaagtgctcatggggaaacaagccaactccaccaggtacagcctcaaacccacttcccccacctgccccagctccagttcctggtctatctgcagctgatctcctaaactatgagaggcaattggcacttagcaagatggcaagtgtgaatgcgttaatgcatcaacagggtcaacaccctctaaggcaggctcatggaataaatgccgctggagcaactgcagccatgtatgatggtggctttcagaatgtagccgccgcacagcaactcatgtactatcagtaataaacctcagttcgtggcgccgatctcaagtttcaatctctttgctttttctcttttttttttgtttgtctagaacttgtttgtgtgtgtctgtttgtctctcacttaagttatctatataaagttttatctgcagttgtatgattagttatgtattcccatggattgtaagacaagcgaattacattcaataaaagggatttggatatcc

SEQ ID NO: 99499 - protein, 427 aa, Arabidopsis thaliana; identical to SEQ ID NO: 24120
  peptide (1)..(427): Ceres Seq. ID no. 13603084
  misc_feature (146)..(217): Pfam Name: RNA recognition motif. (a.k.a. RRM, RBD, or RNP domain) Pfam Description: RNA recognition motif. (a.k.a. RRM, RBD, or RNP
  misc_feature (1)..(427): Homolog of NCBI NO: 15231783 NR Description: oligouridylate binding protein (UBP1), putative thaliana] >gi|9294635|dbj|BAB02974.1| RNA binding protein
  misc_feature (1)..(427): Homolog of NCBI NO: 21593280 NR Description: oligouridylate binding protein, putative
  misc_feature (1)..(427): Homolog of NCBI NO: 15221031 NR Description: oligouridylate binding protein (UBP1), putative
  misc_feature (1)..(427): Homolog of NCBI NO: 30695647 NR Description: oligouridylate binding protein (UBP1), putative
  misc_feature (5)..(427): Homolog of NCBI NO: 18394471 NR Description: oligouridylate binding protein (UBP1), putative thaliana] >gi|9665134|gb|AAF97318.1|AC007843_21 Putative RNA
  misc_feature (40)..(208): Homolog of NCBI NO: 25402821 NR Description: protein F1L3.2 [imported] - Arabidopsis thaliana
  misc_feature (206)..(339): Homolog of NCBI NO: 25402821 NR Description: protein F1L3.2 [imported] - Arabidopsis thaliana
  misc_feature (333)..(427): Homolog of NCBI NO: 25402821 NR Description: protein F1L3.2 [imported] - Arabidopsis thaliana
  misc_feature (5)..(41): Homolog of NCBI NO: 25402821 NR Description: protein F1L3.2 [imported] - Arabidopsis thaliana
  misc_feature (12)..(426): Homolog of NCBI NO: 6996560 NR Description: oligouridylate binding protein [Nicotiana

SEQ ID NO: 99500 - protein, 410 aa, Arabidopsis thaliana; identical to SEQ ID NO: 24121
  peptide (1)..(410): Ceres Seq. ID no. 13603085
  misc_feature (129)..(200): Pfam Name: RNA recognition motif. (a.k.a. RRM, RBD, or RNP domain) Pfam Description: RNA recognition motif. (a.k.a. RRM, RBD, or RNP
  misc_feature (1)..(410): Homolog of NCBI NO: 15231783 NR Description: oligouridylate binding protein (UBP1), putative thaliana] >gi|9294635|dbj|BAB02974.1| RNA binding protein
  misc_feature (1)..(410): Homolog of NCBI NO: 21593280 NR Description: oligouridylate binding protein, putative
  misc_feature (1)..(410): Homolog of NCBI NO: 15221031 NR Description: oligouridylate binding protein (UBP1), putative
  misc_feature (1)..(410): Homolog of NCBI NO: 30695647 NR Description: oligouridylate binding protein (UBP1), putative
  misc_feature (1)..(410): Homolog of NCBI NO: 18394471 NR Description: oligouridylate binding protein (UBP1), putative thaliana] >gi|9665134|gb|AAF97318.1|AC007843_21 Putative RNA
  misc_feature (23)..(191): Homolog of NCBI NO: 25402821 NR Description: protein F1L3.2 [imported] - Arabidopsis thaliana
  misc_feature (189)..(322): Homolog of NCBI NO: 25402821 NR Description: protein F1L3.2 [imported] - Arabidopsis thaliana
  misc_feature (316)..(410): Homolog of NCBI NO: 25402821 NR Description: protein F1L3.2 [imported] - Arabidopsis thaliana
  misc_feature (1)..(24): Homolog of NCBI NO: 25402821 NR Description: protein F1L3.2 [imported] - Arabidopsis thaliana
  misc_feature (1)..(409): Homolog of NCBI NO: 6996560 NR Description: oligouridylate binding protein [Nicotiana

SEQ ID NO: 99501 - protein, 409 aa, Arabidopsis thaliana; identical to SEQ ID NO: 24122
  peptide (1)..(409): Ceres Seq. ID no. 13603086
  misc_feature (128)..(199): Pfam Name: RNA recognition motif. (a.k.a. RRM, RBD, or RNP domain) Pfam Description: RNA recognition motif. (a.k.a. RRM, RBD, or RNP
  misc_feature (1)..(409): Homolog of NCBI NO: 15231783 NR Description: oligouridylate binding protein (UBP1), putative thaliana] >gi|9294635|dbj|BAB02974.1| RNA binding protein
  misc_feature (1)..(409): Homolog of NCBI NO: 21593280 NR Description: oligouridylate binding protein, putative
  misc_feature (1)..(409): Homolog of NCBI NO: 15221031 NR Description: oligouridylate binding protein (UBP1), putative
  misc_feature (1)..(409): Homolog of NCBI NO: 30695647 NR Description: oligouridylate binding protein (UBP1), putative
  misc_feature (1)..(409): Homolog of NCBI NO: 18394471 NR Description: oligouridylate binding protein (UBP1), putative thaliana] >gi|9665134|gb|AAF97318.1|AC007843_21 Putative RNA
  misc_feature (22)..(190): Homolog of NCBI NO: 25402821 NR Description: protein F1L3.2 [imported] - Arabidopsis thaliana
  misc_feature (188)..(321): Homolog of NCBI NO: 25402821 NR Description: protein F1L3.2 [imported] - Arabidopsis thaliana
  misc_feature (315)..(409): Homolog of NCBI NO: 25402821 NR Description: protein F1L3.2 [imported] - Arabidopsis thaliana
  misc_feature (1)..(23): Homolog of NCBI NO: 25402821 NR Description: protein F1L3.2 [imported] - Arabidopsis thaliana
  misc_feature (1)..(408): Homolog of NCBI NO: 6996560 NR Description: oligouridylate binding protein [Nicotiana

SEQ ID NO: 99502 - DNA, 866 bp, Arabidopsis thaliana
  misc_feature (1)..(866): Ceres Seq. ID no. 13603091
  misc_feature: MA Experiment ID: 108433 Result: Down-regulated in Transcription
  misc_feature: MA Experiment 108433 PARAMETER Experiment Name: At_rhl_Mutant2_cDNA_P Parameter: Age (day) Value: 7
  misc_feature: MA Experiment 108433 PARAMETER Experiment Name: At_rhl_Mutant2_cDNA_P Parameter: Organism Value: A. thaliana
  misc_feature: MA Experiment 108433 PARAMETER Experiment Name: At_rhl_Mutant2_cDNA_P Parameter: Plant Line Value: rhl Mutant vs. wt landsburg
  misc_feature: MA Experiment 108433 PARAMETER Experiment Name: At_rhl_Mutant2_cDNA_P Parameter: Tissue Value: Roots
  misc_feature: MA Experiment ID: 108434 Result: Up-regulated in Transcription
  misc_feature: MA Experiment 108434 PARAMETER Experiment Name: At_Root_Tips_cDNA_P Parameter: Tissue Value: Root Tips
  misc_feature: MA Experiment ID: 108461 Result: Up-regulated in Transcription
  misc_feature: MA Experiment 108461 PARAMETER Experiment Name: At_Germinating_Seeds_cDNA_P Parameter: Age (day) Value: 1 vs. 0
  misc_feature: MA Experiment 108461 PARAMETER Experiment Name: At_Germinating_Seeds_cDNA_P Parameter: Tissue Value: Germinating Seeds
  misc_feature: MA Experiment ID: 108462 Result: Up-regulated in Transcription
  misc_feature: MA Experiment 108462 PARAMETER Experiment Name: At_Germinating_Seeds_cDNA_P Parameter: Age (day) Value: 2 vs. 0
  misc_feature: MA Experiment 108462 PARAMETER Experiment Name: At_Germinating_Seeds_cDNA_P Parameter: Tissue Value: Germinating Seeds
  misc_feature: MA Experiment ID: 20000180 Result: Up-regulated in Transcription
  misc_feature: MA Experiment 20000180 PARAMETER Experiment Name: At_Germinating_Seeds_P Parameter: Age (hr) Value: 24 vs. 0
  misc_feature: MA Experiment 20000180 PARAMETER Experiment Name: At_Germinating_Seeds_P Parameter: Tissue Value: Germinating Seeds
  misc_feature: MA Experiment ID: 20000234 Result: Up-regulated in Transcription
  misc_feature: MA Experiment 20000234 PARAMETER Experiment Name: At_Siliques_P Parameter: Age (day) Value: 21
  misc_feature: MA Experiment 20000234 PARAMETER Experiment Name: At_Siliques_P Parameter: Organism Value: A. thaliana
  misc_feature: MA Experiment 20000234 PARAMETER Experiment Name: At_Siliques_P Parameter: Plant Line Value: WS
  misc_feature: MA Experiment 20000234 PARAMETER Experiment Name: At_Siliques_P Parameter: Tissue Value: Less Than 5mm Siliques vs. Whole Plant
  misc_feature: MA Experiment ID: 20000264 Result: Up-regulated in Transcription
  misc_feature: MA Experiment 20000264 PARAMETER Experiment Name: At_Open_Flower_P Parameter: Age (day) Value: 21
  misc_feature: MA Experiment 20000264 PARAMETER Experiment Name: At_Open_Flower_P Parameter: Plant Line Value: WS
  misc_feature: MA Experiment 20000264 PARAMETER Experiment Name: At_Open_Flower_P Parameter: Tissue Value: Open Flower vs. Whole Plant
  misc_feature: MA Experiment ID: 20000265 Result: Up-regulated in Transcription
  misc_feature: MA Experiment 20000265 PARAMETER Experiment Name: At_Open_Flower_P Parameter: Age (day) Value: 21
  misc_feature: MA Experiment 20000265 PARAMETER Experiment Name: At_Open_Flower_P Parameter: Plant Line Value: WS
  misc_feature: MA Experiment 20000265 PARAMETER Experiment Name: At_Open_Flower_P Parameter: Tissue Value: Closed Flower vs. Whole Plant
  misc_feature: MA Experiment ID: 20000286 Result: Up-regulated in Transcription
  misc_feature: MA Experiment 20000286 PARAMETER Experiment Name: At_Open_Flower_P Parameter: Age (day) Value: 21
  misc_feature: MA Experiment 20000286 PARAMETER Experiment Name: At_Open_Flower_P Parameter: Plant Line Value: WS
  misc_feature: MA Experiment 20000286 PARAMETER Experiment Name: At_Open_Flower_P Parameter: Tissue Value: Half Open vs. Whole Plant
  misc_feature: MA Experiment ID: 20000445 Result: Down-regulated in Transcription
  misc_feature: MA Experiment 20000445 PARAMETER Experiment Name: At_100uM_NAA__P Parameter: Age (day) Value: 14
  misc_feature: MA Experiment 20000445 PARAMETER Experiment Name: At_100uM_NAA__P Parameter: Organism Value: A. thaliana
  misc_feature: MA Experiment 20000445 PARAMETER Experiment Name: At_100uM_NAA__P Parameter: Plant Line Value: WS
  misc_feature: MA Experiment 20000445 PARAMETER Experiment Name: At_100uM_NAA__P Parameter: Timepoint (hr) Value: 6
  misc_feature: MA Experiment 20000445 PARAMETER Experiment Name: At_100uM_NAA__P Parameter: Tissue Value: Aerial
  misc_feature: MA Experiment 20000445 PARAMETER Experiment Name: At_100uM_NAA__P Parameter: Treatment Value: 100uM NAA vs. No Treatment
  misc_feature: MA Experiment ID: 20000495 Result: Up-regulated in Transcription
  misc_feature: MA Experiment 20000495 PARAMETER Experiment Name: At_Guard_Cells_P Parameter: Harvest Date Value: 8/2/2002
  misc_feature: MA Experiment 20000495 PARAMETER Experiment Name: At_Guard_Cells_P Parameter: Organism Value: A. thaliana
  misc_feature: MA Experiment 20000495 PARAMETER Experiment Name: At_Guard_Cells_P Parameter: Tissue Value: Guard Cells vs. Leaves
  misc_feature: MA Experiment ID: 20001450 Result: Down-regulated in Transcription
  misc_feature: MA Experiment 20001450 PARAMETER Experiment Name: At_Far-red-induction_P Parameter: Age (day) Value: 7
  misc_feature: MA Experiment 20001450 PARAMETER Experiment Name: At_Far-red-induction_P Parameter: Light Value: Far-red vs. White
  misc_feature: MA Experiment 20001450 PARAMETER Experiment Name: At_Far-red-induction_P Parameter: Organism Value: A. thaliana
  misc_feature: MA Experiment 20001450 PARAMETER Experiment Name: At_Far-red-induction_P Parameter: Plant Line Value: Columbia
  misc_feature: MA Experiment 20001450 PARAMETER Experiment Name: At_Far-red-induction_P Parameter: Timepoint (hr) Value: 8
  misc_feature: MA Experiment 20001450 PARAMETER Experiment Name: At_Far-red-induction_P Parameter: Tissue Value: Whole Plant
  misc_feature: MA Experiment ID: 20001557 Result: Down-regulated in Transcription
  misc_feature: MA Experiment 20001557 PARAMETER Experiment Name: At_Drought_Soil_Dry_P Parameter: Age (day) Value: 27
  misc_feature: MA Experiment 20001557 PARAMETER Experiment Name: At_Drought_Soil_Dry_P Parameter: Organism Value: A. thaliana
  misc_feature: MA Experiment 20001557 PARAMETER Experiment Name: At_Drought_Soil_Dry_P Parameter: Plant Line Value: WS
  misc_feature: MA Experiment 20001557 PARAMETER Experiment Name: At_Drought_Soil_Dry_P Parameter: Post Timepoint (hr) Value: 3
  misc_feature: MA Experiment 20001557 PARAMETER Experiment Name: At_Drought_Soil_Dry_P Parameter: Post-Treatment Value: Re-Water vs. No Drought
  misc_feature: MA Experiment 20001557 PARAMETER Experiment Name: At_Drought_Soil_Dry_P Parameter: Timepoint (day) Value: 13
  misc_feature: MA Experiment 20001557 PARAMETER Experiment Name: At_Drought_Soil_Dry_P Parameter: Treatment Value: Drought vs. No Drought
attatttcgtcagaacaacattgaaaagttaccgttaaacactctaagcgctcttcttcatcttcttatacacttctcttccaacaagaatctcaccaagaaacttcttcacttttacaaagttaaaaccatatggcgaacatgaacgctcttcaacaaatgatcttcccagacgagaacgctccaattcatcgcaaaaagtctgtcactgctgcttctgtgaaatccaaagggactgtacttggtcagaagaaacctggaggagctcgtaaggctctgaatgatattacaaacaagtctgggattcatgcgaaagctgctgcttcttcaaagaacaagcaaattgcttctgctgctgtgaaagagattgatatagctggggaaaggtttttacatgatcacagcaaatgcatcaaagaacagcaaaatctttgggatgatcactactctgctgatctcatgctacttcatcatggttccagcatcaaggagaagcatctcaattgggacattgaaaagatggatgctaaggacgatctgacttacgaagaaccagaagagatggcatcgcccaagttttctgattggctgaagaactcgactccatggcgctctccaatccgtcatggctctatgatgccttccactcctctggcttggcggttcgattcatgcgaattcacacttaaagaagactctgacgacctcttctgagtttctgtttcttaatgtcttcaaaattcatccttcagatgaagtagtaatagtagtagtggcgtttatcttttgttcagctcttcatgaatcactctgtgtctatcactttgtaactggtttcaggaaataaagttggtatcttttcaagt

SEQ ID NO: 99503 - protein, 193 aa, Arabidopsis thaliana
  peptide (1)..(193): Ceres Seq. ID no. 13603092
  misc_feature (1)..(193): Homolog of NCBI NO: 18400304 NR Description: expressed protein [Arabidopsis thaliana]
  misc_feature (1)..(193): Homolog of NCBI NO: 27808526 NR Description: At3g14190 [Arabidopsis thaliana]
  misc_feature (1)..(193): Homolog of NCBI NO: 21536825 NR Description: unknown [Arabidopsis thaliana]
  misc_feature (1)..(190): Homolog of NCBI NO: 18416846 NR Description: hypothetical protein [Arabidopsis thaliana]
MANMNALQQMIFPDENAPIHRKKSVTAASVKSKGTVLGQKKPGGARKALNDITNKSGIHAKAAASSKNKQIASAAVKEIDIAGERFLHDHSKCIKEQQNLWDDHYSADLMLLHHGSSIKEKHLNWDIEKMDAKDDLTYEEPEEMASPKFSDWLKNSTPWRSPIRHGSMMPSTPLAWRFDSCEFTLKEDSDDLF

SEQ ID NO: 99504 - protein, 190 aa, Arabidopsis thaliana
  peptide (1)..(190): Ceres Seq. ID no. 13603093
  misc_feature (1)..(190): Homolog of NCBI NO: 18400304 NR Description: expressed protein [Arabidopsis thaliana]
  misc_feature (1)..(190): Homolog of NCBI NO: 27808526 NR Description: At3g14190 [Arabidopsis thaliana]
  misc_feature (1)..(190): Homolog of NCBI NO: 21536825 NR Description: unknown [Arabidopsis thaliana]
  misc_feature (1)..(187): Homolog of NCBI NO: 18416846 NR Description: hypothetical protein [Arabidopsis thaliana]
MNALQQMIFPDENAPIHRKKSVTAASVKSKGTVLGQKKPGGARKALNDITNKSGIHAKAAASSKNKQIASAAVKEIDIAGERFLHDHSKCIKEQQNLWDDHYSADLMLLHHGSSIKEKHLNWDIEKMDAKDDLTYEEPEEMASPKFSDWLKNSTPWRSPIRHGSMMPSTPLAWRFDSCEFTLKEDSDDLF

SEQ ID NO: 99505 - protein, 184 aa, Arabidopsis thaliana
  peptide (1)..(184): Ceres Seq. ID no. 13603094
  misc_feature (1)..(184): Homolog of NCBI NO: 18400304 NR Description: expressed protein [Arabidopsis thaliana]
  misc_feature (1)..(184): Homolog of NCBI NO: 27808526 NR Description: At3g14190 [Arabidopsis thaliana]
  misc_feature (1)..(184): Homolog of NCBI NO: 21536825 NR Description: unknown [Arabidopsis thaliana]
  misc_feature (1)..(181): Homolog of NCBI NO: 18416846 NR Description: hypothetical protein [Arabidopsis thaliana]
MIFPDENAPIHRKKSVTAASVKSKGTVLGQKKPGGARKALNDITNKSGIHAKAAASSKNKQIASAAVKEIDIAGERFLHDHSKCIKEQQNLWDDHYSADLMLLHHGSSIKEKHLNWDIEKMDAKDDLTYEEPEEMASPKFSDWLKNSTPWRSPIRHGSMMPSTPLAWRFDSCEFTLKEDSDDLF

SEQ ID NO: 99506 - DNA, 1636 bp, Arabidopsis thaliana
  misc_feature (1)..(1636): Ceres Seq. ID no. 13603095
  misc_feature: MA Experiment ID: 108434 Result: Down-regulated in Transcription
  misc_feature: MA Experiment 108434 PARAMETER Experiment Name: At_Root_Tips_cDNA_P Parameter: Tissue Value: Root Tips
  misc_feature: MA Experiment ID: 108462 Result: Down-regulated in Transcription
  misc_feature: MA Experiment 108462 PARAMETER Experiment Name: At_Germinating_Seeds_cDNA_P Parameter: Age (day) Value: 2 vs. 0
  misc_feature: MA Experiment 108462 PARAMETER Experiment Name: At_Germinating_Seeds_cDNA_P Parameter: Tissue Value: Germinating Seeds
  misc_feature: MA Experiment ID: 108463 Result: Down-regulated in Transcription
  misc_feature: MA Experiment 108463 PARAMETER Experiment Name: At_Germinating_Seeds_cDNA_P Parameter: Age (day) Value: 3 vs. 0
  misc_feature: MA Experiment 108463 PARAMETER Experiment Name: At_Germinating_Seeds_cDNA_P Parameter: Tissue Value: Germinating Seeds
  misc_feature: MA Experiment ID: 108464 Result: Down-regulated in Transcription
  misc_feature: MA Experiment 108464 PARAMETER Experiment Name: At_Germinating_Seeds_cDNA_P Parameter: Age (day) Value: 4 vs. 0
  misc_feature: MA Experiment 108464 PARAMETER Experiment Name: At_Germinating_Seeds_cDNA_P Parameter: Tissue Value: Germinating Seeds
  misc_feature: MA Experiment ID: 108573 Result: Up-regulated in Transcription
  misc_feature: MA Experiment 108573 PARAMETER Experiment Name: At_Drought_cDNA_P Parameter: Timepoint (hr) Value: 6
  misc_feature: MA Experiment 108573 PARAMETER Experiment Name: At_Drought_cDNA_P Parameter: Tissue Value: Aerial
  misc_feature: MA Experiment 108573 PARAMETER Experiment Name: At_Drought_cDNA_P Parameter: Treatment Value: Drought vs. No Drought
  misc_feature: MA Experiment ID: 108577 Result: Up-regulated in Transcription
  misc_feature: MA Experiment 108577 PARAMETER Experiment Name: At_42deg_Heat_cDNA_P Parameter: Temperature (deg C) Value: 42 vs. 22
  misc_feature: MA Experiment 108577 PARAMETER Experiment Name: At_42deg_Heat_cDNA_P Parameter: Timepoint (hr) Value: 6
  misc_feature: MA Experiment 108577 PARAMETER Experiment Name: At_42deg_Heat_cDNA_P Parameter: Tissue Value: Aerial
  misc_feature: MA Experiment ID: 108579 Result: Up-regulated in Transcription
  misc_feature: MA Experiment 108579 PARAMETER Experiment Name: At_4deg_Cold_cDNA_P Parameter: Temperature (deg C) Value: 4 vs. 22
  misc_feature: MA Experiment 108579 PARAMETER Experiment Name: At_4deg_Cold_cDNA_P Parameter: Timepoint (hr) Value: 6
  misc_feature: MA Experiment 108579 PARAMETER Experiment Name: At_4deg_Cold_cDNA_P Parameter: Tissue Value: Aerial
  misc_feature: MA Experiment ID: 108608 Result: Down-regulated in Transcription
  misc_feature: MA Experiment 108608 PARAMETER Experiment Name: At_100uM_ABA_cDNA_P Parameter: Timepoint (hr) Value: 1
  misc_feature: MA Experiment 108608 PARAMETER Experiment Name: At_100uM_ABA_cDNA_P Parameter: Tissue Value: Aerial
  misc_feature: MA Experiment 108608 PARAMETER Experiment Name: At_100uM_ABA_cDNA_P Parameter: Treatment Value: 100uM ABA vs. No Treatment
  misc_feature: MA Experiment ID: 20000111 Result: Up-regulated in Transcription
  misc_feature: MA Experiment 20000111 PARAMETER Experiment Name: At_42deg_Heat_cDNA_P Parameter: Temperature (deg C) Value: 42 vs. 22
  misc_feature: MA Experiment 20000111 PARAMETER Experiment Name: At_42deg_Heat_cDNA_P Parameter: Timepoint (hr) Value: 6
  misc_feature: MA Experiment 20000111 PARAMETER Experiment Name: At_42deg_Heat_cDNA_P Parameter: Tissue Value: Aerial
  misc_feature: MA Experiment ID: 20000112 Result: Up-regulated in Transcription
  misc_feature: MA Experiment 20000112 PARAMETER Experiment Name: At_42deg_Heat_cDNA_P Parameter: Temperature (deg C) Value: 42 vs. 22
  misc_feature: MA Experiment 20000112 PARAMETER Experiment Name: At_42deg_Heat_cDNA_P Parameter: Timepoint (hr) Value: 2
  misc_feature: MA Experiment 20000112 PARAMETER Experiment Name: At_42deg_Heat_cDNA_P Parameter: Tissue Value: Aerial
  misc_feature: MA Experiment ID: 20000166 Result: Down-regulated in Transcription
  misc_feature: MA Experiment 20000166 PARAMETER Experiment Name: At_100uM_ABA_P Parameter: Age (day) Value: 14
  misc_feature: MA Experiment 20000166 PARAMETER Experiment Name: At_100uM_ABA_P Parameter: Organism Value: A. thaliana
  misc_feature: MA Experiment 20000166 PARAMETER Experiment Name: At_100uM_ABA_P Parameter: Plant Line Value: WS
  misc_feature: MA Experiment 20000166 PARAMETER Experiment Name: At_100uM_ABA_P Parameter: Timepoint (hr) Value: 1
  misc_feature: MA Experiment 20000166 PARAMETER Experiment Name: At_100uM_ABA_P Parameter: Tissue Value: Aerial
  misc_feature: MA Experiment 20000166 PARAMETER Experiment Name: At_100uM_ABA_P Parameter: Treatment Value: 100uM ABA vs. No Treatment
  misc_feature: MA Experiment ID: 20000441 Result: Up-regulated in Transcription
  misc_feature: MA Experiment 20000441 PARAMETER Experiment Name: At_1uM_BR-BRZ__P Parameter: Tissue Value: Shoot Apices
  misc_feature: MA Experiment 20000441 PARAMETER Experiment Name: At_1uM_BR-BRZ__P Parameter: Treatment Value: 1uM BR vs. No Treatment
  misc_feature: MA Experiment ID: 20000573 Result: Up-regulated in Transcription
  misc_feature: MA Experiment 20000573 PARAMETER Experiment Name: At_100uM_ABA_Mutants__P Parameter: Organism Value: A. thaliana
  misc_feature: MA Experiment 20000573 PARAMETER Experiment Name: At_100uM_ABA_Mutants__P Parameter: Plant Line Value: CS22 vs. Ler wt
  misc_feature: MA Experiment 20000573 PARAMETER Experiment Name: At_100uM_ABA_Mutants__P Parameter: Timepoint (hr) Value: N/A
  misc_feature: MA Experiment 20000573 PARAMETER Experiment Name: At_100uM_ABA_Mutants__P Parameter: Tissue Value: Whole Plant
  misc_feature: MA Experiment 20000573 PARAMETER Experiment Name: At_100uM_ABA_Mutants__P Parameter: Treatment Value: None
  misc_feature: MA Experiment ID: 20001911 Result: Up-regulated in Transcription
  misc_feature: MA Experiment 20001911 PARAMETER Experiment Name: At_Drought_Reproduction_P Parameter: Age (day) Value: 40
  misc_feature: MA Experiment 20001911 PARAMETER Experiment Name: At_Drought_Reproduction_P Parameter: Organism Value: A. thaliana
  misc_feature: MA Experiment 20001911 PARAMETER Experiment Name: At_Drought_Reproduction_P Parameter: Plant Line Value: WS
  misc_feature: MA Experiment 20001911 PARAMETER Experiment Name: At_Drought_Reproduction_P Parameter: Timepoint (day) Value: 10
  misc_feature: MA Experiment 20001911 PARAMETER Experiment Name: At_Drought_Reproduction_P Parameter: Tissue Value: Flowers
  misc_feature: MA Experiment 20001911 PARAMETER Experiment Name: At_Drought_Reproduction_P Parameter: Treatment Value: Drought vs. No Drought
ggagagtaacatcgagacaaagaagaaaaactaaaaaagagaaccccaaagaatcgaatatttattatttcgccccgaagattctatttctgatcatttacacccctaaaaagagtagagctttcgtgaagccaccatgtgtggaggagctataatctccgatttcatacctccgccgaggtccctccgcgtcactaacgagtttatctggccggatctgaaaaacaaagtgaaagcttcaaagaagagatcgaataagcgatccgatttcttcgatcttgacgatgatttcgaagctgatttccaagggtttaaggatgactcggcttttgactgcgaagacgatgatgatgtcttcgtcaatgttaagcctttcgtcttcaccgcaactactaagcccgtagcttccgctttcgtctccactggtatatatttggtaggttcagcatatgccaagaaaactgtagagtccgctgagcaagctgagaaatcttctaagaggaagaggaagaatcaataccgagggattaggcagcgtccttggggaaaatgggctgcggagatccgtgatccgagaaaaggctcccgagaatggcttggaacattcgacactgctgaggaagcagcaagagcttatgatgctgcagcacgcagaatccgtggcacgaaagctaaggtgaattttcccgaggagaagaaccctagcgtcgtatcccagaaacgtcctagtgctaagactaataatcttcagaaatcagtggctaaaccaaacaaaagcgtaactttggttcagcagccaacacatctgagtcagcagtactgcaacaactcctttgacaactcttttggtgatatgagtttcatggaagagaagcctcagatgtacaacaatcagtttgggttaacaaactcgttcgatgctggaggtaacaatggataccagtatttcagttccgatcagggcagtaactccttcgactgttctgagttcgggtggagtgatcacggccctaaaacacccgagatctcttcaatgcttgtcaataacaacgaagcatcatttgttgaagaaaccaatgcagccaagaagctcaaaccaaactctgatgagtcagacgatctgatggcataccttgacaacgccttgtgggacaccccactagaagtggaagccatgcttggcgcagatgctggtgctgtgactcaggaagaggaaaacccagtggagctatggagcttagatgagatcaatttcatgctggaaggagacttttgaagtgatcgatggttccttagtttgtaaataaagctgtgttggattttgctgttgggggatggtacaagtcacacctcaagctctatgcattggtatctcatgagcctctcttccatagagagtttctcttttaattttgtcgaaataaaaaaggtgtgatgaagtaaatagaggtataataatatctatctattaagtcttgttttgttctttcatttttgtatttcttttctatttaaaagacagtttattagtcttctgagctctctttttgatctttgttatagcgtatcatcaccctcgaaagtgtaatgttttgtacccccaaacttgtttagcattataataaagtctctttgg

SEQ ID NO: 99507 - protein, 379 aa, Arabidopsis thaliana; identical to SEQ ID NO: 43320
  peptide (1)..(379): Ceres Seq. ID no. 13603096
  misc_feature (125)..(189): Pfam Name: AP2 domain Pfam Description: AP2 domain
  misc_feature (1)..(379): Homolog of NCBI NO: 18400321 NR Description: AP2 domain protein RAP2.2 [Arabidopsis thaliana]
  misc_feature (1)..(379): Homolog of NCBI NO: 21553709 NR Description: DNA-binding protein [Arabidopsis thaliana]
  misc_feature (1)..(379): Homolog of NCBI NO: 30683059 NR Description: AP2 domain protein RAP2.2 [Arabidopsis thaliana]
  misc_feature (1)..(379): Homolog of NCBI NO: 30683064 NR Description: AP2 domain protein RAP2.2 [Arabidopsis thaliana]
  misc_feature (134)..(379): Homolog of NCBI NO: 2281629 NR Description: AP2 domain containing protein RAP2.2 [Arabidopsis
  misc_feature (1)..(354): Homolog of NCBI NO: 21593779 NR Description: AP2 domain containing protein, putative
  misc_feature (1)..(354): Homolog of NCBI NO: 15220971 NR Description: AP2 domain protein RAP2.12 [Arabidopsis thaliana]
  misc_feature (42)..(354): Homolog of NCBI NO: 2281649 NR Description: AP2 domain containing protein RAP2.12
  misc_feature (1)..(328): Homolog of NCBI NO: 30961941 NR Description: C-repeat/DRE-binding factor [Nicotiana tabacum]
  misc_feature (1)..(328): Homolog of NCBI NO: 37538128 NR Description: JERF3 [Lycopersicon esculentum]

SEQ ID NO: 99508 - DNA, 2395 bp, Arabidopsis thaliana
  misc_feature (1)..(2395): Ceres Seq. ID no. 13603097
  misc_feature: MA Experiment ID: 108573 Result: Up-regulated in Transcription
  misc_feature: MA Experiment 108573 PARAMETER Experiment Name: At_Drought_cDNA_P Parameter: Timepoint (hr) Value: 6
  misc_feature: MA Experiment 108573 PARAMETER Experiment Name: At_Drought_cDNA_P Parameter: Tissue Value: Aerial
  misc_feature: MA Experiment 108573 PARAMETER Experiment Name: At_Drought_cDNA_P Parameter: Treatment Value: Drought vs. No Drought
  misc_feature: MA Experiment ID: 108579 Result: Up-regulated in Transcription
  misc_feature: MA Experiment 108579 PARAMETER Experiment Name: At_4deg_Cold_cDNA_P Parameter: Temperature (deg C) Value: 4 vs. 22
  misc_feature: MA Experiment 108579 PARAMETER Experiment Name: At_4deg_Cold_cDNA_P Parameter: Timepoint (hr) Value: 6
  misc_feature: MA Experiment 108579 PARAMETER Experiment Name: At_4deg_Cold_cDNA_P Parameter: Tissue Value: Aerial
  misc_feature: MA Experiment ID: 20000112 Result: Down-regulated in Transcription
  misc_feature: MA Experiment 20000112 PARAMETER Experiment Name: At_42deg_Heat_cDNA_P Parameter: Temperature (deg C) Value: 42 vs. 22
  misc_feature: MA Experiment 20000112 PARAMETER Experiment Name: At_42deg_Heat_cDNA_P Parameter: Timepoint (hr) Value: 2
  misc_feature: MA Experiment 20000112 PARAMETER Experiment Name: At_42deg_Heat_cDNA_P Parameter: Tissue Value: Aerial
  misc_feature: MA Experiment ID: 20000144 Result: Down-regulated in Transcription
  misc_feature: MA Experiment 20000144 PARAMETER Experiment Name: At_42deg_Heat_cDNA_P Parameter: Temperature (deg C) Value: 42 vs. 22
  misc_feature: MA Experiment 20000144 PARAMETER Experiment Name: At_42deg_Heat_cDNA_P Parameter: Timepoint (hr) Value: 1
  misc_feature: MA Experiment 20000144 PARAMETER Experiment Name: At_42deg_Heat_cDNA_P Parameter: Tissue Value: Aerial
  misc_feature: MA Experiment ID: 20000171 Result: Down-regulated in Transcription
  misc_feature: MA Experiment 20000171 PARAMETER Experiment Name: At_42deg_Heat_P Parameter: Age (day) Value: 14
  misc_feature: MA Experiment 20000171 PARAMETER Experiment Name: At_42deg_Heat_P Parameter: Organism Value: A. thaliana
  misc_feature: MA Experiment 20000171 PARAMETER Experiment Name: At_42deg_Heat_P Parameter: Plant Line Value: WS
  misc_feature: MA Experiment 20000171 PARAMETER Experiment Name: At_42deg_Heat_P Parameter: Temperature (deg C) Value: 42 vs. 22
  misc_feature: MA Experiment 20000171 PARAMETER Experiment Name: At_42deg_Heat_P Parameter: Timepoint (hr) Value: 1
  misc_feature: MA Experiment 20000171 PARAMETER Experiment Name: At_42deg_Heat_P Parameter: Tissue Value: Aerial
  misc_feature: MA Experiment ID: 20000173 Result: Down-regulated in Transcription
  misc_feature: MA Experiment 20000173 PARAMETER Experiment Name: At_42deg_Heat_P Parameter: Age (day) Value: 14
  misc_feature: MA Experiment 20000173 PARAMETER Experiment Name: At_42deg_Heat_P Parameter: Organism Value: A. thaliana
  misc_feature: MA Experiment 20000173 PARAMETER Experiment Name: At_42deg_Heat_P Parameter: Plant Line Value: WS
  misc_feature: MA Experiment 20000173 PARAMETER Experiment Name: At_42deg_Heat_P Parameter: Temperature (deg C) Value: 42 vs. 22
  misc_feature: MA Experiment 20000173 PARAMETER Experiment Name: At_42deg_Heat_P Parameter: Timepoint (hr) Value: 6
  misc_feature: MA Experiment 20000173 PARAMETER Experiment Name: At_42deg_Heat_P Parameter: Tissue Value: Aerial
  misc_feature: MA Experiment ID: 20000185 Result: Up-regulated in Transcription
  misc_feature: MA Experiment 20000185 PARAMETER Experiment Name: At_Roots__P Parameter: Age (day) Value: 7 vs. 21
  misc_feature: MA Experiment 20000185 PARAMETER Experiment Name: At_Roots__P Parameter: Organism Value: A. thaliana
  misc_feature: MA Experiment 20000185 PARAMETER Experiment Name: At_Roots__P Parameter: Tissue Value: Roots vs. Whole Plant
  misc_feature: MA Experiment ID: 20000438 Result: Up-regulated in Transcription
  misc_feature: MA Experiment 20000438 PARAMETER Experiment Name: At_Shoots__P Parameter: Age (day) Value: 14
  misc_feature: MA Experiment 20000438 PARAMETER Experiment Name: At_Shoots__P Parameter: Tissue Value: Shoots vs. Whole Plant
  misc_feature: MA Experiment ID: 20000439 Result: Up-regulated in Transcription
  misc_feature: MA Experiment 20000439 PARAMETER Experiment Name: At_Roots__P Parameter: Age (day) Value: 14 vs. 21
  misc_feature: MA Experiment 20000439 PARAMETER Experiment Name: At_Roots__P Parameter: Organism Value: A. thaliana
  misc_feature: MA Experiment 20000439 PARAMETER Experiment Name: At_Roots__P Parameter: Tissue Value: Roots vs. Whole Plant
  misc_feature: MA Experiment ID: 20001247 Result: Up-regulated in Transcription
  misc_feature: MA Experiment 20001247 PARAMETER Experiment Name: At_Far-red-induction_P Parameter: Age (day) Value: 7
  misc_feature: MA Experiment 20001247 PARAMETER Experiment Name: At_Far-red-induction_P Parameter: Light Value: Far-red vs. White
  misc_feature: MA Experiment 20001247 PARAMETER Experiment Name: At_Far-red-induction_P Parameter: Organism Value: A. thaliana
  misc_feature: MA Experiment 20001247 PARAMETER Experiment Name: At_Far-red-induction_P Parameter: Plant Line Value: Columbia
  misc_feature: MA Experiment 20001247 PARAMETER Experiment Name: At_Far-red-induction_P Parameter: Timepoint (hr) Value: 1
  misc_feature: MA Experiment 20001247 PARAMETER Experiment Name: At_Far-red-induction_P Parameter: Tissue Value: Whole Plant
  misc_feature: MA Experiment ID: 20001905 Result: Up-regulated in Transcription
  misc_feature: MA Experiment 20001905 PARAMETER Experiment Name: At_Drought_Reproduction_P Parameter: Age (day) Value: 40
  misc_feature: MA Experiment 20001905 PARAMETER Experiment Name: At_Drought_Reproduction_P Parameter: Organism Value: A. thaliana
  misc_feature: MA Experiment 20001905 PARAMETER Experiment Name: At_Drought_Reproduction_P Parameter: Plant Line Value: WS
  misc_feature: MA Experiment 20001905 PARAMETER Experiment Name: At_Drought_Reproduction_P Parameter: Timepoint (day) Value: 10
  misc_feature: MA Experiment 20001905 PARAMETER Experiment Name: At_Drought_Reproduction_P Parameter: Tissue Value: Rosettes
  misc_feature: MA Experiment 20001905 PARAMETER Experiment Name: At_Drought_Reproduction_P Parameter: Treatment Value: Drought vs. No Drought
cttctgtctcatctggttttcgagagagatagagaaagtgagacaaggttaaggaggaagaagatgactgagaatcgggtggttttggctctgcttatactctgcattgttgggtttgagccaagtttcatccatggagctacggattcatcagatacttcggcgttaaacatcatgttcagctccatgaattctccaggacagctctcacaatggacagcatcaggaggtgatccttgtggccaaaactggaaaggcataacttgctctggctctcgagttacacaaataaagttaccaagtcttggactttctggatcacttggattcatgcttgataaattgacttctgttactgagtttgatatgagcaacaataaccttggaggcgatttgccttatcagcttcctccaaacttggagcgattgaatcttgctaataaccagttcactggatctgctcaatattccatttctatgatggctcctcttaagtacctcaaccttgctcacaaccagttgaagcagctagctattgacttcacaaaactcacctctctctctatattggacctctcttccaatgcttttatagggtctctcccaaacacttgtagctctcttacgagtgcaaaatcaatttatcttcagaacaatcagttctcaggcaccattgatattctagccacccttcctctcgaaaatctgaatattgcaaacaatcggttcacaggctggatccctgattctttgaaaggcattaacttgcaaaaagatggcaatttattaaattccgggcctgcacctccaccacctcctggtacaccaccgatcagtaaatcatcacctactccgaaatccgggaaccgtggaaaccgttccaatggtgattccagcaatagcaaagactccagcaaatcagggcttggagctggtggagtagcaggaatagtcatttctttgatagttgtaacagcagtcatagctttcttcttgatcaagagaaaaagatcaaagcggtcatcatccacggacattgaaaagactgataataacattaaccaacccattatactagcgtccaatgactttcatcaagagaataagtctgtacagaatccaccattggttgagacaaagaaactggatacgtcattgtcgatgaatctacgtcctccaccatctgagcgacataagtcgtttgatgacgatgattcaacaatgagaaaacctattgttgcaaagaaagctgctgttgttgttccttcaaatgtgaacacatatacggtttcagatcttcaagtagctaccaacagtttcagcgtagataatcttctcggtgaaggaacatttggaagagtatacagagctcagtttgaagatggaaaggtacttgctgtgaagaaaatcgactcatctgcgcttcccacggatactgctgatgattttaccgaaattgtatcgaaaatagcgcatttggatcacgaaaatgtcacaaagcttgatggttactgttctgaacacgggcaacacttggtggtctatgagttccatagaaacggctcattgcatgactttttacatcttgcagaagaggaaagcaaaccgttgatatggaatccccgtgtcaagatcgctcttggcactgcacgtgcattggagtacttgcatgaagtttgctcaccatctatagtccacaagaacattaaatcagcaaatattttacttgactcagagctgaatccacacctctcagactcaggtctcgctagcttccttcccactgcaaacgagctactaaaccaaaacgatgaaggatacagcgcaccagaaacttcaatgtcaggccaatactctttgaagagcgatgtttacagttttggagtagtgatgctcgagcttttaaccggaagaaaaccattcgacagcacaaggtcaagatcggaacaatcattggtaagatgggcaacacctcagcttcacgacattgatgctttgggcaaaatggttgatccagctctcaaagggctatacccggttaaatccctctcccgatttgcagatgttatcgccctttgcgtccagccggagccagagtttagaccacccatgtctgaagtggtgcaagcattggttgtattggtgcagagagctaacatgagcaagagaactgttggagtcggctccggtagctccggcgtcaatgattacatgtaaattctttacctgatgagaaccaacaaaaaaaaacataaaaatttgccctttttctcttgtctgctcggaatctggatgggacgacaacaagtgacaaccgaggacagacaaaacaaaacaaaatcctttttttctttcggtttcataaaactgatgatgagagaataacaacaacaac

SEQ ID NO: 99509 - protein, 738 aa, Arabidopsis thaliana; identical to SEQ ID NO: 39643
  peptide (1)..(738): Ceres Seq. ID no. 13603098
  misc_feature (22)..(738): Homolog of NCBI NO: 15220928 NR Description: leucine-rich repeat transmembrane protein kinase putative [Arabidopsis thaliana] >gi|25387064|pir||F96577
  misc_feature (29)..(736): Homolog of NCBI NO: 29367551 NR Description: putative leucine-rich repeat transmembrane
  misc_feature (35)..(736): Homolog of NCBI NO: 15217283 NR Description: Putative leucine-rich repeat transmembrane
  misc_feature (49)..(723): Homolog of NCBI NO: 7489783 NR Description: leucine-rich repeat transmembrane protein kinase
  misc_feature (26)..(736): Homolog of NCBI NO: 7489784 NR Description: leucine-rich repeat transmembrane protein kinase
  misc_feature (42)..(722): Homolog of NCBI NO: 34906746 NR Description: similar to leucine-rich repeat transmembrane
  misc_feature (124)..(720): Homolog of NCBI NO: 30017524 NR Description: putative leucine-rich repeat transmembrane
  misc_feature (63)..(715): Homolog of NCBI NO: 18399852 NR Description: leucine-rich repeat transmembrane protein kinase,
  misc_feature (425)..(717): Homolog of NCBI NO: 18399502 NR Description: LRR receptor protein kinase -related [Arabidopsis >gi|15810275|gb|AAL07025.1| putative LRR receptor protein kinase thaliana] >gi|20197699|gb|AAD20910.3| putative LRR receptor
  misc_feature (19)..(283): Homolog of NCBI NO: 18399502 NR Description: LRR receptor protein kinase -related [Arabidopsis >gi|15810275|gb|AAL07025.1| putative LRR receptor protein kinase thaliana] >gi|20197699|gb|AAD20910.3| putative LRR receptor

SEQ ID NO: 99510 - protein, 717 aa, Arabidopsis thaliana; identical to SEQ ID NO: 39644
  peptide (1)..(717): Ceres Seq. ID no. 13603099
  misc_feature (1)..(717): Homolog of NCBI NO: 15220928 NR Description: leucine-rich repeat transmembrane protein kinase putative [Arabidopsis thaliana] >gi|25387064|pir||F96577
  misc_feature (8)..(715): Homolog of NCBI NO: 29367551 NR Description: putative leucine-rich repeat transmembrane
  misc_feature (14)..(715): Homolog of NCBI NO: 15217283 NR Description: Putative leucine-rich repeat transmembrane
  misc_feature (28)..(702): Homolog of NCBI NO: 7489783 NR Description: leucine-rich repeat transmembrane protein kinase
  misc_feature (5)..(715): Homolog of NCBI NO: 7489784 NR Description: leucine-rich repeat transmembrane protein kinase
  misc_feature (21)..(701): Homolog of NCBI NO: 34906746 NR Description: similar to leucine-rich repeat transmembrane
  misc_feature (103)..(699): Homolog of NCBI NO: 30017524 NR Description: putative leucine-rich repeat transmembrane
  misc_feature (42)..(694): Homolog of NCBI NO: 18399852 NR Description: leucine-rich repeat transmembrane protein kinase,
  misc_feature (404)..(696): Homolog of NCBI NO: 18399502 NR Description: LRR receptor protein kinase -related [Arabidopsis >gi|15810275|gb|AAL07025.1| putative LRR receptor protein kinase thaliana] >gi|20197699|gb|AAD20910.3| putative LRR receptor
  misc_feature (1)..(262): Homolog of NCBI NO: 18399502 NR Description: LRR receptor protein kinase -related [Arabidopsis >gi|15810275|gb|AAL07025.1| putative LRR receptor protein kinase thaliana] >gi|20197699|gb|AAD20910.3| putative LRR receptor

SEQ ID NO: 99511 - protein, 680 aa, Arabidopsis thaliana; identical to SEQ ID NO: 39645
  peptide (1)..(680): Ceres Seq. ID no. 13603100
  misc_feature (1)..(680): Homolog of NCBI NO: 15220928 NR Description: leucine-rich repeat transmembrane protein kinase putative [Arabidopsis thaliana] >gi|25387064|pir||F96577
  misc_feature (1)..(678): Homolog of NCBI NO: 29367551 NR Description: putative leucine-rich repeat transmembrane
  misc_feature (1)..(678): Homolog of NCBI NO: 15217283 NR Description: Putative leucine-rich repeat transmembrane
  misc_feature (1)..(665): Homolog of NCBI NO: 7489783 NR Description: leucine-rich repeat transmembrane protein kinase
  misc_feature (1)..(678): Homolog of NCBI NO: 7489784 NR Description: leucine-rich repeat transmembrane protein kinase
  misc_feature (1)..(664): Homolog of NCBI NO: 34906746 NR Description: similar to leucine-rich repeat transmembrane
  misc_feature (66)..(662): Homolog of NCBI NO: 30017524 NR Description: putative leucine-rich repeat transmembrane
  misc_feature (5)..(657): Homolog of NCBI NO: 18399852 NR Description: leucine-rich repeat transmembrane protein kinase,
  misc_feature (367)..(659): Homolog of NCBI NO: 18399502 NR Description: LRR receptor protein kinase -related [Arabidopsis >gi|15810275|gb|AAL07025.1| putative LRR receptor protein kinase thaliana] >gi|20197699|gb|AAD20910.3| putative LRR receptor
  misc_feature (1)..(225): Homolog of NCBI NO: 18399502 NR Description: LRR receptor protein kinase -related [Arabidopsis >gi|15810275|gb|AAL07025.1| putative LRR receptor protein kinase thaliana] >gi|20197699|gb|AAD20910.3| putative LRR receptor

SEQ ID NO: 99512 - DNA, 1431 bp, Arabidopsis thaliana
  misc_feature (1)..(1431): Ceres Seq. ID no. 13603101
  misc_feature: MA Experiment ID: 108434 Result: Down-regulated in Transcription
  misc_feature: MA Experiment 108434 PARAMETER Experiment Name: At_Root_Tips_cDNA_P Parameter: Tissue Value: Root Tips
  misc_feature: MA Experiment ID: 108435 Result: Down-regulated in Transcription
  misc_feature: MA Experiment 108435 PARAMETER Experiment Name: At_stm_Mutants_cDNA_P Parameter: Plant Line Value: wt Landsburg vs stm
  misc_feature: MA Experiment 108435 PARAMETER Experiment Name: At_stm_Mutants_cDNA_P Parameter: Tissue Value: Shoot Apical Meristem Region
  misc_feature: MA Experiment ID: 108462 Result: Up-regulated in Transcription
  misc_feature: MA Experiment 108462 PARAMETER Experiment Name: At_Germinating_Seeds_cDNA_P Parameter: Age (day) Value: 2 vs. 0
  misc_feature: MA Experiment 108462 PARAMETER Experiment Name: At_Germinating_Seeds_cDNA_P Parameter: Tissue Value: Germinating Seeds
  misc_feature: MA Experiment ID: 108464 Result: Up-regulated in Transcription
  misc_feature: MA Experiment 108464 PARAMETER Experiment Name: At_Germinating_Seeds_cDNA_P Parameter: Age (day) Value: 4 vs. 0
  misc_feature: MA Experiment 108464 PARAMETER Experiment Name: At_Germinating_Seeds_cDNA_P Parameter: Tissue Value: Germinating Seeds
  misc_feature: MA Experiment ID: 108488 Result: Up-regulated in Transcription
  misc_feature: MA Experiment ID: 108594 Result: Down-regulated in Transcription
  misc_feature: MA Experiment 108594 PARAMETER Experiment Name: At_Ler-rhl_Root_cDNA_P Parameter: Plant Line Value: null
  misc_feature: MA Experiment ID: 108595 Result: Down-regulated in Transcription
  misc_feature: MA Experiment 108595 PARAMETER Experiment Name: At_Ler-pi_Ovule_cDNA_P Parameter: Plant Line Value: null
  misc_feature: MA Experiment ID: 20000069 Result: Down-regulated in Transcription
  misc_feature: MA Experiment 20000069 PARAMETER Experiment Name: At_100uM_ABA_Mutants_cDNA_P Parameter: Plant Line Value: CS23
  misc_feature: MA Experiment 20000069 PARAMETER Experiment Name: At_100uM_ABA_Mutants_cDNA_P Parameter: Timepoint (hr) Value: 6
  misc_feature: MA Experiment 20000069 PARAMETER Experiment Name: At_100uM_ABA_Mutants_cDNA_P Parameter: Tissue Value: Aerial
  misc_feature: MA Experiment 20000069 PARAMETER Experiment Name: At_100uM_ABA_Mutants_cDNA_P Parameter: Treatment Value: 100uM ABA vs. No Treatment
  misc_feature: MA Experiment ID: 20000070 Result: Down-regulated in Transcription
  misc_feature: MA Experiment 20000070 PARAMETER Experiment Name: At_100uM_ABA_Mutants_cDNA_P Parameter: Plant Line Value: CS24
  misc_feature: MA Experiment 20000070 PARAMETER Experiment Name: At_100uM_ABA_Mutants_cDNA_P Parameter: Timepoint (hr) Value: 6
  misc_feature: MA Experiment 20000070 PARAMETER Experiment Name: At_100uM_ABA_Mutants_cDNA_P Parameter: Tissue Value: Aerial
  misc_feature: MA Experiment 20000070 PARAMETER Experiment Name: At_100uM_ABA_Mutants_cDNA_P Parameter: Treatment Value: 100uM ABA vs. No Treatment
  misc_feature: MA Experiment ID: 20000071 Result: Down-regulated in Transcription
  misc_feature: MA Experiment 20000071 PARAMETER Experiment Name: At_100uM_ABA_Mutants_cDNA_P Parameter: Plant Line Value: CS8104
  misc_feature: MA Experiment 20000071 PARAMETER Experiment Name: At_100uM_ABA_Mutants_cDNA_P Parameter: Timepoint (hr) Value: 6
  misc_feature: MA Experiment 20000071 PARAMETER Experiment Name: At_100uM_ABA_Mutants_cDNA_P Parameter: Tissue Value: Aerial
  misc_feature: MA Experiment 20000071 PARAMETER Experiment Name: At_100uM_ABA_Mutants_cDNA_P Parameter: Treatment Value: 100uM ABA vs. No Treatment
  misc_feature: MA Experiment ID: 20000072 Result: Down-regulated in Transcription
  misc_feature: MA Experiment 20000072 PARAMETER Experiment Name: At_100uM_ABA_Mutants_cDNA_P Parameter: Plant Line Value: CS8105
  misc_feature: MA Experiment 20000072 PARAMETER Experiment Name: At_100uM_ABA_Mutants_cDNA_P Parameter: Timepoint (hr) Value: 6
  misc_feature: MA Experiment 20000072 PARAMETER Experiment Name: At_100uM_ABA_Mutants_cDNA_P Parameter: Tissue Value: Aerial
  misc_feature: MA Experiment 20000072 PARAMETER Experiment Name: At_100uM_ABA_Mutants_cDNA_P Parameter: Treatment Value: 100uM ABA vs. No Treatment
  misc_feature: MA Experiment ID: 20000086 Result: Down-regulated in Transcription
  misc_feature: MA Experiment 20000086 PARAMETER Experiment Name: At_100uM_ABA_Mutants_cDNA_P Parameter: Plant Line Value: CS22
  misc_feature: MA Experiment 20000086 PARAMETER Experiment Name: At_100uM_ABA_Mutants_cDNA_P Parameter: Timepoint (hr) Value: 6
  misc_feature: MA Experiment 20000086 PARAMETER Experiment Name: At_100uM_ABA_Mutants_cDNA_P Parameter: Tissue Value: Aerial
  misc_feature: MA Experiment 20000086 PARAMETER Experiment Name: At_100uM_ABA_Mutants_cDNA_P Parameter: Treatment Value: 100uM ABA vs. No Treatment
  misc_feature: MA Experiment ID: 20000087 Result: Down-regulated in Transcription
  misc_feature: MA Experiment 20000087 PARAMETER Experiment Name: At_100uM_ABA_Mutants_cDNA_P Parameter: Plant Line Value: WS
  misc_feature: MA Experiment 20000087 PARAMETER Experiment Name: At_100uM_ABA_Mutants_cDNA_P Parameter: Timepoint (hr) Value: 6
  misc_feature: MA Experiment 20000087 PARAMETER Experiment Name: At_100uM_ABA_Mutants_cDNA_P Parameter: Tissue Value: Aerial
  misc_feature: MA Experiment 20000087 PARAMETER Experiment Name: At_100uM_ABA_Mutants_cDNA_P Parameter: Treatment Value: 100uM ABA vs. No Treatment
  misc_feature: MA Experiment ID: 20000088 Result: Down-regulated in Transcription
  misc_feature: MA Experiment 20000088 PARAMETER Experiment Name: At_100uM_ABA_Mutants_cDNA_P Parameter: Plant Line Value: Landsberg
  misc_feature: MA Experiment 20000088 PARAMETER Experiment Name: At_100uM_ABA_Mutants_cDNA_P Parameter: Timepoint (hr) Value: 6
  misc_feature: MA Experiment 20000088 PARAMETER Experiment Name: At_100uM_ABA_Mutants_cDNA_P Parameter: Tissue Value: Aerial
  misc_feature: MA Experiment 20000088 PARAMETER Experiment Name: At_100uM_ABA_Mutants_cDNA_P Parameter: Treatment Value: 100uM ABA vs. No Treatment
  misc_feature: MA Experiment ID: 20000089 Result: Down-regulated in Transcription
  misc_feature: MA Experiment ID: 20000090 Result: Down-regulated in Transcription
  misc_feature: MA Experiment ID: 20000117 Result: Down-regulated in Transcription
  misc_feature: MA Experiment 20000117 PARAMETER Experiment Name: At_100uM_ABA_Mutants_cDNA_P Parameter: Plant Line Value: Columbia
  misc_feature: MA Experiment 20000117 PARAMETER Experiment Name: At_100uM_ABA_Mutants_cDNA_P Parameter: Timepoint (hr) Value: 6
  misc_feature: MA Experiment 20000117 PARAMETER Experiment Name: At_100uM_ABA_Mutants_cDNA_P Parameter: Tissue Value: Aerial
  misc_feature: MA Experiment 20000117 PARAMETER Experiment Name: At_100uM_ABA_Mutants_cDNA_P Parameter: Treatment Value: 100uM ABA vs. No Treatment
  misc_feature: MA Experiment ID: 20000180 Result: Up-regulated in Transcription
  misc_feature: MA Experiment 20000180 PARAMETER Experiment Name: At_Germinating_Seeds_P Parameter: Age (hr) Value: 24 vs. 0
  misc_feature: MA Experiment 20000180 PARAMETER Experiment Name: At_Germinating_Seeds_P Parameter: Tissue Value: Germinating Seeds
  misc_feature: MA Experiment ID: 20000184 Result: Up-regulated in Transcription
  misc_feature: MA Experiment 20000184 PARAMETER Experiment Name: At_Shoots__P Parameter: Age (day) Value: 7
  misc_feature: MA Experiment 20000184 PARAMETER Experiment Name: At_Shoots__P Parameter: Tissue Value: Shoots vs. Whole Plant
  misc_feature: MA Experiment ID: 20000185 Result: Down-regulated in Transcription
  misc_feature: MA Experiment 20000185 PARAMETER Experiment Name: At_Roots__P Parameter: Age (day) Value: 7 vs. 21
  misc_feature: MA Experiment 20000185 PARAMETER Experiment Name: At_Roots__P Parameter: Organism Value: A. thaliana
  misc_feature: MA Experiment 20000185 PARAMETER Experiment Name: At_Roots__P Parameter: Tissue Value: Roots vs. Whole Plant
  misc_feature: MA Experiment ID: 20000437 Result: Down-regulated in Transcription
  misc_feature: MA Experiment 20000437 PARAMETER Experiment Name: At_Drought_P Parameter: Age (day) Value: 8
  misc_feature: MA Experiment 20000437 PARAMETER Experiment Name: At_Drought_P Parameter: Organism Value: A. thaliana
  misc_feature: MA Experiment 20000437 PARAMETER Experiment Name: At_Drought_P Parameter: Plant Line Value: WS
  misc_feature: MA Experiment 20000437 PARAMETER Experiment Name: At_Drought_P Parameter: Timepoint (hr) Value: 24
  misc_feature: MA Experiment 20000437 PARAMETER Experiment Name: At_Drought_P Parameter: Tissue Value: Whole Plant
  misc_feature: MA Experiment 20000437 PARAMETER Experiment Name: At_Drought_P Parameter: Treatment Value: Drought vs. No Drought
  misc_feature: MA Experiment ID: 20000438 Result: Up-regulated in Transcription
  misc_feature: MA Experiment 20000438 PARAMETER Experiment Name: At_Shoots__P Parameter: Age (day) Value: 14
  misc_feature: MA Experiment 20000438 PARAMETER Experiment Name: At_Shoots__P Parameter: Tissue Value: Shoots vs. Whole Plant
  misc_feature: MA Experiment ID: 20000439 Result: Down-regulated in Transcription
  misc_feature: MA Experiment 20000439 PARAMETER Experiment Name: At_Roots__P Parameter: Age (day) Value: 14 vs. 21
  misc_feature: MA Experiment 20000439 PARAMETER Experiment Name: At_Roots__P Parameter: Organism Value: A. thaliana
  misc_feature: MA Experiment 20000439 PARAMETER Experiment Name: At_Roots__P Parameter: Tissue Value: Roots vs. Whole Plant
  misc_feature: MA Experiment ID: 20000794 Result: Down-regulated in Transcription
  misc_feature: MA Experiment 20000794 PARAMETER Experiment Name: At_Petals_P Parameter: Age (day) Value: 23-25 days
  misc_feature: MA Experiment 20000794 PARAMETER Experiment Name: At_Petals_P Parameter: Plant Line Value: WS
  misc_feature: MA Experiment 20000794 PARAMETER Experiment Name: At_Petals_P Parameter: Tissue Value: Petals vs. Whole plant
  misc_feature: MA Experiment ID: 20001560 Result: Down-regulated in Transcription
  misc_feature: MA Experiment 20001560 PARAMETER Experiment Name: At_Drought_Soil_Dry_P Parameter: Age (day) Value: 28
  misc_feature: MA Experiment 20001560 PARAMETER Experiment Name: At_Drought_Soil_Dry_P Parameter: Organism Value: A. thaliana
  misc_feature: MA Experiment 20001560 PARAMETER Experiment Name: At_Drought_Soil_Dry_P Parameter: Plant Line Value: WS
  misc_feature: MA Experiment 20001560 PARAMETER Experiment Name: At_Drought_Soil_Dry_P Parameter: Post Timepoint (hr) Value: None
  misc_feature: MA Experiment 20001560 PARAMETER Experiment Name: At_Drought_Soil_Dry_P Parameter: Post-Treatment Value: None
  misc_feature: MA Experiment 20001560 PARAMETER Experiment Name: At_Drought_Soil_Dry_P Parameter: Timepoint (day) Value: 14
  misc_feature: MA Experiment 20001560 PARAMETER Experiment Name: At_Drought_Soil_Dry_P Parameter: Treatment Value: Drought vs. No Drought
  misc_feature: MA Experiment ID: 20001905 Result: Down-regulated in Transcription
  misc_feature: MA Experiment 20001905 PARAMETER Experiment Name: At_Drought_Reproduction_P Parameter: Age (day) Value: 40
  misc_feature: MA Experiment 20001905 PARAMETER Experiment Name: At_Drought_Reproduction_P Parameter: Organism Value: A. thaliana
  misc_feature: MA Experiment 20001905 PARAMETER Experiment Name: At_Drought_Reproduction_P Parameter: Plant Line Value: WS
  misc_feature: MA Experiment 20001905 PARAMETER Experiment Name: At_Drought_Reproduction_P Parameter: Timepoint (day) Value: 10
  misc_feature: MA Experiment 20001905 PARAMETER Experiment Name: At_Drought_Reproduction_P Parameter: Tissue Value: Rosettes
  misc_feature: MA Experiment 20001905 PARAMETER Experiment Name: At_Drought_Reproduction_P Parameter: Treatment Value: Drought vs. No Drought
cacacacttcatctctccccagagctctattcccatcaagaaacacacttcggaagatggagatcactaacgttaccgagtatgatgcaatcgcaaagcagaagctgcctaagatggtgtacgactactatgcatctggtgcagaagaccaatggactcttcaagagaacagaaacgcttttgcaaggatcctctttcggcctcggattctgattgatgtgagcaagattgacatgacaaccaccgtcttggggttcaagatctcgatgcccatcatggttgctccaactgccatgcaaaagatggctcaccctgatggggaatatgctactgctagagctgcatctgcagctggaactatcatgacactatcttcatgggctacttccagcgttgaagaagttgcgtctacagggccagggatccgattcttccagctctatgtatacaagaacaggaatgtggttgagcagctcgtgagaagagctgagagggctgggttcaaagccattgctctcactgtagacaccccaaggctaggccgcagagagtctgatatcaagaacagattcactttgcctccaaacctgacattgaagaactttgaaggacttgacctcggaaagatggacgaggccaatgactctggcttggcttcatatgttgctggtcaaattgaccgtaccttaagctggaaggatgtccagtggctccagacaatcaccaagttgcccattcttgtcaaaggtgttcttacaggagaggatgcaaggatagcgattcaagctggtgcagccggaatcattgtatcaaaccatggagctcgccagcttgactatgtcccagcaaccatctcggcccttgaagaggttgtcaaagcgacacaaggacgaattcctgtcttcttggatggtggtgttcgacgtggcactgatgtcttcaaagcacttgcacttggagcctccgggatatttattggaagaccagtggtattctcattggcagctgaaggagaggctggagttagaaaggtgcttcaaatgctacgtgatgagttcgagctgaccatggcactgagtgggtgtcggtccctaaaggaaatctcccgtaaccacattaccaccgaatgggacactccacgtccttcagccaggttatagagaggaaaataaccaacaagcagagaacagcagcaacacagaaccaaaatattggctaaacttattcatactctgattgtacttggcttctactctgctaaatatctcaagacttgtttctccctctatcagatcacaaaccaagcctagtgattctgtaatactatttggctacttctttcttaaggccattcttatttctaaattccatgtacttacattcccacagatcaatttcttgtgattcccagataatacgatgaacatatgc

SEQ ID NO: 99513 - protein, 385 aa, Arabidopsis thaliana
  peptide (1)..(385): Ceres Seq. ID no. 13603102
  misc_feature (31)..(374): Pfam Name: FMN-dependent dehydrogenase Pfam Description: FMN-dependent dehydrogenase
  misc_feature (19)..(385): Homolog of NCBI NO: 15231850 NR Description: glycolate oxidase -related [Arabidopsis thaliana]
  misc_feature (19)..(385): Homolog of NCBI NO: 16226772 NR Description: AT3g14420/MOA2_2 [Arabidopsis thaliana]
  misc_feature (19)..(385): Homolog of NCBI NO: 15229497 NR Description: glycolate oxidase [Arabidopsis thaliana]
  misc_feature (19)..(378): Homolog of NCBI NO: 1773330 NR Description: glycolate oxidase [Mesembryanthemum crystallinum]
  misc_feature (19)..(385): Homolog of NCBI NO: 7431428 NR Description: (S)-2-hydroxy-acid oxidase (EC 1.1.3.15) - >gi|217909|dbj|BAA03131.1| glycolate oxidase [Cucurbita cv.
  misc_feature (19)..(385): Homolog of NCBI NO: 27549566 NR Description: glycolate oxidase [Zantedeschia aethiopica]
  misc_feature (19)..(385): Homolog of NCBI NO: 121530 NR Description: (S)-2-hydroxy-acid oxidase, peroxisomal
  misc_feature (19)..(385): Homolog of NCBI NO: 999542 NR Description: Chain A, Glycolate Oxidase (E.C.1.1.3.15) Mutant Tyr 24 Replaced By Phe (Y24f) >gi|999543|pdb|1GYL|B Chain B,
  misc_feature (19)..(384): Homolog of NCBI NO: 228403 NR Description: glycolate oxidase
  misc_feature (65)..(385): Homolog of NCBI NO: 30683154 NR Description: glycolate oxidase -related [Arabidopsis thaliana]
HTSSLPRALFPSRNTLRKMEITNVTEYDAIAKQKLPKMVYDYYASGAEDQWTLQENRNAFARILFRPRILIDVSKIDMTTTVLGFKISMPIMVAPTAMQKMAHPDGEYATARAASAAGTIMTLSSWATSSVEEVASTGPGIRFFQLYVYKNRNVVEQLVRRAERAGFKAIALTVDTPRLGRRESDIKNRFTLPPNLTLKNFEGLDLGKMDEANDSGLASYVAGQIDRTLSWKDVQWLQTITKLPILVKGVLTGEDARIAIQAGAAGIIVSNHGARQLDYVPATISALEEVVKATQGRIPVFLDGGVRRGTDVFKALALGASGIFIGRPVVFSLAAEGEAGVRKVLQMLRDEFELTMALSGCRSLKEISRNHITTEWDTPRPSARL

SEQ ID NO: 99514 - protein, 367 aa, Arabidopsis thaliana; identical to SEQ ID NO: 25861
  peptide (1)..(367): Ceres Seq. ID no. 13603103
  misc_feature (13)..(356): Pfam Name: FMN-dependent dehydrogenase Pfam Description: FMN-dependent dehydrogenase
  misc_feature (1)..(367): Homolog of NCBI NO: 15231850 NR Description: glycolate oxidase -related [Arabidopsis thaliana]
  misc_feature (1)..(367): Homolog of NCBI NO: 16226772 NR Description: AT3g14420/MOA2_2 [Arabidopsis thaliana]
  misc_feature (1)..(367): Homolog of NCBI NO: 15229497 NR Description: glycolate oxidase [Arabidopsis thaliana]
  misc_feature (1)..(360): Homolog of NCBI NO: 1773330 NR Description: glycolate oxidase [Mesembryanthemum crystallinum]
  misc_feature (1)..(367): Homolog of NCBI NO: 7431428 NR Description: (S)-2-hydroxy-acid oxidase (EC 1.1.3.15) - >gi|217909|dbj|BAA03131.1| glycolate oxidase [Cucurbita cv.
  misc_feature (1)..(367): Homolog of NCBI NO: 27549566 NR Description: glycolate oxidase [Zantedeschia aethiopica]
  misc_feature (1)..(367): Homolog of NCBI NO: 121530 NR Description: (S)-2-hydroxy-acid oxidase, peroxisomal
  misc_feature (1)..(367): Homolog of NCBI NO: 999542 NR Description: Chain A, Glycolate Oxidase (E.C.1.1.3.15) Mutant Tyr 24 Replaced By Phe (Y24f) >gi|999543|pdb|1GYL|B Chain B,
  misc_feature (1)..(366): Homolog of NCBI NO: 228403 NR Description: glycolate oxidase
  misc_feature (47)..(367): Homolog of NCBI NO: 30683154 NR Description: glycolate oxidase -related [Arabidopsis thaliana]

SEQ ID NO: 99515 - protein, 348 aa, Arabidopsis thaliana; identical to SEQ ID NO: 25862
  peptide (1)..(348): Ceres Seq. ID no. 13603104
  misc_feature (1)..(337): Pfam Name: FMN-dependent dehydrogenase Pfam Description: FMN-dependent dehydrogenase
  misc_feature (1)..(348): Homolog of NCBI NO: 15231850 NR Description: glycolate oxidase -related [Arabidopsis thaliana]
  misc_feature (1)..(348): Homolog of NCBI NO: 16226772 NR Description: AT3g14420/MOA2_2 [Arabidopsis thaliana]
  misc_feature (1)..(348): Homolog of NCBI NO: 15229497 NR Description: glycolate oxidase [Arabidopsis thaliana]
  misc_feature (1)..(341): Homolog of NCBI NO: 1773330 NR Description: glycolate oxidase [Mesembryanthemum crystallinum]
  misc_feature (1)..(348): Homolog of NCBI NO: 7431428 NR Description: (S)-2-hydroxy-acid oxidase (EC 1.1.3.15) - >gi|217909|dbj|BAA03131.1| glycolate oxidase [Cucurbita cv.
  misc_feature (1)..(348): Homolog of NCBI NO: 27549566 NR Description: glycolate oxidase [Zantedeschia aethiopica]
  misc_feature (1)..(348): Homolog of NCBI NO: 121530 NR Description: (S)-2-hydroxy-acid oxidase, peroxisomal
  misc_feature (1)..(348): Homolog of NCBI NO: 999542 NR Description: Chain A, Glycolate Oxidase (E.C.1.1.3.15) Mutant Tyr 24 Replaced By Phe (Y24f) >gi|999543|pdb|1GYL|B Chain B,
  misc_feature (1)..(347): Homolog of NCBI NO: 228403 NR Description: glycolate oxidase
  misc_feature (28)..(348): Homolog of NCBI NO: 30683154 NR Description: glycolate oxidase -related [Arabidopsis thaliana]

SEQ ID NO: 99516 - DNA, 1073 bp, Arabidopsis thaliana
  misc_feature (1)..(1073): Ceres Seq. ID no. 13603112
  misc_feature: MA Experiment ID: 108573 Result: Up-regulated in Transcription
  misc_feature: MA Experiment 108573 PARAMETER Experiment Name: At_Drought_cDNA_P Parameter: Timepoint (hr) Value: 6
  misc_feature: MA Experiment 108573 PARAMETER Experiment Name: At_Drought_cDNA_P Parameter: Tissue Value: Aerial
  misc_feature: MA Experiment 108573 PARAMETER Experiment Name: At_Drought_cDNA_P Parameter: Treatment Value: Drought vs. No Drought
  misc_feature: MA Experiment ID: 108607 Result: Up-regulated in Transcription
  misc_feature: MA Experiment 108607 PARAMETER Experiment Name: At_100uM_ABA_cDNA_P Parameter: Timepoint (hr) Value: 4
  misc_feature: MA Experiment 108607 PARAMETER Experiment Name: At_100uM_ABA_cDNA_P Parameter: Tissue Value: Aerial
  misc_feature: MA Experiment 108607 PARAMETER Experiment Name: At_100uM_ABA_cDNA_P Parameter: Treatment Value: 100uM ABA vs. No Treatment
  misc_feature: MA Experiment ID: 20000069 Result: Up-regulated in Transcription
  misc_feature: MA Experiment 20000069 PARAMETER Experiment Name: At_100uM_ABA_Mutants_cDNA_P Parameter: Plant Line Value: CS23
  misc_feature: MA Experiment 20000069 PARAMETER Experiment Name: At_100uM_ABA_Mutants_cDNA_P Parameter: Timepoint (hr) Value: 6
  misc_feature: MA Experiment 20000069 PARAMETER Experiment Name: At_100uM_ABA_Mutants_cDNA_P Parameter: Tissue Value: Aerial
  misc_feature: MA Experiment 20000069 PARAMETER Experiment Name: At_100uM_ABA_Mutants_cDNA_P Parameter: Treatment Value: 100uM ABA vs. No Treatment
  misc_feature: MA Experiment ID: 20000070 Result: Up-regulated in Transcription
  misc_feature: MA Experiment 20000070 PARAMETER Experiment Name: At_100uM_ABA_Mutants_cDNA_P Parameter: Plant Line Value: CS24
  misc_feature: MA Experiment 20000070 PARAMETER Experiment Name: At_100uM_ABA_Mutants_cDNA_P Parameter: Timepoint (hr) Value: 6
  misc_feature: MA Experiment 20000070 PARAMETER Experiment Name: At_100uM_ABA_Mutants_cDNA_P Parameter: Tissue Value: Aerial
  misc_feature: MA Experiment 20000070 PARAMETER Experiment Name: At_100uM_ABA_Mutants_cDNA_P Parameter: Treatment Value: 100uM ABA vs. No Treatment
  misc_feature: MA Experiment ID: 20000071 Result: Up-regulated in Transcription
  misc_feature: MA Experiment 20000071 PARAMETER Experiment Name: At_100uM_ABA_Mutants_cDNA_P Parameter: Plant Line Value: CS8104
  misc_feature: MA Experiment 20000071 PARAMETER Experiment Name: At_100uM_ABA_Mutants_cDNA_P Parameter: Timepoint (hr) Value: 6
  misc_feature: MA Experiment 20000071 PARAMETER Experiment Name: At_100uM_ABA_Mutants_cDNA_P Parameter: Tissue Value: Aerial
  misc_feature: MA Experiment 20000071 PARAMETER Experiment Name: At_100uM_ABA_Mutants_cDNA_P Parameter: Treatment Value: 100uM ABA vs. No Treatment
  misc_feature: MA Experiment ID: 20000072 Result: Up-regulated in Transcription
  misc_feature: MA Experiment 20000072 PARAMETER Experiment Name: At_100uM_ABA_Mutants_cDNA_P Parameter: Plant Line Value: CS8105
  misc_feature: MA Experiment 20000072 PARAMETER Experiment Name: At_100uM_ABA_Mutants_cDNA_P Parameter: Timepoint (hr) Value: 6
  misc_feature: MA Experiment 20000072 PARAMETER Experiment Name: At_100uM_ABA_Mutants_cDNA_P Parameter: Tissue Value: Aerial
  misc_feature: MA Experiment 20000072 PARAMETER Experiment Name: At_100uM_ABA_Mutants_cDNA_P Parameter: Treatment Value: 100uM ABA vs. No Treatment
  misc_feature: MA Experiment ID: 20000086 Result: Up-regulated in Transcription
  misc_feature: MA Experiment 20000086 PARAMETER Experiment Name: At_100uM_ABA_Mutants_cDNA_P Parameter: Plant Line Value: CS22
  misc_feature: MA Experiment 20000086 PARAMETER Experiment Name: At_100uM_ABA_Mutants_cDNA_P Parameter: Timepoint (hr) Value: 6
  misc_feature: MA Experiment 20000086 PARAMETER Experiment Name: At_100uM_ABA_Mutants_cDNA_P Parameter: Tissue Value: Aerial
  misc_feature: MA Experiment 20000086 PARAMETER Experiment Name: At_100uM_ABA_Mutants_cDNA_P Parameter: Treatment Value: 100uM ABA vs. No Treatment
  misc_feature: MA Experiment ID: 20000089 Result: Up-regulated in Transcription
  misc_feature: MA Experiment ID: 20000093 Result: Up-regulated in Transcription
  misc_feature: MA Experiment 20000093 PARAMETER Experiment Name: At_42deg_Heat_cDNA_P Parameter: Temperature (deg C) Value: 42 vs. 22
  misc_feature: MA Experiment 20000093 PARAMETER Experiment Name: At_42deg_Heat_cDNA_P Parameter: Timepoint (hr) Value: 0.5
  misc_feature: MA Experiment 20000093 PARAMETER Experiment Name: At_42deg_Heat_cDNA_P Parameter: Tissue Value: Aerial
  misc_feature: MA Experiment ID: 20000112 Result: Up-regulated in Transcription
  misc_feature: MA Experiment 20000112 PARAMETER Experiment Name: At_42deg_Heat_cDNA_P Parameter: Temperature (deg C) Value: 42 vs. 22
  misc_feature: MA Experiment 20000112 PARAMETER Experiment Name: At_42deg_Heat_cDNA_P Parameter: Timepoint (hr) Value: 2
  misc_feature: MA Experiment 20000112 PARAMETER Experiment Name: At_42deg_Heat_cDNA_P Parameter: Tissue Value: Aerial
  misc_feature: MA Experiment ID: 20000144 Result: Up-regulated in Transcription
  misc_feature: MA Experiment 20000144 PARAMETER Experiment Name: At_42deg_Heat_cDNA_P Parameter: Temperature (deg C) Value: 42 vs. 22
  misc_feature: MA Experiment 20000144 PARAMETER Experiment Name: At_42deg_Heat_cDNA_P Parameter: Timepoint (hr) Value: 1
  misc_feature: MA Experiment 20000144 PARAMETER Experiment Name: At_42deg_Heat_cDNA_P Parameter: Tissue Value: Aerial
  misc_feature: MA Experiment ID: 20000171 Result: Up-regulated in Transcription
  misc_feature: MA Experiment 20000171 PARAMETER Experiment Name: At_42deg_Heat_P Parameter: Age (day) Value: 14
  misc_feature: MA Experiment 20000171 PARAMETER Experiment Name: At_42deg_Heat_P Parameter: Organism Value: A. thaliana
  misc_feature: MA Experiment 20000171 PARAMETER Experiment Name: At_42deg_Heat_P Parameter: Plant Line Value: WS
  misc_feature: MA Experiment 20000171 PARAMETER Experiment Name: At_42deg_Heat_P Parameter: Temperature (deg C) Value: 42 vs. 22
  misc_feature: MA Experiment 20000171 PARAMETER Experiment Name: At_42deg_Heat_P Parameter: Timepoint (hr) Value: 1
  misc_feature: MA Experiment 20000171 PARAMETER Experiment Name: At_42deg_Heat_P Parameter: Tissue Value: Aerial
  misc_feature: MA Experiment ID: 20000224 Result: Down-regulated in Transcription
  misc_feature: MA Experiment ID: 20000235 Result: Down-regulated in Transcription
  misc_feature: MA Experiment 20000235 PARAMETER Experiment Name: At_Siliques_P Parameter: Age (day) Value: 21
  misc_feature: MA Experiment 20000235 PARAMETER Experiment Name: At_Siliques_P Parameter: Organism Value: A. thaliana
  misc_feature: MA Experiment 20000235 PARAMETER Experiment Name: At_Siliques_P Parameter: Plant Line Value: WS
  misc_feature: MA Experiment 20000235 PARAMETER Experiment Name: At_Siliques_P Parameter: Tissue Value: 5-10mm Siliques vs. Whole Plant
  misc_feature: MA Experiment ID: 20000437 Result: Up-regulated in Transcription
  misc_feature: MA Experiment 20000437 PARAMETER Experiment Name: At_Drought_P Parameter: Age (day) Value: 8
  misc_feature: MA Experiment 20000437 PARAMETER Experiment Name: At_Drought_P Parameter: Organism Value: A. thaliana
  misc_feature: MA Experiment 20000437 PARAMETER Experiment Name: At_Drought_P Parameter: Plant Line Value: WS
  misc_feature: MA Experiment 20000437 PARAMETER Experiment Name: At_Drought_P Parameter: Timepoint (hr) Value: 24
  misc_feature: MA Experiment 20000437 PARAMETER Experiment Name: At_Drought_P Parameter: Tissue Value: Whole Plant
  misc_feature: MA Experiment 20000437 PARAMETER Experiment Name: At_Drought_P Parameter: Treatment Value: Drought vs. No Drought
ctctctctgttgctaaaaacatttagatcgcttacctggttcgtgcacctgattagctgctgttatttctttttcttcccagagttcaggtcgttaaaaatctaatcttttttggtgggtgaagactcttctttatcaaatcaacctaatttctcagattctcagatctcaagagttttgtttttttagcaacaatgaataaaaatccacggctcgatttttcctcaccgtcgtcgttagccactatctccgactctgcagacggtgagctgaatgaagacgacatctttgcaatcgacatatctcacgcgccgcctcaagctcgtcattctcctgtatcatctccggcgaagcaacaaactcctgctcgtcagcttcagaggagcaaaagcggtttgaagaatgtggaagcgtctggtatcctcgcggctcttcctgaatcatctgggagtagtagttacttaagtcatgtctttcaccacaaacctgcggctgctctctctacttctgtctcctccacagcttcttcatcgtcttcttcaggtggtggtgcatcagctggttcttcgtcttcagctcgagctatcccgaccgcgcctaaaccgcctcaagagaggcttccgttttcagcttcttttgtaggtggtgggaagtatcctcaatcagctccggttcaagtgccgttagtgtcgtctgcgatgatgaatcgtcataagaaggaattcaagctgactgatgtggtggatgatgatgaggaagaagaggaaggcgaaatgcttccgcctcacgagattgtagctcggtctttggctcagtcgtcgttgttatcttgctctgtgcttgaaggagcaggaaggacacttaaagggagagatctccggcaggtaaggaatgctgttttcagaagaaccggtttcatagattgagtgtttttttttttactctcttcttcagaaagacgattctttaatttgttatcccaattgatgaactactttatcccttatttggccacagaaacttgtcaatgtgtatgttcatatgttgtctacgttagacgatttgtttacttc

SEQ ID NO: 99517 - protein, 243 aa, Arabidopsis thaliana
  peptide (1)..(243): Ceres Seq. ID no. 13603113
  misc_feature (22)..(243): Pfam Name: Protein of unknown function, DUF584 Pfam Description: Protein of unknown function, DUF584
  misc_feature (1)..(243): Homolog of NCBI NO: 18400614 NR Description: expressed protein [Arabidopsis thaliana] emb|CAA17164.1~gene_id:K15M2.18~similar to unknown protein
  misc_feature (1)..(243): Homolog of NCBI NO: 15983450 NR Description: AT3g15040/K15M2_18 [Arabidopsis thaliana]
  misc_feature (1)..(243): Homolog of NCBI NO: 21594619 NR Description: unknown [Arabidopsis thaliana]
  misc_feature (9)..(243): Homolog of NCBI NO: 38346328 NR Description: OJ000126_13.10 [Oryza sativa (japonica
  misc_feature (9)..(243): Homolog of NCBI NO: 37534318 NR Description: putative prolyl 4-hydroxylase alpha subunit-like
  misc_feature (109)..(237): Homolog of NCBI NO: 34908520 NR Description: P0423B08.9 [Oryza sativa (japonica
  misc_feature (81)..(243): Homolog of NCBI NO: 21741306 NR Description: OSJNBb0103I08.8 [Oryza sativa (japonica
  misc_feature (149)..(243): Homolog of NCBI NO: 18412629 NR Description: expressed protein [Arabidopsis thaliana]
  misc_feature (149)..(243): Homolog of NCBI NO: 26452217 NR Description: unknown protein [Arabidopsis thaliana]
  misc_feature (149)..(243): Homolog of NCBI NO: 25354620 NR Description: hypothetical protein AT4g04630 [imported] - thaliana >gi|4773907|gb|AAD29777.1|AF074021_9 hypothetical [Arabidopsis thaliana] >gi|7267221|emb|CAB80828.1| putative
MNKNPRLDFSSPSSLATISDSADGELNEDDIFAIDISHAPPQARHSPVSSPAKQQTPARQLQRSKSGLKNVEASGILAALPESSGSSSYLSHVFHHKPAAALSTSVSSTASSSSSSGGGASAGSSSSARAIPTAPKPPQERLPFSASFVGGGKYPQSAPVQVPLVSSAMMNRHKKEFKLTDVVDDDEEEEEGEMLPPHEIVARSLAQSSLLSCSVLEGAGRTLKGRDLRQVRNAVFRRTGFID

SEQ ID NO: 99518 - DNA, 1404 bp, Arabidopsis thaliana
  misc_feature (1)..(1404): Ceres Seq. ID no. 13603114
  misc_feature: MA Experiment ID: 108434 Result: Up-regulated in Transcription
  misc_feature: MA Experiment 108434 PARAMETER Experiment Name: At_Root_Tips_cDNA_P Parameter: Tissue Value: Root Tips
  misc_feature: MA Experiment ID: 20000185 Result: Up-regulated in Transcription
  misc_feature: MA Experiment 20000185 PARAMETER Experiment Name: At_Roots__P Parameter: Age (day) Value: 7 vs. 21
  misc_feature: MA Experiment 20000185 PARAMETER Experiment Name: At_Roots__P Parameter: Organism Value: A. thaliana
  misc_feature: MA Experiment 20000185 PARAMETER Experiment Name: At_Roots__P Parameter: Tissue Value: Roots vs. Whole Plant
  misc_feature: MA Experiment ID: 20000264 Result: Up-regulated in Transcription
  misc_feature: MA Experiment 20000264 PARAMETER Experiment Name: At_Open_Flower_P Parameter: Age (day) Value: 21
  misc_feature: MA Experiment 20000264 PARAMETER Experiment Name: At_Open_Flower_P Parameter: Plant Line Value: WS
  misc_feature: MA Experiment 20000264 PARAMETER Experiment Name: At_Open_Flower_P Parameter: Tissue Value: Open Flower vs. Whole Plant
  misc_feature: MA Experiment ID: 20000265 Result: Up-regulated in Transcription
  misc_feature: MA Experiment 20000265 PARAMETER Experiment Name: At_Open_Flower_P Parameter: Age (day) Value: 21
  misc_feature: MA Experiment 20000265 PARAMETER Experiment Name: At_Open_Flower_P Parameter: Plant Line Value: WS
  misc_feature: MA Experiment 20000265 PARAMETER Experiment Name: At_Open_Flower_P Parameter: Tissue Value: Closed Flower vs. Whole Plant
  misc_feature: MA Experiment ID: 20000286 Result: Up-regulated in Transcription
  misc_feature: MA Experiment 20000286 PARAMETER Experiment Name: At_Open_Flower_P Parameter: Age (day) Value: 21
  misc_feature: MA Experiment 20000286 PARAMETER Experiment Name: At_Open_Flower_P Parameter: Plant Line Value: WS
  misc_feature: MA Experiment 20000286 PARAMETER Experiment Name: At_Open_Flower_P Parameter: Tissue Value: Half Open vs. Whole Plant
  misc_feature: MA Experiment ID: 20000794 Result: Up-regulated in Transcription
  misc_feature: MA Experiment 20000794 PARAMETER Experiment Name: At_Petals_P Parameter: Age (day) Value: 23-25 days
  misc_feature: MA Experiment 20000794 PARAMETER Experiment Name: At_Petals_P Parameter: Plant Line Value: WS
  misc_feature: MA Experiment 20000794 PARAMETER Experiment Name: At_Petals_P Parameter: Tissue Value: Petals vs. Whole plant
gcatcaacgaagaagaagaagaaaaggacgagtagattgatttcttagacgacggagaaatgcgagtgatgagatcattgcgcggtaattccggtgctggattggttttccggccggcgaggttaaattctcttcggagcgtctttaccggttgccgtgctgtgattttgccccgctttggtggtccggaggtttttgagctccgggagaatgttccggtgccgaatctgaatccaaatgaggttcttgtcaaggcgaaagctgtctccgttaatcctcttgattgcagaatacgagctggatatggacgttctgtattccaaccgcatctacctattatagttggacgtgatgtcagtggtgaagttgcggcaattgggacttcagtaaagtcacttaaagtaggacaagaagtttttggtgcgttgcatccgacggcgttaagaggtacttatactgactatggaattctttcggaagacgaactcacggaaaagccatcatcaatttcacatgtggaagcaagtgccattccttttgcagctttgactgcttggcgtgctttgaagagtaatgcaaggataactgaaggacaaagactattagtctttggaggaggaggagcagtaggtttttctgcaatccagcttgcggtagcatctgggtgtcatgttacagcctcttgtgttggtcagactaaagacagaatacttgcagctggggccgagcaagctgttgactacacaaccgaggacattgagttggcggtaaaaggaaaatttgatgccgtgttagatactattggtgggcctgaaacggagagaataggcattaacttcttaaggaagggtggaaactatatgactcttcagggtgaggctgcatcgttgactgataaatacggttttgtggttgggcttccccttgcaacatcgctcttgatgaagaaaaagatacaatatcagtattctcatggaatagactattggtggacgtatatgagggctgatcctgaaggtctagccgagattcagcgtttagttggagctggaaagctaaaaatacctgttgaaaaaacatttccaataaccgatgttgtagcagctcatgaagccaaggagaagaaacagattccgggtaaggtggttctagagttctgaactacatatacatagtagaaataataacacctgcatagttctctagcagttgttctttctagaatttacacgcagagaaacaaatgtttcgcgtctggagttttctgtaaatgagatctatcaggcttagattcagatcaagaacttgaagtgtctgtatagactttccaaagggttcgtttttatttggattttgtctgtgttgcaaactactaagccaagtaatggaaatggtttagaaaga

SEQ ID NO: 99519 - protein, 366 aa, Arabidopsis thaliana; identical to SEQ ID NO: 22703
  peptide (1)..(366): Ceres Seq. ID no. 13603115
  misc_feature (1)..(366): Homolog of NCBI NO: 15232485 NR Description: oxidoreductase, zinc-binding dehydrogenase family
  misc_feature (1)..(366): Homolog of NCBI NO: 21592930 NR Description: zinc-binding dehydrogenase, putative [Arabidopsis
  misc_feature (2)..(366): Homolog of NCBI NO: 30351052 NR Description: oxidoreductase [Setaria italica]
  misc_feature (2)..(344): Homolog of NCBI NO: 34909604 NR Description: putative oxidoreductase-like protein [Oryza
  misc_feature (17)..(364): Homolog of NCBI NO: 14522884 NR Description: NOGO-interacting mitochondrial protein [Mus
  misc_feature (17)..(364): Homolog of NCBI NO: 31543608 NR Description: reticulon 4 interacting protein 1; mitochondrial protein; reticulon 4 interacting protein 1, DNA segment, Chr 10, ERATO Doi 690, expressed [Mus musculus]
  misc_feature (34)..(364): Homolog of NCBI NO: 14249346 NR Description: reticulon 4 interacting protein 1; mitochondrial protein [Homo sapiens]
  misc_feature (15)..(364): Homolog of NCBI NO: 14522882 NR Description: NOGO-interacting mitochondrial protein [Homo
  misc_feature (33)..(265): Homolog of NCBI NO: 21219303 NR Description: putative zinc-binding oxidoreductase coelicolor A3(2)] >gi|3293547|gb|AAC25771.1| putative
  misc_feature (316)..(365): Homolog of NCBI NO: 21219303 NR Description: putative zinc-binding oxidoreductase coelicolor A3(2)] >gi|3293547|gb|AAC25771.1| putative

SEQ ID NO: 99520 - protein, 363 aa, Arabidopsis thaliana; identical to SEQ ID NO: 22704
  peptide (1)..(363): Ceres Seq. ID no. 13603116
  misc_feature (1)..(363): Homolog of NCBI NO: 15232485 NR Description: oxidoreductase, zinc-binding dehydrogenase family
  misc_feature (1)..(363): Homolog of NCBI NO: 21592930 NR Description: zinc-binding dehydrogenase, putative [Arabidopsis
  misc_feature (1)..(363): Homolog of NCBI NO: 30351052 NR Description: oxidoreductase [Setaria italica]
  misc_feature (1)..(341): Homolog of NCBI NO: 34909604 NR Description: putative oxidoreductase-like protein [Oryza
  misc_feature (14)..(361): Homolog of NCBI NO: 14522884 NR Description: NOGO-interacting mitochondrial protein [Mus
  misc_feature (14)..(361): Homolog of NCBI NO: 31543608 NR Description: reticulon 4 interacting protein 1; mitochondrial protein; reticulon 4 interacting protein 1, DNA segment, Chr 10, ERATO Doi 690, expressed [Mus musculus]
  misc_feature (31)..(361): Homolog of NCBI NO: 14249346 NR Description: reticulon 4 interacting protein 1; mitochondrial protein [Homo sapiens]
  misc_feature (12)..(361): Homolog of NCBI NO: 14522882 NR Description: NOGO-interacting mitochondrial protein [Homo
  misc_feature (30)..(262): Homolog of NCBI NO: 21219303 NR Description: putative zinc-binding oxidoreductase coelicolor A3(2)] >gi|3293547|gb|AAC25771.1| putative
  misc_feature (313)..(362): Homolog of NCBI NO: 21219303 NR Description: putative zinc-binding oxidoreductase coelicolor A3(2)] >gi|3293547|gb|AAC25771.1| putative

SEQ ID NO: 99521 - DNA, 1751 bp, Arabidopsis thaliana
  misc_feature (1)..(1751): Ceres Seq. ID no. 13603121
  misc_feature: MA Experiment ID: 108462 Result: Down-regulated in Transcription
  misc_feature: MA Experiment 108462 PARAMETER Experiment Name: At_Germinating_Seeds_cDNA_P Parameter: Age (day) Value: 2 vs. 0
  misc_feature: MA Experiment 108462 PARAMETER Experiment Name: At_Germinating_Seeds_cDNA_P Parameter: Tissue Value: Germinating Seeds
  misc_feature: MA Experiment ID: 108463 Result: Down-regulated in Transcription
  misc_feature: MA Experiment 108463 PARAMETER Experiment Name: At_Germinating_Seeds_cDNA_P Parameter: Age (day) Value: 3 vs. 0
  misc_feature: MA Experiment 108463 PARAMETER Experiment Name: At_Germinating_Seeds_cDNA_P Parameter: Tissue Value: Germinating Seeds
  misc_feature: MA Experiment ID: 108464 Result: Down-regulated in Transcription
  misc_feature: MA Experiment 108464 PARAMETER Experiment Name: At_Germinating_Seeds_cDNA_P Parameter: Age (day) Value: 4 vs. 0
  misc_feature: MA Experiment 108464 PARAMETER Experiment Name: At_Germinating_Seeds_cDNA_P Parameter: Tissue Value: Germinating Seeds
  misc_feature: MA Experiment ID: 108573 Result: Up-regulated in Transcription
  misc_feature: MA Experiment 108573 PARAMETER Experiment Name: At_Drought_cDNA_P Parameter: Timepoint (hr) Value: 6
  misc_feature: MA Experiment 108573 PARAMETER Experiment Name: At_Drought_cDNA_P Parameter: Tissue Value: Aerial
  misc_feature: MA Experiment 108573 PARAMETER Experiment Name: At_Drought_cDNA_P Parameter: Treatment Value: Drought vs. No Drought
  misc_feature: MA Experiment ID: 20000173 Result: Down-regulated in Transcription
  misc_feature: MA Experiment 20000173 PARAMETER Experiment Name: At_42deg_Heat_P Parameter: Age (day) Value: 14
  misc_feature: MA Experiment 20000173 PARAMETER Experiment Name: At_42deg_Heat_P Parameter: Organism Value: A. thaliana
  misc_feature: MA Experiment 20000173 PARAMETER Experiment Name: At_42deg_Heat_P Parameter: Plant Line Value: WS
  misc_feature: MA Experiment 20000173 PARAMETER Experiment Name: At_42deg_Heat_P Parameter: Temperature (deg C) Value: 42 vs. 22
  misc_feature: MA Experiment 20000173 PARAMETER Experiment Name: At_42deg_Heat_P Parameter: Timepoint (hr) Value: 6
  misc_feature: MA Experiment 20000173 PARAMETER Experiment Name: At_42deg_Heat_P Parameter: Tissue Value: Aerial
  misc_feature: MA Experiment ID: 20000179 Result: Down-regulated in Transcription
  misc_feature: MA Experiment 20000179 PARAMETER Experiment Name: At_Germinating_Seeds_P Parameter: Age (hr) Value: 6 vs. 0
  misc_feature: MA Experiment 20000179 PARAMETER Experiment Name: At_Germinating_Seeds_P Parameter: Tissue Value: Germinating Seeds
  misc_feature: MA Experiment ID: 20000180 Result: Down-regulated in Transcription
  misc_feature: MA Experiment 20000180 PARAMETER Experiment Name: At_Germinating_Seeds_P Parameter: Age (hr) Value: 24 vs. 0
  misc_feature: MA Experiment 20000180 PARAMETER Experiment Name: At_Germinating_Seeds_P Parameter: Tissue Value: Germinating Seeds
  misc_feature: MA Experiment ID: 20000184 Result: Down-regulated in Transcription
  misc_feature: MA Experiment 20000184 PARAMETER Experiment Name: At_Shoots__P Parameter: Age (day) Value: 7
  misc_feature: MA Experiment 20000184 PARAMETER Experiment Name: At_Shoots__P Parameter: Tissue Value: Shoots vs. Whole Plant
  misc_feature: MA Experiment ID: 20000224 Result: Up-regulated in Transcription
  misc_feature: MA Experiment ID: 20000227 Result: Up-regulated in Transcription
  misc_feature: MA Experiment 20000227 PARAMETER Experiment Name: At_Root-Tips-vs-Tops_P Parameter: Tissue Value: Root Tips vs. Root Tops
  misc_feature: MA Experiment ID: 20000437 Result: Up-regulated in Transcription
  misc_feature: MA Experiment 20000437 PARAMETER Experiment Name: At_Drought_P Parameter: Age (day) Value: 8
  misc_feature: MA Experiment 20000437 PARAMETER Experiment Name: At_Drought_P Parameter: Organism Value: A. thaliana
  misc_feature: MA Experiment 20000437 PARAMETER Experiment Name: At_Drought_P Parameter: Plant Line Value: WS
  misc_feature: MA Experiment 20000437 PARAMETER Experiment Name: At_Drought_P Parameter: Timepoint (hr) Value: 24
  misc_feature: MA Experiment 20000437 PARAMETER Experiment Name: At_Drought_P Parameter: Tissue Value: Whole Plant
  misc_feature: MA Experiment 20000437 PARAMETER Experiment Name: At_Drought_P Parameter: Treatment Value: Drought vs. No Drought
  misc_feature: MA Experiment ID: 20000794 Result: Up-regulated in Transcription
  misc_feature: MA Experiment 20000794 PARAMETER Experiment Name: At_Petals_P Parameter: Age (day) Value: 23-25 days
  misc_feature: MA Experiment 20000794 PARAMETER Experiment Name: At_Petals_P Parameter: Plant Line Value: WS
  misc_feature: MA Experiment 20000794 PARAMETER Experiment Name: At_Petals_P Parameter: Tissue Value: Petals vs. Whole plant
  misc_feature: MA Experiment ID: 20001911 Result: Up-regulated in Transcription
  misc_feature: MA Experiment 20001911 PARAMETER Experiment Name: At_Drought_Reproduction_P Parameter: Age (day) Value: 40
  misc_feature: MA Experiment 20001911 PARAMETER Experiment Name: At_Drought_Reproduction_P Parameter: Organism Value: A. thaliana
  misc_feature: MA Experiment 20001911 PARAMETER Experiment Name: At_Drought_Reproduction_P Parameter: Plant Line Value: WS
  misc_feature: MA Experiment 20001911 PARAMETER Experiment Name: At_Drought_Reproduction_P Parameter: Timepoint (day) Value: 10
  misc_feature: MA Experiment 20001911 PARAMETER Experiment Name: At_Drought_Reproduction_P Parameter: Tissue Value: Flowers
  misc_feature: MA Experiment 20001911 PARAMETER Experiment Name: At_Drought_Reproduction_P Parameter: Treatment Value: Drought vs. No Drought
attcagcttgctcgcaacgaaacatattttgttggaaaaaaaaaacaaaggaaatcgccatggaagacgttaaccagttgttcgatgctgctttcgagttcgcacactatcccggcgctcaaaacgaaacttccgttaaggaattcctcgatcgcttccctcttcctgttatcttcaatgctttgcaaaccgatccggatataccaggatttgaaaacacgttggtgacttgcttggagaggttgtttaagactaagtatggcgcttcacttattcctcagtatatgcctgttctgcaagttggtctcaaggcagattctgcagttgtgaaatctctggcttgcaaaactgttctgtgtctcttggaggattgcgatacaaacgacgtttcttctgttcagctagttgttaacaatggcatataccctcttctacttgactatatcattaacagcgatgatgaagttgcaaatgctgcaagtgagacaattaagagcctagctcgctttccagatgcaatgtccgtaattttcccttctgaaaccaacgatcctacacatcttcgtaaccttgctgcaaggtgttcatcactggcacgagtccgggttttgtcgttgatagtgaagcttttttcgatttctcgacttgtagcttcagaagttaagaaatcggggcttcttgatttactggaggcagaaatgaagggtacaaaagacactcttgtgatcttaaatgttctggaactctactatgagttaatggaagtggagcacagttcagagttcgtgccacaaacatcacttattcagctgttgtgttctatcatcagtggtacatcgacgggaccctatgaaaagttaagagcaatgatgataagtggcagactactctcaaaggaaaatatctacaaagtcgtggaagaagctagtgtgaaggcgttaatttcagctattgatgggagtctggagtcagttgagatgaatgatactgatgcacaggaagctgccattgatgcacttggtcagatgggatcaacaacgaagggagcggatcttgtcctttcaacttcacctccagctgcaagacatgttgtagcttctgcctttgatcgtaatgcacatggaaaacagttggctgcactgcatgcactggcaaacatcgcaggtgaaacacgacctaagagcaacagaatagttgatggaaaagctgaagaaagccttagatgtttgatatacgacgctgcagcacagagcacaaaactaaccccatccggtttattcctctcagttcttcaacaaagctcagagattcgtcttgcgggttatcgaacgttaacagcattagtggctcggccatggtgcctggtggaaatcttggccaaagaagagataataaacatagttacggatgcaaccactgaaactgcaaaaatagcaatggaagcaaggtataactgctgcaaagcaattcacgaagcgttcttgtgtagtaactttgttgatgaccctcgtcgtctaaaaaccggtgacaagttgcaagaagctgttcgaagtggaccatatatgtcgaagaagcacagaggcgcacgaccagaagtaatgacaggcgaaggattttaaagacaactaaagaaaaaaagttaaaacttctttgttaaccaaagttttttatatcttctctggctgttcgataagtaaactttagttctttctataaacaacgaaggctaggagtaaacgttttggcggttg

SEQ ID NO: 99522 - protein, 538 aa, Arabidopsis thaliana
  peptide (1)..(538): Ceres Seq. ID no. 13603122
  misc_feature (20)..(538): Homolog of NCBI NO: 18400660 NR Description: expressed protein [Arabidopsis thaliana]
  misc_feature (20)..(538): Homolog of NCBI NO: 21593496 NR Description: unknown [Arabidopsis thaliana]
  misc_feature (20)..(308): Homolog of NCBI NO: 11994507 NR Description: gene_id:F4B12.9~unknown protein [Arabidopsis
  misc_feature (310)..(538): Homolog of NCBI NO: 11994507 NR Description: gene_id:F4B12.9~unknown protein [Arabidopsis
  misc_feature (71)..(523): Homolog of NCBI NO: 505106 NR Description: KIAA0072 [Homo sapiens]
  misc_feature (71)..(523): Homolog of NCBI NO: 4826952 NR Description: proteasome 26S non-ATPase subunit 5; 26S protease S5 basic; 26S proteasome subunit S5B; 26S protease subunit 5b=50
SACSQRNIFCWKKKTKEIAMEDVNQLFDAAFEFAHYPGAQNETSVKEFLDRFPLPVIFNALQTDPDIPGFENTLVTCLERLFKTKYGASLIPQYMPVLQVGLKADSAVVKSLACKTVLCLLEDCDTNDVSSVQLVVNNGIYPLLLDYIINSDDEVANAASETIKSLARFPDAMSVIFPSETNDPTHLRNLAARCSSLARVRVLSLIVKLFSISRLVASEVKKSGLLDLLEAEMKGTKDTLVILNVLELYYELMEVEHSSEFVPQTSLIQLLCSIISGTSTGPYEKLRAMMISGRLLSKENIYKVVEEASVKALISAIDGSLESVEMNDTDAQEAAIDALGQMGSTTKGADLVLSTSPPAARHVVASAFDRNAHGKQLAALHALANIAGETRPKSNRIVDGKAEESLRCLIYDAAAQSTKLTPSGLFLSVLQQSSEIRLAGYRTLTALVARPWCLVEILAKEEIINIVTDATTETAKIAMEARYNCCKAIHEAFLCSNFVDDPRRLKTGDKLQEAVRSGPYMSKKHRGARPEVMTGEGF

SEQ ID NO: 99523 - protein, 519 aa, Arabidopsis thaliana
  peptide (1)..(519): Ceres Seq. ID no. 13603123
  misc_feature (1)..(519): Homolog of NCBI NO: 18400660 NR Description: expressed protein [Arabidopsis thaliana]
  misc_feature (1)..(519): Homolog of NCBI NO: 21593496 NR Description: unknown [Arabidopsis thaliana]
  misc_feature (1)..(289): Homolog of NCBI NO: 11994507 NR Description: gene_id:F4B12.9~unknown protein [Arabidopsis
  misc_feature (291)..(519): Homolog of NCBI NO: 11994507 NR Description: gene_id:F4B12.9~unknown protein [Arabidopsis
  misc_feature (52)..(504): Homolog of NCBI NO: 505106 NR Description: KIAA0072 [Homo sapiens]
  misc_feature (52)..(504): Homolog of NCBI NO: 4826952 NR Description: proteasome 26S non-ATPase subunit 5; 26S protease S5 basic; 26S proteasome subunit S5B; 26S protease subunit 5b=50
MEDVNQLFDAAFEFAHYPGAQNETSVKEFLDRFPLPVIFNALQTDPDIPGFENTLVTCLERLFKTKYGASLIPQYMPVLQVGLKADSAVVKSLACKTVLCLLEDCDTNDVSSVQLVVNNGIYPLLLDYIINSDDEVANAASETIKSLARFPDAMSVIFPSETNDPTHLRNLAARCSSLARVRVLSLIVKLFSISRLVASEVKKSGLLDLLEAEMKGTKDTLVILNVLELYYELMEVEHSSEFVPQTSLIQLLCSIISGTSTGPYEKLRAMMISGRLLSKENIYKVVEEASVKALISAIDGSLESVEMNDTDAQEAAIDALGQMGSTTKGADLVLSTSPPAARHVVASAFDRNAHGKQLAALHALANIAGETRPKSNRIVDGKAEESLRCLIYDAAAQSTKLTPSGLFLSVLQQSSEIRLAGYRTLTALVARPWCLVEILAKEEIINIVTDATTETAKIAMEARYNCCKAIHEAFLCSNFVDDPRRLKTGDKLQEAVRSGPYMSKKHRGARPEVMTGEGF

SEQ ID NO: 99524 - protein, 444 aa, Arabidopsis thaliana
  peptide (1)..(444): Ceres Seq. ID no. 13603124
  misc_feature (1)..(444): Homolog of NCBI NO: 18400660 NR Description: expressed protein [Arabidopsis thaliana]
  misc_feature (1)..(444): Homolog of NCBI NO: 21593496 NR Description: unknown [Arabidopsis thaliana]
  misc_feature (1)..(214): Homolog of NCBI NO: 11994507 NR Description: gene_id:F4B12.9~unknown protein [Arabidopsis
  misc_feature (216)..(444): Homolog of NCBI NO: 11994507 NR Description: gene_id:F4B12.9~unknown protein [Arabidopsis
  misc_feature (1)..(429): Homolog of NCBI NO: 505106 NR Description: KIAA0072 [Homo sapiens]
  misc_feature (1)..(429): Homolog of NCBI NO: 4826952 NR Description: proteasome 26S non-ATPase subunit 5; 26S protease S5 basic; 26S proteasome subunit S5B; 26S protease subunit 5b=50
MPVLQVGLKADSAVVKSLACKTVLCLLEDCDTNDVSSVQLVVNNGIYPLLLDYIINSDDEVANAASETIKSLARFPDAMSVIFPSETNDPTHLRNLAARCSSLARVRVLSLIVKLFSISRLVASEVKKSGLLDLLEAEMKGTKDTLVILNVLELYYELMEVEHSSEFVPQTSLIQLLCSIISGTSTGPYEKLRAMMISGRLLSKENIYKVVEEASVKALISAIDGSLESVEMNDTDAQEAAIDALGQMGSTTKGADLVLSTSPPAARHVVASAFDRNAHGKQLAALHALANIAGETRPKSNRIVDGKAEESLRCLIYDAAAQSTKLTPSGLFLSVLQQSSEIRLAGYRTLTALVARPWCLVEILAKEEIINIVTDATTETAKIAMEARYNCCKAIHEAFLCSNFVDDPRRLKTGDKLQEAVRSGPYMSKKHRGARPEVMTGEGF

SEQ ID NO: 99525 - DNA, 1060 bp, Arabidopsis thaliana
  misc_feature (1)..(1060): Ceres Seq. ID no. 13603125
  misc_feature: MA Experiment ID: 108569 Result: Up-regulated in Transcription
  misc_feature: MA Experiment 108569 PARAMETER Experiment Name: At_0.001%_MeJA__cDNA_P Parameter: Timepoint (hr) Value: 6
  misc_feature: MA Experiment 108569 PARAMETER Experiment Name: At_0.001%_MeJA__cDNA_P Parameter: Tissue Value: Aerial
  misc_feature: MA Experiment 108569 PARAMETER Experiment Name: At_0.001%_MeJA__cDNA_P Parameter: Treatment Value: 0.001% MeJA vs. No Treatment
  misc_feature: MA Experiment ID: 108573 Result: Up-regulated in Transcription
  misc_feature: MA Experiment 108573 PARAMETER Experiment Name: At_Drought_cDNA_P Parameter: Timepoint (hr) Value: 6
  misc_feature: MA Experiment 108573 PARAMETER Experiment Name: At_Drought_cDNA_P Parameter: Tissue Value: Aerial
  misc_feature: MA Experiment 108573 PARAMETER Experiment Name: At_Drought_cDNA_P Parameter: Treatment Value: Drought vs. No Drought
  misc_feature: MA Experiment ID: 108574 Result: Up-regulated in Transcription
  misc_feature: MA Experiment 108574 PARAMETER Experiment Name: At_Wounding__cDNA_P Parameter: Timepoint (hr) Value: 1
  misc_feature: MA Experiment 108574 PARAMETER Experiment Name: At_Wounding__cDNA_P Parameter: Tissue Value: Aerial
  misc_feature: MA Experiment 108574 PARAMETER Experiment Name: At_Wounding__cDNA_P Parameter: Treatment Value: Wounding vs. No Wounding
  misc_feature: MA Experiment ID: 108579 Result: Up-regulated in Transcription
  misc_feature: MA Experiment 108579 PARAMETER Experiment Name: At_4deg_Cold_cDNA_P Parameter: Temperature (deg C) Value: 4 vs. 22
  misc_feature: MA Experiment 108579 PARAMETER Experiment Name: At_4deg_Cold_cDNA_P Parameter: Timepoint (hr) Value: 6
  misc_feature: MA Experiment 108579 PARAMETER Experiment Name: At_4deg_Cold_cDNA_P Parameter: Tissue Value: Aerial
  misc_feature: MA Experiment ID: 108595 Result: Up-regulated in Transcription
  misc_feature: MA Experiment 108595 PARAMETER Experiment Name: At_Ler-pi_Ovule_cDNA_P Parameter: Plant Line Value: null
  misc_feature: MA Experiment ID: 20000069 Result: Up-regulated in Transcription
  misc_feature: MA Experiment 20000069 PARAMETER Experiment Name: At_100uM_ABA_Mutants_cDNA_P Parameter: Plant Line Value: CS23
  misc_feature: MA Experiment 20000069 PARAMETER Experiment Name: At_100uM_ABA_Mutants_cDNA_P Parameter: Timepoint (hr) Value: 6
  misc_feature: MA Experiment 20000069 PARAMETER Experiment Name: At_100uM_ABA_Mutants_cDNA_P Parameter: Tissue Value: Aerial
  misc_feature: MA Experiment 20000069 PARAMETER Experiment Name: At_100uM_ABA_Mutants_cDNA_P Parameter: Treatment Value: 100uM ABA vs. No Treatment
  misc_feature: MA Experiment ID: 20000071 Result: Up-regulated in Transcription
  misc_feature: MA Experiment 20000071 PARAMETER Experiment Name: At_100uM_ABA_Mutants_cDNA_P Parameter: Plant Line Value: CS8104
  misc_feature: MA Experiment 20000071 PARAMETER Experiment Name: At_100uM_ABA_Mutants_cDNA_P Parameter: Timepoint (hr) Value: 6
  misc_feature: MA Experiment 20000071 PARAMETER Experiment Name: At_100uM_ABA_Mutants_cDNA_P Parameter: Tissue Value: Aerial
  misc_feature: MA Experiment 20000071 PARAMETER Experiment Name: At_100uM_ABA_Mutants_cDNA_P Parameter: Treatment Value: 100uM ABA vs. No Treatment
  misc_feature: MA Experiment ID: 20000089 Result: Down-regulated in Transcription
  misc_feature: MA Experiment ID: 20000185 Result: Down-regulated in Transcription
  misc_feature: MA Experiment 20000185 PARAMETER Experiment Name: At_Roots__P Parameter: Age (day) Value: 7 vs. 21
  misc_feature: MA Experiment 20000185 PARAMETER Experiment Name: At_Roots__P Parameter: Organism Value: A. thaliana
  misc_feature: MA Experiment 20000185 PARAMETER Experiment Name: At_Roots__P Parameter: Tissue Value: Roots vs. Whole Plant
  misc_feature: MA Experiment ID: 20000224 Result: Down-regulated in Transcription
  misc_feature: MA Experiment ID: 20000227 Result: Down-regulated in Transcription
  misc_feature: MA Experiment 20000227 PARAMETER Experiment Name: At_Root-Tips-vs-Tops_P Parameter: Tissue Value: Root Tips vs. Root Tops
  misc_feature: MA Experiment ID: 20000234 Result: Down-regulated in Transcription
  misc_feature: MA Experiment 20000234 PARAMETER Experiment Name: At_Siliques_P Parameter: Age (day) Value: 21
  misc_feature: MA Experiment 20000234 PARAMETER Experiment Name: At_Siliques_P Parameter: Organism Value: A. thaliana
  misc_feature: MA Experiment 20000234 PARAMETER Experiment Name: At_Siliques_P Parameter: Plant Line Value: WS
  misc_feature: MA Experiment 20000234 PARAMETER Experiment Name: At_Siliques_P Parameter: Tissue Value: Less Than 5mm Siliques vs. Whole Plant
  misc_feature: MA Experiment ID: 20000235 Result: Down-regulated in Transcription
  misc_feature: MA Experiment 20000235 PARAMETER Experiment Name: At_Siliques_P Parameter: Age (day) Value: 21
  misc_feature: MA Experiment 20000235 PARAMETER Experiment Name: At_Siliques_P Parameter: Organism Value: A. thaliana
  misc_feature: MA Experiment 20000235 PARAMETER Experiment Name: At_Siliques_P Parameter: Plant Line Value: WS
  misc_feature: MA Experiment 20000235 PARAMETER Experiment Name: At_Siliques_P Parameter: Tissue Value: 5-10mm Siliques vs. Whole Plant
  misc_feature: MA Experiment ID: 20000264 Result: Down-regulated in Transcription
  misc_feature: MA Experiment 20000264 PARAMETER Experiment Name: At_Open_Flower_P Parameter: Age (day) Value: 21
  misc_feature: MA Experiment 20000264 PARAMETER Experiment Name: At_Open_Flower_P Parameter: Plant Line Value: WS
  misc_feature: MA Experiment 20000264 PARAMETER Experiment Name: At_Open_Flower_P Parameter: Tissue Value: Open Flower vs. Whole Plant
  misc_feature: MA Experiment ID: 20000265 Result: Down-regulated in Transcription
  misc_feature: MA Experiment 20000265 PARAMETER Experiment Name: At_Open_Flower_P Parameter: Age (day) Value: 21
  misc_feature: MA Experiment 20000265 PARAMETER Experiment Name: At_Open_Flower_P Parameter: Plant Line Value: WS
  misc_feature: MA Experiment 20000265 PARAMETER Experiment Name: At_Open_Flower_P Parameter: Tissue Value: Closed Flower vs. Whole Plant
  misc_feature: MA Experiment ID: 20000286 Result: Down-regulated in Transcription
  misc_feature: MA Experiment 20000286 PARAMETER Experiment Name: At_Open_Flower_P Parameter: Age (day) Value: 21
  misc_feature: MA Experiment 20000286 PARAMETER Experiment Name: At_Open_Flower_P Parameter: Plant Line Value: WS
  misc_feature: MA Experiment 20000286 PARAMETER Experiment Name: At_Open_Flower_P Parameter: Tissue Value: Half Open vs. Whole Plant
  misc_feature: MA Experiment ID: 20000436 Result: Up-regulated in Transcription
  misc_feature: MA Experiment 20000436 PARAMETER Experiment Name: At_Drought_P Parameter: Age (day) Value: 7
  misc_feature: MA Experiment 20000436 PARAMETER Experiment Name: At_Drought_P Parameter: Organism Value: A. thaliana
  misc_feature: MA Experiment 20000436 PARAMETER Experiment Name: At_Drought_P Parameter: Plant Line Value: WS
  misc_feature: MA Experiment 20000436 PARAMETER Experiment Name: At_Drought_P Parameter: Timepoint (hr) Value: 12
  misc_feature: MA Experiment 20000436 PARAMETER Experiment Name: At_Drought_P Parameter: Tissue Value: Whole Plant
  misc_feature: MA Experiment 20000436 PARAMETER Experiment Name: At_Drought_P Parameter: Treatment Value: Drought vs. No Drought
  misc_feature: MA Experiment ID: 20000438 Result: Down-regulated in Transcription
  misc_feature: MA Experiment 20000438 PARAMETER Experiment Name: At_Shoots__P Parameter: Age (day) Value: 14
  misc_feature: MA Experiment 20000438 PARAMETER Experiment Name: At_Shoots__P Parameter: Tissue Value: Shoots vs. Whole Plant
  misc_feature: MA Experiment ID: 20000441 Result: Up-regulated in Transcription
  misc_feature: MA Experiment 20000441 PARAMETER Experiment Name: At_1uM_BR-BRZ__P Parameter: Tissue Value: Shoot Apices
  misc_feature: MA Experiment 20000441 PARAMETER Experiment Name: At_1uM_BR-BRZ__P Parameter: Treatment Value: 1uM BR vs. No Treatment
  misc_feature: MA Experiment ID: 20000495 Result: Down-regulated in Transcription
  misc_feature: MA Experiment 20000495 PARAMETER Experiment Name: At_Guard_Cells_P Parameter: Harvest Date Value: 8/2/2002
  misc_feature: MA Experiment 20000495 PARAMETER Experiment Name: At_Guard_Cells_P Parameter: Organism Value: A. thaliana
  misc_feature: MA Experiment 20000495 PARAMETER Experiment Name: At_Guard_Cells_P Parameter: Tissue Value: Guard Cells vs. Leaves
  misc_feature: MA Experiment ID: 20000574 Result: Down-regulated in Transcription
  misc_feature: MA Experiment 20000574 PARAMETER Experiment Name: At_100uM_ABA_Mutants__P Parameter: Organism Value: A. thaliana
  misc_feature: MA Experiment 20000574 PARAMETER Experiment Name: At_100uM_ABA_Mutants__P Parameter: Plant Line Value: CS23 vs. Ler wt
  misc_feature: MA Experiment 20000574 PARAMETER Experiment Name: At_100uM_ABA_Mutants__P Parameter: Timepoint (hr) Value: N/A
  misc_feature: MA Experiment 20000574 PARAMETER Experiment Name: At_100uM_ABA_Mutants__P Parameter: Tissue Value: Whole Plant
  misc_feature: MA Experiment 20000574 PARAMETER Experiment Name: At_100uM_ABA_Mutants__P Parameter: Treatment Value: None
  misc_feature: MA Experiment ID: 20000794 Result: Down-regulated in Transcription
  misc_feature: MA Experiment 20000794 PARAMETER Experiment Name: At_Petals_P Parameter: Age (day) Value: 23-25 days
  misc_feature: MA Experiment 20000794 PARAMETER Experiment Name: At_Petals_P Parameter: Plant Line Value: WS
  misc_feature: MA Experiment 20000794 PARAMETER Experiment Name: At_Petals_P Parameter: Tissue Value: Petals vs. Whole plant
  misc_feature: MA Experiment ID: 20001247 Result: Up-regulated in Transcription
  misc_feature: MA Experiment 20001247 PARAMETER Experiment Name: At_Far-red-induction_P Parameter: Age (day) Value: 7
  misc_feature: MA Experiment 20001247 PARAMETER Experiment Name: At_Far-red-induction_P Parameter: Light Value: Far-red vs. White
  misc_feature: MA Experiment 20001247 PARAMETER Experiment Name: At_Far-red-induction_P Parameter: Organism Value: A. thaliana
  misc_feature: MA Experiment 20001247 PARAMETER Experiment Name: At_Far-red-induction_P Parameter: Plant Line Value: Columbia
  misc_feature: MA Experiment 20001247 PARAMETER Experiment Name: At_Far-red-induction_P Parameter: Timepoint (hr) Value: 1
  misc_feature: MA Experiment 20001247 PARAMETER Experiment Name: At_Far-red-induction_P Parameter: Tissue Value: Whole Plant
ttcaattatctatcacaccaccactctctctctaatctatctatccgagaatggccaagatgggcttgaaacccgacccggctactactaaccagacccacaataatgccaaggagattcgttacagaggcgttaggaagcgtccttggggccgttatgccgccgagatccgagatccgggcaagaaaacccgcgtctggcttggcactttcgatacggctgaagaggcggcgcgtgcttacgatacggcggcgcgtgattttcgtggtgctaaggctaagaccaatttcccaacttttctcgagctgagtgaccagaaggtccctaccggtttcgcgcgtagccctagccagagcagcacgctcgactgtgcttctcctccgacgttagttgtgccttcagcgacggctgggaatgttcccccgcagctcgagcttagtctcggcggaggaggcggcggctcgtgttatcagatcccgatgtcgcgtcctgtctactttttggacctgatggggatcggtaacgtaggtcgtggtcagcctcctcctgtgacatcggcgtttagatcgccggtggtgcatgttgcgacgaagatggcttgtggtgcccaaagcgactctgattcgtcatcggtcgttgatttcgaaggtgggatggagaagagatctcagctgttagatctagatcttaatttgcctcctccatcggaacaggcctgagcttttaacggtgtcgtttcaattcgaagcgcatgcgtttcttcttctttttgagctgtgaaaattcgttttctcatagtttttcctctctctctctctcagtctaaatttattaccagtttttagaaagaaaaaacagattaaatctgagagagaaaaatataattttagctgacatggatcgttatgtacatattattacataaccggagatctgaacttttgttgtgtgcttttaattttttgcgacttggtttcaccccatgttgtttctctattttttttactactttttttttttttgttcttccaaattttcaatcaataatttggtaatcttc

SEQ ID NO: 99526 - protein, 222 aa, Arabidopsis thaliana; identical to SEQ ID NO: 35375
  peptide (1)..(222): Ceres Seq. ID no. 13603126
  misc_feature (22)..(86): Pfam Name: AP2 domain Pfam Description: AP2 domain
  misc_feature (1)..(222): Homolog of NCBI NO: 15232526 NR Description: ethylene responsive element binding factor 4 [Arabidopsis thaliana] >gi|7531110|sp|O80340|ERF4_ARATH Ethylene element binding factor 4 (AtERF4) >gi|25453552|pir||T52019
  misc_feature (1)..(207): Homolog of NCBI NO: 2281635 NR Description: AP2 domain containing protein RAP2.5 [Arabidopsis
  misc_feature (1)..(153): Homolog of NCBI NO: 20340233 NR Description: ethylene responsive element binding factor 4-like
  misc_feature (179)..(220): Homolog of NCBI NO: 20340233 NR Description: ethylene responsive element binding factor 4-like
  misc_feature (4)..(113): Homolog of NCBI NO: 15219215 NR Description: ethylene responsive element binding factor 8
  misc_feature (151)..(220): Homolog of NCBI NO: 15219215 NR Description: ethylene responsive element binding factor 8
  misc_feature (20)..(218): Homolog of NCBI NO: 30526297 NR Description: ethylene response factor 2 [Lycopersicon
  misc_feature (6)..(132): Homolog of NCBI NO: 15218649 NR Description: ethylene responsive element binding factor 11, (EREBP11)(ERF11) [Arabidopsis thaliana]
  misc_feature (6)..(132): Homolog of NCBI NO: 25403338 NR Description: protein F3M18.20 [imported] - Arabidopsis >gi|6560756|gb|AAF16756.1|AC010155_9 F3M18.20 [Arabidopsis
  misc_feature (167)..(220): Homolog of NCBI NO: 15218649 NR Description: ethylene responsive element binding factor 11, (EREBP11)(ERF11) [Arabidopsis thaliana]

SEQ ID NO: 99527 - protein, 219 aa, Arabidopsis thaliana; identical to SEQ ID NO: 35376
  peptide (1)..(219): Ceres Seq. ID no. 13603127
  misc_feature (19)..(83): Pfam Name: AP2 domain Pfam Description: AP2 domain
  misc_feature (1)..(219): Homolog of NCBI NO: 15232526 NR Description: ethylene responsive element binding factor 4 [Arabidopsis thaliana] >gi|7531110|sp|O80340|ERF4_ARATH Ethylene element binding factor 4 (AtERF4) >gi|25453552|pir||T52019
  misc_feature (1)..(204): Homolog of NCBI NO: 2281635 NR Description: AP2 domain containing protein RAP2.5 [Arabidopsis
  misc_feature (1)..(150): Homolog of NCBI NO: 20340233 NR Description: ethylene responsive element binding factor 4-like
  misc_feature (176)..(217): Homolog of NCBI NO: 20340233 NR Description: ethylene responsive element binding factor 4-like
  misc_feature (1)..(110): Homolog of NCBI NO: 15219215 NR Description: ethylene responsive element binding factor 8
  misc_feature (148)..(217): Homolog of NCBI NO: 15219215 NR Description: ethylene responsive element binding factor 8
  misc_feature (17)..(215): Homolog of NCBI NO: 30526297 NR Description: ethylene response factor 2 [Lycopersicon
  misc_feature (3)..(129): Homolog of NCBI NO: 15218649 NR Description: ethylene responsive element binding factor 11, (EREBP11)(ERF11) [Arabidopsis thaliana]
  misc_feature (3)..(129): Homolog of NCBI NO: 25403338 NR Description: protein F3M18.20 [imported] - Arabidopsis >gi|6560756|gb|AAF16756.1|AC010155_9 F3M18.20 [Arabidopsis
  misc_feature (164)..(217): Homolog of NCBI NO: 15218649 NR Description: ethylene responsive element binding factor 11, (EREBP11)(ERF11) [Arabidopsis thaliana]

SEQ ID NO: 99528 - DNA, 1413 bp, Arabidopsis thaliana
  misc_feature (1)..(1413): Ceres Seq. ID no. 13603136
  misc_feature: MA Experiment ID: 20000180 Result: Up-regulated in Transcription
  misc_feature: MA Experiment 20000180 PARAMETER Experiment Name: At_Germinating_Seeds_P Parameter: Age (hr) Value: 24 vs. 0
  misc_feature: MA Experiment 20000180 PARAMETER Experiment Name: At_Germinating_Seeds_P Parameter: Tissue Value: Germinating Seeds
  misc_feature: MA Experiment ID: 20000182 Result: Up-regulated in Transcription
  misc_feature: MA Experiment 20000182 PARAMETER Experiment Name: At_2mM_SA_P Parameter: Age (day) Value: 14
  misc_feature: MA Experiment 20000182 PARAMETER Experiment Name: At_2mM_SA_P Parameter: Organism Value: A. thaliana
  misc_feature: MA Experiment 20000182 PARAMETER Experiment Name: At_2mM_SA_P Parameter: Plant Line Value: WS
  misc_feature: MA Experiment 20000182 PARAMETER Experiment Name: At_2mM_SA_P Parameter: Timepoint (hr) Value: 6
  misc_feature: MA Experiment 20000182 PARAMETER Experiment Name: At_2mM_SA_P Parameter: Tissue Value: Aerial
  misc_feature: MA Experiment 20000182 PARAMETER Experiment Name: At_2mM_SA_P Parameter: Treatment Value: 2mM SA vs. No Treatment
  misc_feature: MA Experiment ID: 20000227 Result: Up-regulated in Transcription
  misc_feature: MA Experiment 20000227 PARAMETER Experiment Name: At_Root-Tips-vs-Tops_P Parameter: Tissue Value: Root Tips vs. Root Tops
  misc_feature: MA Experiment ID: 20000234 Result: Up-regulated in Transcription
  misc_feature: MA Experiment 20000234 PARAMETER Experiment Name: At_Siliques_P Parameter: Age (day) Value: 21
  misc_feature: MA Experiment 20000234 PARAMETER Experiment Name: At_Siliques_P Parameter: Organism Value: A. thaliana
  misc_feature: MA Experiment 20000234 PARAMETER Experiment Name: At_Siliques_P Parameter: Plant Line Value: WS
  misc_feature: MA Experiment 20000234 PARAMETER Experiment Name: At_Siliques_P Parameter: Tissue Value: Less Than 5mm Siliques vs. Whole Plant
  misc_feature: MA Experiment ID: 20000495 Result: Up-regulated in Transcription
  misc_feature: MA Experiment 20000495 PARAMETER Experiment Name: At_Guard_Cells_P Parameter: Harvest Date Value: 8/2/2002
  misc_feature: MA Experiment 20000495 PARAMETER Experiment Name: At_Guard_Cells_P Parameter: Organism Value: A. thaliana
  misc_feature: MA Experiment 20000495 PARAMETER Experiment Name: At_Guard_Cells_P Parameter: Tissue Value: Guard Cells vs. Leaves
aaagcttaagtgagaagcagaaaaaaaaatggcgaaatctcagatctggtttggttttgcgttactcgcgttgcttctggtttcagccgtagctgacgatgtggttgttttgactgacgatagcttcgaaaaggaagttggtaaagataaaggagctctcgtcgagttttacgctccctggtgtggtcactgcaagaaacttgctccagagtatgaaaagctaggggcaagcttcaagaaggctaagtctgtgttgattgcaaaggttgattgtgatgagcaaaagagtgtctgtactaaatatggtgttagtggatacccaaccattcagtggtttcctaaaggatctcttgaacctcaaaagtatgagggtccacgcaatgctgaagctttggctgaatacgtgaacaaggaaggaggcaccaacgtaaaattagctgcagttccacaaaacgtggttgttttgacacctgacaatttcgatgagattgttctggatcaaaacaaagatgtcctagtcgaattttatgcaccatggtgtggccactgcaaatcactcgctcccacatacgaaaaggtagccacagtgtttaaacaggaagaaggtgtagtcatcgccaatttggatgctgatgcacacaaagcccttggcgagaaatatggagtgagtggattcccaacattgaaattcttcccaaaggacaacaaagctggtcacgattatgacggtggcagggatttagatgactttgtaagcttcatcaacgagaaatctgggaccagcagggacagtaaagggcagcttacttcaaaggctggtatagtcgaaagcttagatgctttggtaaaagagttagttgcagctagtgaagatgagaagaaggcagtgttgtctcgcatagaagaggaagcaagtacccttaagggctccaccacgaggtatggaaagctttacttgaaactcgcaaagagctacatagaaaaaggttcagactatgctagcaaagaaacggagaggcttggacgggtgcttgggaagtcgataagtccagtgaaagctgatgaactcactctcaagagaaatatcctaaccacgttcgttgcttcttcttaaaagtcatatagcttgaagctaagagaataggagtcgagagagtttataactgatactgttttgagattttatgtttgtcaagatcaagaacgtctgtggttatttctggttagttctgaaactcttttgaacccaagtttatctgtctctggtgaacaagcgaccacgataatcataaacttcattcgcgttaaaaaaaaaggttcagtaatgggccaggctcgtattcattattaatgggctaggctcgtgttcataaaaagtctgtaatgggtcattgaggtatacaaaggacatcc

SEQ ID NO: 99529 - protein, 361 aa, Arabidopsis thaliana; identical to SEQ ID NO: 29321
  peptide (1)..(361): Ceres Seq. ID no. 13603137
  misc_feature (1)..(361): Homolog of NCBI NO: 15226610 NR Description: protein disulfide isomerase family [Arabidopsis >gi|11132051|sp|O22263|PDA6_ARATH Probable protein disulfide A6 precursor (P5) >gi|7488158|pir||T00437 probable thaliana
  misc_feature (1)..(357): Homolog of NCBI NO: 729442 NR Description: PROBABLE PROTEIN DISULFIDE ISOMERASE P5 PRECURSOR
  misc_feature (1)..(357): Homolog of NCBI NO: 7489183 NR Description: probable protein disulfide-isomerase (EC 5.3.4.1)
  misc_feature (10)..(357): Homolog of NCBI NO: 34894982 NR Description: putative protein disulfide isomerase [Oryza
  misc_feature (14)..(357): Homolog of NCBI NO: 34897646 NR Description: putative disulfide-isomerase precursor [Oryza
  misc_feature (13)..(357): Homolog of NCBI NO: 28829383 NR Description: similar to Dictyostelium discoideum (Slime mold).
  misc_feature (13)..(357): Homolog of NCBI NO: 2627440 NR Description: protein disulfide isomerase; PDI; P5-like
  misc_feature (165)..(361): Homolog of NCBI NO: 10180029 NR Description: putative protein disulfide-isomerase [Prunus
  misc_feature (10)..(358): Homolog of NCBI NO: 19114496 NR Description: putative protein disulfide isomerase (EC 5.3.4.1) pombe] >gi|3287888|sp|O13811|PDI2_SCHPO Putative protein isomerase C17H9.14c precursor >gi|7492860|pir||T37880 probable
  misc_feature (17)..(358): Homolog of NCBI NO: 2501210 NR Description: PUTATIVE DISULFIDE ISOMERASE TIGA PRECURSOR

SEQ ID NO: 99530 - DNA, 1912 bp, Arabidopsis thaliana
  misc_feature (1)..(1912): Ceres Seq. ID no. 13603138
  misc_feature: MA Experiment ID: 108434 Result: Down-regulated in Transcription
  misc_feature: MA Experiment 108434 PARAMETER Experiment Name: At_Root_Tips_cDNA_P Parameter: Tissue Value: Root Tips
  misc_feature: MA Experiment ID: 108461 Result: Up-regulated in Transcription
  misc_feature: MA Experiment 108461 PARAMETER Experiment Name: At_Germinating_Seeds_cDNA_P Parameter: Age (day) Value: 1 vs. 0
  misc_feature: MA Experiment 108461 PARAMETER Experiment Name: At_Germinating_Seeds_cDNA_P Parameter: Tissue Value: Germinating Seeds
  misc_feature: MA Experiment ID: 108462 Result: Up-regulated in Transcription
  misc_feature: MA Experiment 108462 PARAMETER Experiment Name: At_Germinating_Seeds_cDNA_P Parameter: Age (day) Value: 2 vs. 0
  misc_feature: MA Experiment 108462 PARAMETER Experiment Name: At_Germinating_Seeds_cDNA_P Parameter: Tissue Value: Germinating Seeds
  misc_feature: MA Experiment ID: 108463 Result: Up-regulated in Transcription
  misc_feature: MA Experiment 108463 PARAMETER Experiment Name: At_Germinating_Seeds_cDNA_P Parameter: Age (day) Value: 3 vs. 0
  misc_feature: MA Experiment 108463 PARAMETER Experiment Name: At_Germinating_Seeds_cDNA_P Parameter: Tissue Value: Germinating Seeds
  misc_feature: MA Experiment ID: 108464 Result: Up-regulated in Transcription
  misc_feature: MA Experiment 108464 PARAMETER Experiment Name: At_Germinating_Seeds_cDNA_P Parameter: Age (day) Value: 4 vs. 0
  misc_feature: MA Experiment 108464 PARAMETER Experiment Name: At_Germinating_Seeds_cDNA_P Parameter: Tissue Value: Germinating Seeds
  misc_feature: MA Experiment ID: 108489 Result: Up-regulated in Transcription
  misc_feature: MA Experiment ID: 20000088 Result: Down-regulated in Transcription
  misc_feature: MA Experiment 20000088 PARAMETER Experiment Name: At_100uM_ABA_Mutants_cDNA_P Parameter: Plant Line Value: Landsberg
  misc_feature: MA Experiment 20000088 PARAMETER Experiment Name: At_100uM_ABA_Mutants_cDNA_P Parameter: Timepoint (hr) Value: 6
  misc_feature: MA Experiment 20000088 PARAMETER Experiment Name: At_100uM_ABA_Mutants_cDNA_P Parameter: Tissue Value: Aerial
  misc_feature: MA Experiment 20000088 PARAMETER Experiment Name: At_100uM_ABA_Mutants_cDNA_P Parameter: Treatment Value: 100uM ABA vs. No Treatment
  misc_feature: MA Experiment ID: 20000185 Result: Up-regulated in Transcription
  misc_feature: MA Experiment 20000185 PARAMETER Experiment Name: At_Roots__P Parameter: Age (day) Value: 7 vs. 21
  misc_feature: MA Experiment 20000185 PARAMETER Experiment Name: At_Roots__P Parameter: Organism Value: A. thaliana
  misc_feature: MA Experiment 20000185 PARAMETER Experiment Name: At_Roots__P Parameter: Tissue Value: Roots vs. Whole Plant
atctccaaaccaaaacacaattaagctaaaaaaaaaaccaaaggatgtctcagaaactcatgttcttgttcacccttgcctgcctctcctcgttaccatctccttttatctccgcccaaataccggccattggaaatgccacttcaccgtcaaatatatgtagattcgcgccggatccatcttattgtagatcggttcttccaaaccagcccggagatatatattcctacggacgtttgtctctacgaagatccctctcacgagcccgccggttcatttcgatgatcgacgctgaacttgaccggaaaggcaaagtggctgctaaatccacagtaggggctctcgaagactgcaaattcctagccagcctgactatggactacctccttagtagctcacagacggctgattccaccaaaacactgtcgttatctagggccgaggatgttcatacatttctgagtgctgccatcaccaatgagcagacttgtcttgaaggacttaaatcaacggcgtccgaaaatggtctttccggtgatcttttcaacgatacaaaactctatggggtgtctcttgcccttttctccaaaggttgggtgccaagaaggcaaagatcgagaccgatttggcaaccacaagccaggttcaaaaagttttttggtttccgtaacggtaaattaccgttaaagatgacggaaagggcacgtgccgtttacaacaccgtgactagaagaaagcttctccaatcggatgcagacgccgttcaggtgagcgacattgtgacggtgatccagaacgggacgggaaacttcacgaccataaacgccgccattgcagctgcaccaaataaaactgacggtagtaacggttacttcttgatctacgtaacggcgggattgtacgaggaatacgtggaagttcccaagaacaagagatatgtgatgatgatcggtgacggcatcaaccagaccgttatcaccggaaacaggagtgtcgttgatggatggacaactttcaattcagccacatttattctatcaggtcccaactttattggtgtaaacataacaatccgcaatacggcaggaccaaccaaaggccaagctgtggcattgaggagtggtggggacttgtctgttttctacagttgtagttttgaagcctatcaagacacgttatacacacattctctcagacagttttatcgtgaatgtgatgtctatggtactgttgattttatatttggtaacgctgcagtggtattacaaaactgtaatttgtatccacgtcaacctcgcaaaggtcaatcgaacgaggttacggctcaaggtcgtactgatccgaaccaaaacactgggacggcaattcatggttgtactataagaccggcagatgatttggctacgagcaactatacagtgaagacttatcttggtcgaccatggaaggaatattctagaaccgttgtcatgcaaacttacatagacgggtttctagaaccgagtggttggaatgcatggtctggtgattttgcattgagcacactttactacgcggaatataataataccggacctggttctgacacgacaaaccgagtcacttggcctggttatcacgtcatcaacgcaactgatgcttccaatttcacggtcaccaatttccttgttggtgaaggttggattggacaaaccggagtgcctttcgtgggtggactgatcgcataatcaaccaaccttatactatatatgatatgttaattagttaaattatttaatcattcatgtgttgtttttttaatcaaataattatttagtggtgcctgattcaatacgatttgtaataactttaacttactattgtacaaccgaatggttttcttcgaaatctaataataatgaacgggtaatca

SEQ ID NO: 99531 - protein, 560 aa, Arabidopsis thaliana
  peptide (1)..(560): Ceres Seq. ID no. 13603139
  misc_feature (246)..(542): Pfam Name: Pectinesterase Pfam Description: Pectinesterase
  misc_feature (1)..(560): Homolog of NCBI NO: 18407388 NR Description: pectinesterase family [Arabidopsis thaliana]
  misc_feature (1)..(560): Homolog of NCBI NO: 31321894 NR Description: papillar cell-specific pectin methylesterase-like
  misc_feature (241)..(560): Homolog of NCBI NO: 7447370 NR Description: probable pectinesterase (EC 3.1.1.11) T30B22.15 -
  misc_feature (98)..(199): Homolog of NCBI NO: 7447370 NR Description: probable pectinesterase (EC 3.1.1.11) T30B22.15 -
  misc_feature (161)..(560): Homolog of NCBI NO: 18379010 NR Description: pectinesterase family [Arabidopsis thaliana]
  misc_feature (1)..(199): Homolog of NCBI NO: 18379010 NR Description: pectinesterase family [Arabidopsis thaliana]
  misc_feature (1)..(560): Homolog of NCBI NO: 18411914 NR Description: expressed protein [Arabidopsis thaliana]
  misc_feature (1)..(560): Homolog of NCBI NO: 19424045 NR Description: unknown protein [Arabidopsis thaliana]
  misc_feature (216)..(560): Homolog of NCBI NO: 27363394 NR Description: At2g47550/T30B22.15 [Arabidopsis thaliana]
  misc_feature (216)..(560): Homolog of NCBI NO: 16604402 NR Description: At2g47550/T30B22.15 [Arabidopsis thaliana]
MSQKLMFLFTLACLSSLPSPFISAQIPAIGNATSPSNICRFAPDPSYCRSVLPNQPGDIYSYGRLSLRRSLSRARRFISMIDAELDRKGKVAAKSTVGALEDCKFLASLTMDYLLSSSQTADSTKTLSLSRAEDVHTFLSAAITNEQTCLEGLKSTASENGLSGDLFNDTKLYGVSLALFSKGWVPRRQRSRPIWQPQARFKKFFGFRNGKLPLKMTERARAVYNTVTRRKLLQSDADAVQVSDIVTVIQNGTGNFTTINAAIAAAPNKTDGSNGYFLIYVTAGLYEEYVEVPKNKRYVMMIGDGINQTVITGNRSVVDGWTTFNSATFILSGPNFIGVNITIRNTAGPTKGQAVALRSGGDLSVFYSCSFEAYQDTLYTHSLRQFYRECDVYGTVDFIFGNAAVVLQNCNLYPRQPRKGQSNEVTAQGRTDPNQNTGTAIHGCTIRPADDLATSNYTVKTYLGRPWKEYSRTVVMQTYIDGFLEPSGWNAWSGDFALSTLYYAEYNNTGPGSDTTNRVTWPGYHVINATDASNFTVTNFLVGEGWIGQTGVPFVGGLIA

SEQ ID NO: 99532 - protein, 555 aa, Arabidopsis thaliana
  peptide (1)..(555): Ceres Seq. ID no. 13603140
  misc_feature (241)..(537): Pfam Name: Pectinesterase Pfam Description: Pectinesterase
  misc_feature (1)..(555): Homolog of NCBI NO: 18407388 NR Description: pectinesterase family [Arabidopsis thaliana]
  misc_feature (1)..(555): Homolog of NCBI NO: 31321894 NR Description: papillar cell-specific pectin methylesterase-like
  misc_feature (236)..(555): Homolog of NCBI NO: 7447370 NR Description: probable pectinesterase (EC 3.1.1.11) T30B22.15 -
  misc_feature (93)..(194): Homolog of NCBI NO: 7447370 NR Description: probable pectinesterase (EC 3.1.1.11) T30B22.15 -
  misc_feature (156)..(555): Homolog of NCBI NO: 18379010 NR Description: pectinesterase family [Arabidopsis thaliana]
  misc_feature (1)..(194): Homolog of NCBI NO: 18379010 NR Description: pectinesterase family [Arabidopsis thaliana]
  misc_feature (1)..(555): Homolog of NCBI NO: 18411914 NR Description: expressed protein [Arabidopsis thaliana]
  misc_feature (1)..(555): Homolog of NCBI NO: 19424045 NR Description: unknown protein [Arabidopsis thaliana]
  misc_feature (211)..(555): Homolog of NCBI NO: 27363394 NR Description: At2g47550/T30B22.15 [Arabidopsis thaliana]
  misc_feature (211)..(555): Homolog of NCBI NO: 16604402 NR Description: At2g47550/T30B22.15 [Arabidopsis thaliana]
MFLFTLACLSSLPSPFISAQIPAIGNATSPSNICRFAPDPSYCRSVLPNQPGDIYSYGRLSLRRSLSRARRFISMIDAELDRKGKVAAKSTVGALEDCKFLASLTMDYLLSSSQTADSTKTLSLSRAEDVHTFLSAAITNEQTCLEGLKSTASENGLSGDLFNDTKLYGVSLALFSKGWVPRRQRSRPIWQPQARFKKFFGFRNGKLPLKMTERARAVYNTVTRRKLLQSDADAVQVSDIVTVIQNGTGNFTTINAAIAAAPNKTDGSNGYFLIYVTAGLYEEYVEVPKNKRYVMMIGDGINQTVITGNRSVVDGWTTFNSATFILSGPNFIGVNITIRNTAGPTKGQAVALRSGGDLSVFYSCSFEAYQDTLYTHSLRQFYRECDVYGTVDFIFGNAAVVLQNCNLYPRQPRKGQSNEVTAQGRTDPNQNTGTAIHGCTIRPADDLATSNYTVKTYLGRPWKEYSRTVVMQTYIDGFLEPSGWNAWSGDFALSTLYYAEYNNTGPGSDTTNRVTWPGYHVINATDASNFTVTNFLVGEGWIGQTGVPFVGGLIA

SEQ ID NO: 99533 - protein, 481 aa, Arabidopsis thaliana; identical to SEQ ID NO: 39933
  peptide (1)..(481): Ceres Seq. ID no. 13603141
  misc_feature (167)..(463): Pfam Name: Pectinesterase Pfam Description: Pectinesterase
  misc_feature (1)..(481): Homolog of NCBI NO: 18407388 NR Description: pectinesterase family [Arabidopsis thaliana]
  misc_feature (1)..(481): Homolog of NCBI NO: 31321894 NR Description: papillar cell-specific pectin methylesterase-like
  misc_feature (162)..(481): Homolog of NCBI NO: 7447370 NR Description: probable pectinesterase (EC 3.1.1.11) T30B22.15 -
  misc_feature (19)..(120): Homolog of NCBI NO: 7447370 NR Description: probable pectinesterase (EC 3.1.1.11) T30B22.15 -
  misc_feature (82)..(481): Homolog of NCBI NO: 18379010 NR Description: pectinesterase family [Arabidopsis thaliana]
  misc_feature (1)..(120): Homolog of NCBI NO: 18379010 NR Description: pectinesterase family [Arabidopsis thaliana]
  misc_feature (1)..(481): Homolog of NCBI NO: 18411914 NR Description: expressed protein [Arabidopsis thaliana]
  misc_feature (1)..(481): Homolog of NCBI NO: 19424045 NR Description: unknown protein [Arabidopsis thaliana]
  misc_feature (137)..(481): Homolog of NCBI NO: 27363394 NR Description: At2g47550/T30B22.15 [Arabidopsis thaliana]
  misc_feature (137)..(481): Homolog of NCBI NO: 16604402 NR Description: At2g47550/T30B22.15 [Arabidopsis thaliana]

SEQ ID NO: 99534 - DNA, 1089 bp, Arabidopsis thaliana
  misc_feature (1)..(1089): Ceres Seq. ID no. 13603142
  misc_feature: MA Experiment ID: 108434 Result: Up-regulated in Transcription
  misc_feature: MA Experiment 108434 PARAMETER Experiment Name: At_Root_Tips_cDNA_P Parameter: Tissue Value: Root Tips
  misc_feature: MA Experiment ID: 108435 Result: Up-regulated in Transcription
  misc_feature: MA Experiment 108435 PARAMETER Experiment Name: At_stm_Mutants_cDNA_P Parameter: Plant Line Value: wt Landsburg vs stm
  misc_feature: MA Experiment 108435 PARAMETER Experiment Name: At_stm_Mutants_cDNA_P Parameter: Tissue Value: Shoot Apical Meristem Region
  misc_feature: MA Experiment ID: 108462 Result: Down-regulated in Transcription
  misc_feature: MA Experiment 108462 PARAMETER Experiment Name: At_Germinating_Seeds_cDNA_P Parameter: Age (day) Value: 2 vs. 0
  misc_feature: MA Experiment 108462 PARAMETER Experiment Name: At_Germinating_Seeds_cDNA_P Parameter: Tissue Value: Germinating Seeds
  misc_feature: MA Experiment ID: 108463 Result: Down-regulated in Transcription
  misc_feature: MA Experiment 108463 PARAMETER Experiment Name: At_Germinating_Seeds_cDNA_P Parameter: Age (day) Value: 3 vs. 0
  misc_feature: MA Experiment 108463 PARAMETER Experiment Name: At_Germinating_Seeds_cDNA_P Parameter: Tissue Value: Germinating Seeds
  misc_feature: MA Experiment ID: 108464 Result: Down-regulated in Transcription
  misc_feature: MA Experiment 108464 PARAMETER Experiment Name: At_Germinating_Seeds_cDNA_P Parameter: Age (day) Value: 4 vs. 0
  misc_feature: MA Experiment 108464 PARAMETER Experiment Name: At_Germinating_Seeds_cDNA_P Parameter: Tissue Value: Germinating Seeds
  misc_feature: MA Experiment ID: 108573 Result: Down-regulated in Transcription
  misc_feature: MA Experiment 108573 PARAMETER Experiment Name: At_Drought_cDNA_P Parameter: Timepoint (hr) Value: 6
  misc_feature: MA Experiment 108573 PARAMETER Experiment Name: At_Drought_cDNA_P Parameter: Tissue Value: Aerial
  misc_feature: MA Experiment 108573 PARAMETER Experiment Name: At_Drought_cDNA_P Parameter: Treatment Value: Drought vs. No Drought
  misc_feature: MA Experiment ID: 20000184 Result: Up-regulated in Transcription
  misc_feature: MA Experiment 20000184 PARAMETER Experiment Name: At_Shoots__P Parameter: Age (day) Value: 7
  misc_feature: MA Experiment 20000184 PARAMETER Experiment Name: At_Shoots__P Parameter: Tissue Value: Shoots vs. Whole Plant
  misc_feature: MA Experiment ID: 20000227 Result: Up-regulated in Transcription
  misc_feature: MA Experiment 20000227 PARAMETER Experiment Name: At_Root-Tips-vs-Tops_P Parameter: Tissue Value: Root Tips vs. Root Tops
  misc_feature: MA Experiment ID: 20000234 Result: Up-regulated in Transcription
  misc_feature: MA Experiment 20000234 PARAMETER Experiment Name: At_Siliques_P Parameter: Age (day) Value: 21
  misc_feature: MA Experiment 20000234 PARAMETER Experiment Name: At_Siliques_P Parameter: Organism Value: A. thaliana
  misc_feature: MA Experiment 20000234 PARAMETER Experiment Name: At_Siliques_P Parameter: Plant Line Value: WS
  misc_feature: MA Experiment 20000234 PARAMETER Experiment Name: At_Siliques_P Parameter: Tissue Value: Less Than 5mm Siliques vs. Whole Plant
  misc_feature: MA Experiment ID: 20000264 Result: Up-regulated in Transcription
  misc_feature: MA Experiment 20000264 PARAMETER Experiment Name: At_Open_Flower_P Parameter: Age (day) Value: 21
  misc_feature: MA Experiment 20000264 PARAMETER Experiment Name: At_Open_Flower_P Parameter: Plant Line Value: WS
  misc_feature: MA Experiment 20000264 PARAMETER Experiment Name: At_Open_Flower_P Parameter: Tissue Value: Open Flower vs. Whole Plant
  misc_feature: MA Experiment ID: 20001248 Result: Down-regulated in Transcription
  misc_feature: MA Experiment 20001248 PARAMETER Experiment Name: At_Far-red-induction_P Parameter: Age (day) Value: 7
  misc_feature: MA Experiment 20001248 PARAMETER Experiment Name: At_Far-red-induction_P Parameter: Light Value: Far-red vs. White
  misc_feature: MA Experiment 20001248 PARAMETER Experiment Name: At_Far-red-induction_P Parameter: Organism Value: A. thaliana
  misc_feature: MA Experiment 20001248 PARAMETER Experiment Name: At_Far-red-induction_P Parameter: Plant Line Value: Columbia
  misc_feature: MA Experiment 20001248 PARAMETER Experiment Name: At_Far-red-induction_P Parameter: Timepoint (hr) Value: 4
  misc_feature: MA Experiment 20001248 PARAMETER Experiment Name: At_Far-red-induction_P Parameter: Tissue Value: Whole Plant
  misc_feature: MA Experiment ID: 20001557 Result: Up-regulated in Transcription
  misc_feature: MA Experiment 20001557 PARAMETER Experiment Name: At_Drought_Soil_Dry_P Parameter: Age (day) Value: 27
  misc_feature: MA Experiment 20001557 PARAMETER Experiment Name: At_Drought_Soil_Dry_P Parameter: Organism Value: A. thaliana
  misc_feature: MA Experiment 20001557 PARAMETER Experiment Name: At_Drought_Soil_Dry_P Parameter: Plant Line Value: WS
  misc_feature: MA Experiment 20001557 PARAMETER Experiment Name: At_Drought_Soil_Dry_P Parameter: Post Timepoint (hr) Value: 3
  misc_feature: MA Experiment 20001557 PARAMETER Experiment Name: At_Drought_Soil_Dry_P Parameter: Post-Treatment Value: Re-Water vs. No Drought
  misc_feature: MA Experiment 20001557 PARAMETER Experiment Name: At_Drought_Soil_Dry_P Parameter: Timepoint (day) Value: 13
  misc_feature: MA Experiment 20001557 PARAMETER Experiment Name: At_Drought_Soil_Dry_P Parameter: Treatment Value: Drought vs. No Drought
  misc_feature: MA Experiment ID: 20001558 Result: Up-regulated in Transcription
  misc_feature: MA Experiment 20001558 PARAMETER Experiment Name: At_Drought_Soil_Dry_P Parameter: Age (day) Value: 27
  misc_feature: MA Experiment 20001558 PARAMETER Experiment Name: At_Drought_Soil_Dry_P Parameter: Organism Value: A. thaliana
  misc_feature: MA Experiment 20001558 PARAMETER Experiment Name: At_Drought_Soil_Dry_P Parameter: Plant Line Value: WS
  misc_feature: MA Experiment 20001558 PARAMETER Experiment Name: At_Drought_Soil_Dry_P Parameter: Post Timepoint (hr) Value: 6
  misc_feature: MA Experiment 20001558 PARAMETER Experiment Name: At_Drought_Soil_Dry_P Parameter: Post-Treatment Value: Re-Water vs. No Drought
  misc_feature: MA Experiment 20001558 PARAMETER Experiment Name: At_Drought_Soil_Dry_P Parameter: Timepoint (day) Value: 13
  misc_feature: MA Experiment 20001558 PARAMETER Experiment Name: At_Drought_Soil_Dry_P Parameter: Treatment Value: Drought vs. No Drought
  misc_feature: MA Experiment ID: 20001560 Result: Up-regulated in Transcription
  misc_feature: MA Experiment 20001560 PARAMETER Experiment Name: At_Drought_Soil_Dry_P Parameter: Age (day) Value: 28
  misc_feature: MA Experiment 20001560 PARAMETER Experiment Name: At_Drought_Soil_Dry_P Parameter: Organism Value: A. thaliana
  misc_feature: MA Experiment 20001560 PARAMETER Experiment Name: At_Drought_Soil_Dry_P Parameter: Plant Line Value: WS
  misc_feature: MA Experiment 20001560 PARAMETER Experiment Name: At_Drought_Soil_Dry_P Parameter: Post Timepoint (hr) Value: None
  misc_feature: MA Experiment 20001560 PARAMETER Experiment Name: At_Drought_Soil_Dry_P Parameter: Post-Treatment Value: None
  misc_feature: MA Experiment 20001560 PARAMETER Experiment Name: At_Drought_Soil_Dry_P Parameter: Timepoint (day) Value: 14
  misc_feature: MA Experiment 20001560 PARAMETER Experiment Name: At_Drought_Soil_Dry_P Parameter: Treatment Value: Drought vs. No Drought
  misc_feature: MA Experiment ID: 20001757 Result: Up-regulated in Transcription
  misc_feature: MA Experiment 20001757 PARAMETER Experiment Name: At_50mM_NH4NO3_L-to-H_P Parameter: Timepoint (hr) Value: 6
  misc_feature: MA Experiment 20001757 PARAMETER Experiment Name: At_50mM_NH4NO3_L-to-H_P Parameter: Tissue Value: Leaf
  misc_feature: MA Experiment 20001757 PARAMETER Experiment Name: At_50mM_NH4NO3_L-to-H_P Parameter: Treatment Value: 50mM NH4NO3 vs 100mM Mannitol
atactcttcgactcagccgtcctttcgcagaaaccatttggagttggagctttggacgacgacaatggccccgaagaaaggagtgaaggtagctgctaagaagaagaccgcggagaaagtttcaaaccctctattcgagaggaggcctaagcaattcggtattggtggagctttacctcctaagaaggatctctctcgctacatcaaatggcccaaatccatccgtcttcaaaggcaaaagaggatcctgaagcagaggttgaaggtccctccagctcttaaccaattcaccaagactcttgacaagaatcttgctaccagcctcttcaaggtccttctgaagtacaggccagaagacaaagctgccaagaaggagcgtcttgtaaagaaggcccaagctgaagctgagggaaagccttctgagtctaagaagcccattgtagtcaaatacggcctcaaccatgtgacctacctcattgagcagaacaaggcccaacttgttgttattgctcatgatgtcgacccaattgagttggttgtctggttgcctgctctgtgcaggaagatggaagtcccgtactgcattgtcaagggcaaatctcgtcttggagcggttgttcaccagaagactgcttcttgcttgtgtttgaccactgtcaagaacgaggacaagctagagttcagcaaaatcctggaagctatcaaggccaacttcaatgacaagtacgaggagtacaggaagaaatggggaggaggcataatgggatctaagtctcaggcaaagaccaaggcaaaggaaagagttattgcaaaggaggctgcccaaaggatgaattaagaggctagcttcttttgtttgtggtttgctcggattcgtaaaacttaatagagctttttgtttagctggttcttgaagtacctcttttttagttgaaccctttattatggatgttttgcaatttcttgggacagtttcaatgttattcaagctgctggatcctctttggtctctcaaccacttaaaacttgacagtgtgaaattttagccaaatgcttattgcattctggaaagagttataagtttaattc

SEQ ID NO: 99535 - protein, 278 aa, Arabidopsis thaliana
  peptide (1)..(278): Ceres Seq. ID no. 13603143
  misc_feature (133)..(228): Pfam Name: Ribosomal protein L7Ae/L30e/S12e/Gadd45 family Pfam Description: Ribosomal protein L7Ae/L30e/S12e/Gadd45 family
  misc_feature (22)..(278): Homolog of NCBI NO: 15226635 NR Description: 60S ribosomal protein L7A (RPL7aA) [Arabidopsis
  misc_feature (22)..(278): Homolog of NCBI NO: 15229338 NR Description: 60S ribosomal protein L7A (RPL7aB) [Arabidopsis
  misc_feature (22)..(277): Homolog of NCBI NO: 548774 NR Description: 60S RIBOSOMAL PROTEIN L7A >gi|542158|pir||S38360
  misc_feature (22)..(277): Homolog of NCBI NO: 20161741 NR Description: putative 60S ribosomal protein [Oryza sativa
  misc_feature (19)..(276): Homolog of NCBI NO: 17530825 NR Description: Ribosomal protein L7A CG3314-PD [Drosophila
  misc_feature (19)..(276): Homolog of NCBI NO: 1173062 NR Description: 60S RIBOSOMAL PROTEIN L7A
  misc_feature (26)..(277): Homolog of NCBI NO: 6094094 NR Description: 60S RIBOSOMAL PROTEIN L7A (SURFEIT LOCUS PROTEIN
  misc_feature (38)..(277): Homolog of NCBI NO: 22758896 NR Description: ribosomal protein L7a [Argopecten irradians]
  misc_feature (26)..(277): Homolog of NCBI NO: 417673 NR Description: 60S RIBOSOMAL PROTEIN L7A >gi|104864|pir||S18159
  misc_feature (33)..(277): Homolog of NCBI NO: 34932126 NR Description: similar to Rpl7a protein [Rattus norvegicus]
YSSTQPSFRRNHLELELWTTTMAPKKGVKVAAKKKTAEKVSNPLFERRPKQFGIGGALPPKKDLSRYIKWPKSIRLQRQKRILKQRLKVPPALNQFTKTLDKNLATSLFKVLLKYRPEDKAAKKERLVKKAQAEAEGKPSESKKPIVVKYGLNHVTYLIEQNKAQLVVIAHDVDPIELVVWLPALCRKMEVPYCIVKGKSRLGAVVHQKTASCLCLTTVKNEDKLEFSKILEAIKANFNDKYEEYRKKWGGGIMGSKSQAKTKAKERVIAKEAAQRMN

SEQ ID NO: 99536 - protein, 257 aa, Arabidopsis thaliana; identical to SEQ ID NO: 27385
  peptide (1)..(257): Ceres Seq. ID no. 13603144
  misc_feature (112)..(207): Pfam Name: Ribosomal protein L7Ae/L30e/S12e/Gadd45 family Pfam Description: Ribosomal protein L7Ae/L30e/S12e/Gadd45 family
  misc_feature (1)..(257): Homolog of NCBI NO: 15226635 NR Description: 60S ribosomal protein L7A (RPL7aA) [Arabidopsis
  misc_feature (1)..(257): Homolog of NCBI NO: 15229338 NR Description: 60S ribosomal protein L7A (RPL7aB) [Arabidopsis
  misc_feature (1)..(256): Homolog of NCBI NO: 548774 NR Description: 60S RIBOSOMAL PROTEIN L7A >gi|542158|pir||S38360
  misc_feature (1)..(256): Homolog of NCBI NO: 20161741 NR Description: putative 60S ribosomal protein [Oryza sativa
  misc_feature (1)..(255): Homolog of NCBI NO: 17530825 NR Description: Ribosomal protein L7A CG3314-PD [Drosophila
  misc_feature (1)..(255): Homolog of NCBI NO: 1173062 NR Description: 60S RIBOSOMAL PROTEIN L7A
  misc_feature (5)..(256): Homolog of NCBI NO: 6094094 NR Description: 60S RIBOSOMAL PROTEIN L7A (SURFEIT LOCUS PROTEIN
  misc_feature (17)..(256): Homolog of NCBI NO: 22758896 NR Description: ribosomal protein L7a [Argopecten irradians]
  misc_feature (5)..(256): Homolog of NCBI NO: 417673 NR Description: 60S RIBOSOMAL PROTEIN L7A >gi|104864|pir||S18159
  misc_feature (12)..(256): Homolog of NCBI NO: 34932126 NR Description: similar to Rpl7a protein [Rattus norvegicus]

SEQ ID NO: 99537 - DNA, 1456 bp, Arabidopsis thaliana
  misc_feature (1)..(1456): Ceres Seq. ID no. 13603173
  misc_feature: MA Experiment ID: 108462 Result: Down-regulated in Transcription
  misc_feature: MA Experiment 108462 PARAMETER Experiment Name: At_Germinating_Seeds_cDNA_P Parameter: Age (day) Value: 2 vs. 0
  misc_feature: MA Experiment 108462 PARAMETER Experiment Name: At_Germinating_Seeds_cDNA_P Parameter: Tissue Value: Germinating Seeds
  misc_feature: MA Experiment ID: 108463 Result: Down-regulated in Transcription
  misc_feature: MA Experiment 108463 PARAMETER Experiment Name: At_Germinating_Seeds_cDNA_P Parameter: Age (day) Value: 3 vs. 0
  misc_feature: MA Experiment 108463 PARAMETER Experiment Name: At_Germinating_Seeds_cDNA_P Parameter: Tissue Value: Germinating Seeds
  misc_feature: MA Experiment ID: 108464 Result: Down-regulated in Transcription
  misc_feature: MA Experiment 108464 PARAMETER Experiment Name: At_Germinating_Seeds_cDNA_P Parameter: Age (day) Value: 4 vs. 0
  misc_feature: MA Experiment 108464 PARAMETER Experiment Name: At_Germinating_Seeds_cDNA_P Parameter: Tissue Value: Germinating Seeds
  misc_feature: MA Experiment ID: 108573 Result: Up-regulated in Transcription
  misc_feature: MA Experiment 108573 PARAMETER Experiment Name: At_Drought_cDNA_P Parameter: Timepoint (hr) Value: 6
  misc_feature: MA Experiment 108573 PARAMETER Experiment Name: At_Drought_cDNA_P Parameter: Tissue Value: Aerial
  misc_feature: MA Experiment 108573 PARAMETER Experiment Name: At_Drought_cDNA_P Parameter: Treatment Value: Drought vs. No Drought
  misc_feature: MA Experiment ID: 20000224 Result: Up-regulated in Transcription
gtctctctcccggagatctctctttctcttcttctccatccttcttctctcggcgcgcgcttcatccccaccaccttcgaattcgtgccctttgagggaagctgctaggatgggtgtgaagcaggctctaaggagcattgatgcgtttccaagagcagaggatcatttgcttcagaagacacaatctggcgctgttgtatctattgttggacttcttataatggctactttgttcttacacgagctgagttattatcttaacacacttacagtgcaccagatgtcagtggacttaaagcgtggagaaactcttccaattcatgtaaatatgacgtttccatctttaccttgtgatgtactgagcgtagatgctatcgacatgtcagggaagcatgaagtggatcttgatacaaacatttggaagctccgtctcaacagtcatggtcatatcataggcacagaatatatatctgatcttgttgaaaaggggcatgagcatggccactcacctcacaagcatgatggcaaagaagaacacaagaatgagactgaaaccgaagcattgaatattcttggctttgaccaagctgctgagactatgattaaaaaagtgaagcaagcattggcagatggagaaggatgtcgggtttatggtgtcctagatgtacaacgggttgccggaaacttccatatttcagttcatgggctgaacatctatgttgctcagatgatatttggcgggtccaaaaacgtaaacgtgagccatatgattcacgatctatcatttgggccgaaataccccggaattcacaacccacttgatgacaccaaccgaatactccatgacaccagtggaacattcaaatactatattaagattgttcccacagaatatagatatctttcaaaagacgtactgtcaacaaatcagtactctgtaactgaatatttcacgccaatgactgaattcgaccgtacatggccagctgtttacttcttatatgatctttcacctatcactgtgaccatcaaggaagaacgccgtagttttctccacttaatcactcgtctttgcgctgtattaggcggtacatttgctttgacaggaatgttagatcgttggatgttccgctttattgaatctttcaacaagaagccgagtactagagcgtaaactagctgaaacagagacaaaacaatgagaaacaaaaaaaaccaaaggaaggaagaagaatctctcaaatcccaaaacttgtatctgccttcttcagacaacaacacccaccagagattccaggattgatgattacattactcagaaactctagaatccatggatatagtttttttttgagtctctcttatgtattactctgattatctctggttaaactagtagagttaatttgtaatttttattcaccttgcttcctgggattttaacatttttgcatct

SEQ ID NO: 99538 - protein, 390 aa, Arabidopsis thaliana
  peptide (1)..(390): Ceres Seq. ID no. 13603174
  misc_feature (37)..(390): Homolog of NCBI NO: 30686584 NR Description: expressed protein [Arabidopsis thaliana]
  misc_feature (37)..(369): Homolog of NCBI NO: 11036454 NR Description: gb|AAF34232.1~gene_id:MCB17.1~similar to unknown
  misc_feature (37)..(390): Homolog of NCBI NO: 34897128 NR Description: unknown protein [Oryza sativa]
  misc_feature (194)..(385): Homolog of NCBI NO: 38347102 NR Description: OSJNBa0006M15.17 [Oryza sativa (japonica
  misc_feature (38)..(183): Homolog of NCBI NO: 38347102 NR Description: OSJNBa0006M15.17 [Oryza sativa (japonica
  misc_feature (194)..(385): Homolog of NCBI NO: 18395087 NR Description: expressed protein [Arabidopsis thaliana]
  misc_feature (37)..(183): Homolog of NCBI NO: 18395087 NR Description: expressed protein [Arabidopsis thaliana]
  misc_feature (194)..(385): Homolog of NCBI NO: 30693281 NR Description: expressed protein [Arabidopsis thaliana]
  misc_feature (38)..(183): Homolog of NCBI NO: 30693281 NR Description: expressed protein [Arabidopsis thaliana]
  misc_feature (194)..(363): Homolog of NCBI NO: 6598578 NR Description: F5J5.4 [Arabidopsis thaliana]
SLSRRSLFLFFSILLLSARASSPPPSNSCPLREAARMGVKQALRSIDAFPRAEDHLLQKTQSGAVVSIVGLLIMATLFLHELSYYLNTLTVHQMSVDLKRGETLPIHVNMTFPSLPCDVLSVDAIDMSGKHEVDLDTNIWKLRLNSHGHIIGTEYISDLVEKGHEHGHSPHKHDGKEEHKNETETEALNILGFDQAAETMIKKVKQALADGEGCRVYGVLDVQRVAGNFHISVHGLNIYVAQMIFGGSKNVNVSHMIHDLSFGPKYPGIHNPLDDTNRILHDTSGTFKYYIKIVPTEYRYLSKDVLSTNQYSVTEYFTPMTEFDRTWPAVYFLYDLSPITVTIKEERRSFLHLITRLCAVLGGTFALTGMLDRWMFRFIESFNKKPSTRA

SEQ ID NO: 99539 - protein, 354 aa, Arabidopsis thaliana; identical to SEQ ID NO: 41938
  peptide (1)..(354): Ceres Seq. ID no. 13603175
  misc_feature (1)..(354): Homolog of NCBI NO: 30686584 NR Description: expressed protein [Arabidopsis thaliana]
  misc_feature (1)..(333): Homolog of NCBI NO: 11036454 NR Description: gb|AAF34232.1~gene_id:MCB17.1~similar to unknown
  misc_feature (1)..(354): Homolog of NCBI NO: 34897128 NR Description: unknown protein [Oryza sativa]
  misc_feature (158)..(349): Homolog of NCBI NO: 38347102 NR Description: OSJNBa0006M15.17 [Oryza sativa (japonica
  misc_feature (2)..(147): Homolog of NCBI NO: 38347102 NR Description: OSJNBa0006M15.17 [Oryza sativa (japonica
  misc_feature (158)..(349): Homolog of NCBI NO: 18395087 NR Description: expressed protein [Arabidopsis thaliana]
  misc_feature (1)..(147): Homolog of NCBI NO: 18395087 NR Description: expressed protein [Arabidopsis thaliana]
  misc_feature (158)..(349): Homolog of NCBI NO: 30693281 NR Description: expressed protein [Arabidopsis thaliana]
  misc_feature (2)..(147): Homolog of NCBI NO: 30693281 NR Description: expressed protein [Arabidopsis thaliana]
  misc_feature (158)..(327): Homolog of NCBI NO: 6598578 NR Description: F5J5.4 [Arabidopsis thaliana]

SEQ ID NO: 99540 - protein, 317 aa, Arabidopsis thaliana; identical to SEQ ID NO: 41939
  peptide (1)..(317): Ceres Seq. ID no. 13603176
  misc_feature (1)..(317): Homolog of NCBI NO: 30686584 NR Description: expressed protein [Arabidopsis thaliana]
  misc_feature (1)..(296): Homolog of NCBI NO: 11036454 NR Description: gb|AAF34232.1~gene_id:MCB17.1~similar to unknown
  misc_feature (1)..(317): Homolog of NCBI NO: 34897128 NR Description: unknown protein [Oryza sativa]
  misc_feature (121)..(312): Homolog of NCBI NO: 38347102 NR Description: OSJNBa0006M15.17 [Oryza sativa (japonica
  misc_feature (1)..(110): Homolog of NCBI NO: 38347102 NR Description: OSJNBa0006M15.17 [Oryza sativa (japonica
  misc_feature (121)..(312): Homolog of NCBI NO: 18395087 NR Description: expressed protein [Arabidopsis thaliana]
  misc_feature (1)..(110): Homolog of NCBI NO: 18395087 NR Description: expressed protein [Arabidopsis thaliana]
  misc_feature (121)..(312): Homolog of NCBI NO: 30693281 NR Description: expressed protein [Arabidopsis thaliana]
  misc_feature (1)..(110): Homolog of NCBI NO: 30693281 NR Description: expressed protein [Arabidopsis thaliana]
  misc_feature (121)..(290): Homolog of NCBI NO: 6598578 NR Description: F5J5.4 [Arabidopsis thaliana]

SEQ ID NO: 99541 - DNA, 1342 bp, Arabidopsis thaliana
  misc_feature (1)..(1342): Ceres Seq. ID no. 13603177
  misc_feature: MA Experiment ID: 108434 Result: Down-regulated in Transcription
  misc_feature: MA Experiment 108434 PARAMETER Experiment Name: At_Root_Tips_cDNA_P Parameter: Tissue Value: Root Tips
  misc_feature: MA Experiment ID: 108461 Result: Down-regulated in Transcription
  misc_feature: MA Experiment 108461 PARAMETER Experiment Name: At_Germinating_Seeds_cDNA_P Parameter: Age (day) Value: 1 vs. 0
  misc_feature: MA Experiment 108461 PARAMETER Experiment Name: At_Germinating_Seeds_cDNA_P Parameter: Tissue Value: Germinating Seeds
  misc_feature: MA Experiment ID: 108462 Result: Up-regulated in Transcription
  misc_feature: MA Experiment 108462 PARAMETER Experiment Name: At_Germinating_Seeds_cDNA_P Parameter: Age (day) Value: 2 vs. 0
  misc_feature: MA Experiment 108462 PARAMETER Experiment Name: At_Germinating_Seeds_cDNA_P Parameter: Tissue Value: Germinating Seeds
  misc_feature: MA Experiment ID: 108463 Result: Up-regulated in Transcription
  misc_feature: MA Experiment 108463 PARAMETER Experiment Name: At_Germinating_Seeds_cDNA_P Parameter: Age (day) Value: 3 vs. 0
  misc_feature: MA Experiment 108463 PARAMETER Experiment Name: At_Germinating_Seeds_cDNA_P Parameter: Tissue Value: Germinating Seeds
  misc_feature: MA Experiment ID: 108464 Result: Up-regulated in Transcription
  misc_feature: MA Experiment 108464 PARAMETER Experiment Name: At_Germinating_Seeds_cDNA_P Parameter: Age (day) Value: 4 vs. 0
  misc_feature: MA Experiment 108464 PARAMETER Experiment Name: At_Germinating_Seeds_cDNA_P Parameter: Tissue Value: Germinating Seeds
  misc_feature: MA Experiment ID: 108488 Result: Down-regulated in Transcription
  misc_feature: MA Experiment ID: 108501 Result: Down-regulated in Transcription
  misc_feature: MA Experiment 108501 PARAMETER Experiment Name: At_ap2_floral_buds_cDNA_P Parameter: Plant Line Value: ap2 (Ler.)
  misc_feature: MA Experiment 108501 PARAMETER Experiment Name: At_ap2_floral_buds_cDNA_P Parameter: Tissue Value: Closed Flower
  misc_feature: MA Experiment ID: 108569 Result: Up-regulated in Transcription
  misc_feature: MA Experiment 108569 PARAMETER Experiment Name: At_0.001%_MeJA__cDNA_P Parameter: Timepoint (hr) Value: 6
  misc_feature: MA Experiment 108569 PARAMETER Experiment Name: At_0.001%_MeJA__cDNA_P Parameter: Tissue Value: Aerial
  misc_feature: MA Experiment 108569 PARAMETER Experiment Name: At_0.001%_MeJA__cDNA_P Parameter: Treatment Value: 0.001% MeJA vs. No Treatment
  misc_feature: MA Experiment ID: 108573 Result: Up-regulated in Transcription
  misc_feature: MA Experiment 108573 PARAMETER Experiment Name: At_Drought_cDNA_P Parameter: Timepoint (hr) Value: 6
  misc_feature: MA Experiment 108573 PARAMETER Experiment Name: At_Drought_cDNA_P Parameter: Tissue Value: Aerial
  misc_feature: MA Experiment 108573 PARAMETER Experiment Name: At_Drought_cDNA_P Parameter: Treatment Value: Drought vs. No Drought
  misc_feature: MA Experiment ID: 108577 Result: Up-regulated in Transcription
  misc_feature: MA Experiment 108577 PARAMETER Experiment Name: At_42deg_Heat_cDNA_P Parameter: Temperature (deg C) Value: 42 vs. 22
  misc_feature: MA Experiment 108577 PARAMETER Experiment Name: At_42deg_Heat_cDNA_P Parameter: Timepoint (hr) Value: 6
  misc_feature: MA Experiment 108577 PARAMETER Experiment Name: At_42deg_Heat_cDNA_P Parameter: Tissue Value: Aerial
  misc_feature: MA Experiment ID: 108594 Result: Down-regulated in Transcription
  misc_feature: MA Experiment 108594 PARAMETER Experiment Name: At_Ler-rhl_Root_cDNA_P Parameter: Plant Line Value: null
  misc_feature: MA Experiment ID: 108595 Result: Up-regulated in Transcription
  misc_feature: MA Experiment 108595 PARAMETER Experiment Name: At_Ler-pi_Ovule_cDNA_P Parameter: Plant Line Value: null
  misc_feature: MA Experiment ID: 108609 Result: Up-regulated in Transcription
  misc_feature: MA Experiment 108609 PARAMETER Experiment Name: At_100uM_ABA_cDNA_P Parameter: Timepoint (hr) Value: 24
  misc_feature: MA Experiment 108609 PARAMETER Experiment Name: At_100uM_ABA_cDNA_P Parameter: Tissue Value: Aerial
  misc_feature: MA Experiment 108609 PARAMETER Experiment Name: At_100uM_ABA_cDNA_P Parameter: Treatment Value: 100uM ABA vs. No Treatment
  misc_feature: MA Experiment ID: 20000069 Result: Up-regulated in Transcription
  misc_feature: MA Experiment 20000069 PARAMETER Experiment Name: At_100uM_ABA_Mutants_cDNA_P Parameter: Plant Line Value: CS23
  misc_feature: MA Experiment 20000069 PARAMETER Experiment Name: At_100uM_ABA_Mutants_cDNA_P Parameter: Timepoint (hr) Value: 6
  misc_feature: MA Experiment 20000069 PARAMETER Experiment Name: At_100uM_ABA_Mutants_cDNA_P Parameter: Tissue Value: Aerial
  misc_feature: MA Experiment 20000069 PARAMETER Experiment Name: At_100uM_ABA_Mutants_cDNA_P Parameter: Treatment Value: 100uM ABA vs. No Treatment
  misc_feature: MA Experiment ID: 20000070 Result: Up-regulated in Transcription
  misc_feature: MA Experiment 20000070 PARAMETER Experiment Name: At_100uM_ABA_Mutants_cDNA_P Parameter: Plant Line Value: CS24
  misc_feature: MA Experiment 20000070 PARAMETER Experiment Name: At_100uM_ABA_Mutants_cDNA_P Parameter: Timepoint (hr) Value: 6
  misc_feature: MA Experiment 20000070 PARAMETER Experiment Name: At_100uM_ABA_Mutants_cDNA_P Parameter: Tissue Value: Aerial
  misc_feature: MA Experiment 20000070 PARAMETER Experiment Name: At_100uM_ABA_Mutants_cDNA_P Parameter: Treatment Value: 100uM ABA vs. No Treatment
  misc_feature: MA Experiment ID: 20000071 Result: Up-regulated in Transcription
  misc_feature: MA Experiment 20000071 PARAMETER Experiment Name: At_100uM_ABA_Mutants_cDNA_P Parameter: Plant Line Value: CS8104
  misc_feature: MA Experiment 20000071 PARAMETER Experiment Name: At_100uM_ABA_Mutants_cDNA_P Parameter: Timepoint (hr) Value: 6
  misc_feature: MA Experiment 20000071 PARAMETER Experiment Name: At_100uM_ABA_Mutants_cDNA_P Parameter: Tissue Value: Aerial
  misc_feature: MA Experiment 20000071 PARAMETER Experiment Name: At_100uM_ABA_Mutants_cDNA_P Parameter: Treatment Value: 100uM ABA vs. No Treatment
  misc_feature: MA Experiment ID: 20000072 Result: Up-regulated in Transcription
  misc_feature: MA Experiment 20000072 PARAMETER Experiment Name: At_100uM_ABA_Mutants_cDNA_P Parameter: Plant Line Value: CS8105
  misc_feature: MA Experiment 20000072 PARAMETER Experiment Name: At_100uM_ABA_Mutants_cDNA_P Parameter: Timepoint (hr) Value: 6
  misc_feature: MA Experiment 20000072 PARAMETER Experiment Name: At_100uM_ABA_Mutants_cDNA_P Parameter: Tissue Value: Aerial
  misc_feature: MA Experiment 20000072 PARAMETER Experiment Name: At_100uM_ABA_Mutants_cDNA_P Parameter: Treatment Value: 100uM ABA vs. No Treatment
  misc_feature: MA Experiment ID: 20000086 Result: Up-regulated in Transcription
  misc_feature: MA Experiment 20000086 PARAMETER Experiment Name: At_100uM_ABA_Mutants_cDNA_P Parameter: Plant Line Value: CS22
  misc_feature: MA Experiment 20000086 PARAMETER Experiment Name: At_100uM_ABA_Mutants_cDNA_P Parameter: Timepoint (hr) Value: 6
  misc_feature: MA Experiment 20000086 PARAMETER Experiment Name: At_100uM_ABA_Mutants_cDNA_P Parameter: Tissue Value: Aerial
  misc_feature: MA Experiment 20000086 PARAMETER Experiment Name: At_100uM_ABA_Mutants_cDNA_P Parameter: Treatment Value: 100uM ABA vs. No Treatment
  misc_feature: MA Experiment ID: 20000087 Result: Up-regulated in Transcription
  misc_feature: MA Experiment 20000087 PARAMETER Experiment Name: At_100uM_ABA_Mutants_cDNA_P Parameter: Plant Line Value: WS
  misc_feature: MA Experiment 20000087 PARAMETER Experiment Name: At_100uM_ABA_Mutants_cDNA_P Parameter: Timepoint (hr) Value: 6
  misc_feature: MA Experiment 20000087 PARAMETER Experiment Name: At_100uM_ABA_Mutants_cDNA_P Parameter: Tissue Value: Aerial
  misc_feature: MA Experiment 20000087 PARAMETER Experiment Name: At_100uM_ABA_Mutants_cDNA_P Parameter: Treatment Value: 100uM ABA vs. No Treatment
  misc_feature: MA Experiment ID: 20000088 Result: Up-regulated in Transcription
  misc_feature: MA Experiment 20000088 PARAMETER Experiment Name: At_100uM_ABA_Mutants_cDNA_P Parameter: Plant Line Value: Landsberg
  misc_feature: MA Experiment 20000088 PARAMETER Experiment Name: At_100uM_ABA_Mutants_cDNA_P Parameter: Timepoint (hr) Value: 6
  misc_feature: MA Experiment 20000088 PARAMETER Experiment Name: At_100uM_ABA_Mutants_cDNA_P Parameter: Tissue Value: Aerial
  misc_feature: MA Experiment 20000088 PARAMETER Experiment Name: At_100uM_ABA_Mutants_cDNA_P Parameter: Treatment Value: 100uM ABA vs. No Treatment
  misc_feature: MA Experiment ID: 20000112 Result: Up-regulated in Transcription
  misc_feature: MA Experiment 20000112 PARAMETER Experiment Name: At_42deg_Heat_cDNA_P Parameter: Temperature (deg C) Value: 42 vs. 22
  misc_feature: MA Experiment 20000112 PARAMETER Experiment Name: At_42deg_Heat_cDNA_P Parameter: Timepoint (hr) Value: 2
  misc_feature: MA Experiment 20000112 PARAMETER Experiment Name: At_42deg_Heat_cDNA_P Parameter: Tissue Value: Aerial
  misc_feature: MA Experiment ID: 20000113 Result: Up-regulated in Transcription
  misc_feature: MA Experiment 20000113 PARAMETER Experiment Name: At_42deg_Heat_cDNA_P Parameter: Temperature (deg C) Value: 42 vs. 22
  misc_feature: MA Experiment 20000113 PARAMETER Experiment Name: At_42deg_Heat_cDNA_P Parameter: Timepoint (hr) Value: 8
  misc_feature: MA Experiment 20000113 PARAMETER Experiment Name: At_42deg_Heat_cDNA_P Parameter: Tissue Value: Aerial
  misc_feature: MA Experiment ID: 20000117 Result: Up-regulated in Transcription
  misc_feature: MA Experiment 20000117 PARAMETER Experiment Name: At_100uM_ABA_Mutants_cDNA_P Parameter: Plant Line Value: Columbia
  misc_feature: MA Experiment 20000117 PARAMETER Experiment Name: At_100uM_ABA_Mutants_cDNA_P Parameter: Timepoint (hr) Value: 6
  misc_feature: MA Experiment 20000117 PARAMETER Experiment Name: At_100uM_ABA_Mutants_cDNA_P Parameter: Tissue Value: Aerial
  misc_feature: MA Experiment 20000117 PARAMETER Experiment Name: At_100uM_ABA_Mutants_cDNA_P Parameter: Treatment Value: 100uM ABA vs. No Treatment
  misc_feature: MA Experiment ID: 20000306 Result: Down-regulated in Transcription
  misc_feature: MA Experiment 20000306 PARAMETER Experiment Name: At_Germinating_Seeds_Sub_P Parameter: Age (hr) Value: 6 vs. 0
  misc_feature: MA Experiment 20000306 PARAMETER Experiment Name: At_Germinating_Seeds_Sub_P Parameter: Organism Value: A. thaliana
  misc_feature: MA Experiment 20000306 PARAMETER Experiment Name: At_Germinating_Seeds_Sub_P Parameter: Plant Line Value: WS
  misc_feature: MA Experiment 20000306 PARAMETER Experiment Name: At_Germinating_Seeds_Sub_P Parameter: Tissue Value: Germinating Seeds
  misc_feature: MA Experiment ID: 20000307 Result: Down-regulated in Transcription
  misc_feature: MA Experiment 20000307 PARAMETER Experiment Name: At_Germinating_Seeds_Sub_P Parameter: Age (hr) Value: 24 vs. 0
  misc_feature: MA Experiment 20000307 PARAMETER Experiment Name: At_Germinating_Seeds_Sub_P Parameter: Organism Value: A. thaliana
  misc_feature: MA Experiment 20000307 PARAMETER Experiment Name: At_Germinating_Seeds_Sub_P Parameter: Plant Line Value: WS
  misc_feature: MA Experiment 20000307 PARAMETER Experiment Name: At_Germinating_Seeds_Sub_P Parameter: Tissue Value: Germinating Seeds
  misc_feature: MA Experiment ID: 20000329 Result: Up-regulated in Transcription
  misc_feature: MA Experiment 20000329 PARAMETER Experiment Name: At_4deg_Cold_Sub_P Parameter: Age (day) Value: 14
  misc_feature: MA Experiment 20000329 PARAMETER Experiment Name: At_4deg_Cold_Sub_P Parameter: Organism Value: A. thaliana
  misc_feature: MA Experiment 20000329 PARAMETER Experiment Name: At_4deg_Cold_Sub_P Parameter: Plant Line Value: WS
  misc_feature: MA Experiment 20000329 PARAMETER Experiment Name: At_4deg_Cold_Sub_P Parameter: Temperature (deg C) Value: 4 vs. 22
  misc_feature: MA Experiment 20000329 PARAMETER Experiment Name: At_4deg_Cold_Sub_P Parameter: Timepoint (hr) Value: 6
  misc_feature: MA Experiment 20000329 PARAMETER Experiment Name: At_4deg_Cold_Sub_P Parameter: Tissue Value: Aerial
  misc_feature: MA Experiment ID: 20000332 Result: Up-regulated in Transcription
  misc_feature: MA Experiment 20000332 PARAMETER Experiment Name: At_4deg_Cold_Sub_P Parameter: Age (day) Value: 14
  misc_feature: MA Experiment 20000332 PARAMETER Experiment Name: At_4deg_Cold_Sub_P Parameter: Organism Value: A. thaliana
  misc_feature: MA Experiment 20000332 PARAMETER Experiment Name: At_4deg_Cold_Sub_P Parameter: Plant Line Value: WS
  misc_feature: MA Experiment 20000332 PARAMETER Experiment Name: At_4deg_Cold_Sub_P Parameter: Temperature (deg C) Value: 4 vs. 22
  misc_feature: MA Experiment 20000332 PARAMETER Experiment Name: At_4deg_Cold_Sub_P Parameter: Timepoint (hr) Value: 2
  misc_feature: MA Experiment 20000332 PARAMETER Experiment Name: At_4deg_Cold_Sub_P Parameter: Tissue Value: Aerial
  misc_feature: MA Experiment ID: 20000355 Result: Down-regulated in Transcription
  misc_feature: MA Experiment 20000355 PARAMETER Experiment Name: At_Siliques_Sub_P Parameter: Age (day) Value: 21
  misc_feature: MA Experiment 20000355 PARAMETER Experiment Name: At_Siliques_Sub_P Parameter: Organism Value: A. thaliana
  misc_feature: MA Experiment 20000355 PARAMETER Experiment Name: At_Siliques_Sub_P Parameter: Plant Line Value: WS
  misc_feature: MA Experiment 20000355 PARAMETER Experiment Name: At_Siliques_Sub_P Parameter: Tissue Value: Less Than 5mm Siliques vs. Whole Plant
  misc_feature: MA Experiment ID: 20000440 Result: Down-regulated in Transcription
  misc_feature: MA Experiment 20000440 PARAMETER Experiment Name: At_Closed-Flower__Sub_P Parameter: Tissue Value: Closed Flower vs. Whole Plant
gtataaagacgacaaagtaaaccaaaaaaaaaaagagttctcctacaattttcctaaattcttggatttgagatttcactttttccgatttgaaacaatgatgataactcgcggtggagccaaggcggcgaaatcgctgttagtggcggctggaccacgtttgttctcgacggtccgtacggtttcgtctcacgaggctttatcagcaagccatattttgaagcctggtgttacatctgcttggatatggactagagctccgacgattggaggtatgagattcgctagcacgatcactctgggagagaaaactccgatgaaggaggaggacgcgaatcagaagaaaacagagaacgaatccaccggtggagacgccgccggaggtaataacaagggagataaaggaatcgcgagctattggggtgttgaacctaataagattactaaagaagatggttctgaatggaagtggaactgtttcaggccatgggaaacgtataaagctgatataacgatagatctgaagaagcatcatgttccaacgacgtttcttgatagaatagcttattggactgttaaatctcttcgttggcctaccgatttgttcttccagaggagatatggatgtcgagctatgatgcttgaaactgtagcagcagtacctggaatggttggaggaatgttactacactgcaaatcgcttcgacgttttgagcaaagtggaggatggattaaggctcttcttgaggaagcagagaatgagagaatgcatcttatgacattcatggaagtcgcgaaaccgaaatggtacgagagagcgctcgtgatcactgtgcaaggagtcttcttcaacgcttatttccttggttacttaatctctcccaagtttgctcatcgtatggttgggtaccttgaagaagaagcgatccattcttatactgagtttctcaaggaacttgacaaaggtaacattgagaatgttcctgctccggctattgctattgattactggaggcttcctgctgatgcgacacttcgtgatgttgtgatggttgttcgtgctgacgaggctcatcaccgtgatgtaaaccattttgcatctgatattcactaccaaggtcgtgaactaaaggaagctccagctccaattgggtatcattgattcgattaaaagaagagctttttctcaagtttaaaactttgttctaaagaatttaagttctttgacttgtatatacatcatcacctctgcttaagccatacttggattcggctttctttgaatgttgctacgaatgttctgatttcttctttacttttcctgtcaatgggcttttgggct

SEQ ID NO: 99542 - protein, 386 aa, Arabidopsis thaliana
  peptide (1)..(386): Ceres Seq. ID no. 13603178
  misc_feature (107)..(384): Pfam Name: Alternative oxidase Pfam Description: Alternative oxidase
  misc_feature (33)..(386): Homolog of NCBI NO: 15228734 NR Description: alternative oxidase 1a, mitochondrial (AOX1A) thaliana] >gi|3915639|sp|Q39219|AX1A_ARATH Alternative oxidase
  misc_feature (33)..(386): Homolog of NCBI NO: 11278947 NR Description: alternative respiratory pathway oxidase (EC
  misc_feature (84)..(386): Homolog of NCBI NO: 421824 NR Description: alternative respiratory pathway oxidase (EC
  misc_feature (100)..(386): Homolog of NCBI NO: 1872517 NR Description: alternative oxidase [Arabidopsis thaliana]
  misc_feature (33)..(386): Homolog of NCBI NO: 6634501 NR Description: alternative oxidase [Populus tremula x Populus
  misc_feature (66)..(386): Homolog of NCBI NO: 15228729 NR Description: alternative oxidase 1b, mitochondrial (AOX1B) thaliana] >gi|3913143|sp|O23913|AX1B_ARATH Alternative oxidase
  misc_feature (34)..(386): Homolog of NCBI NO: 3023316 NR Description: Alternative oxidase 1, mitochondrial precursor
  misc_feature (62)..(386): Homolog of NCBI NO: 15232222 NR Description: alternative oxidase 1c, mitochondrial (AOX1C) thaliana] >gi|3913142|sp|O22048|AX1C_ARATH Alternative oxidase mitochondrial precursor >gi|2506049|dbj|BAA22635.1| alternative
  misc_feature (82)..(386): Homolog of NCBI NO: 3913066 NR Description: Alternative oxidase 2, mitochondrial precursor
  misc_feature (34)..(386): Homolog of NCBI NO: 29465622 NR Description: alternative oxidase 1a [Lycopersicon esculentum]
YKDDKVNQKKKEFSYNFPKFLDLRFHFFRFETMMITRGGAKAAKSLLVAAGPRLFSTVRTVSSHEALSASHILKPGVTSAWIWTRAPTIGGMRFASTITLGEKTPMKEEDANQKKTENESTGGDAAGGNNKGDKGIASYWGVEPNKITKEDGSEWKWNCFRPWETYKADITIDLKKHHVPTTFLDRIAYWTVKSLRWPTDLFFQRRYGCRAMMLETVAAVPGMVGGMLLHCKSLRRFEQSGGWIKALLEEAENERMHLMTFMEVAKPKWYERALVITVQGVFFNAYFLGYLISPKFAHRMVGYLEEEAIHSYTEFLKELDKGNIENVPAPAIAIDYWRLPADATLRDVVMVVRADEAHHRDVNHFASDIHYQGRELKEAPAPIGYH

SEQ ID NO: 99543 - protein, 354 aa, Arabidopsis thaliana; identical to SEQ ID NO: 40785
  peptide (1)..(354): Ceres Seq. ID no. 13603179
  misc_feature (75)..(352): Pfam Name: Alternative oxidase Pfam Description: Alternative oxidase
  misc_feature (1)..(354): Homolog of NCBI NO: 15228734 NR Description: alternative oxidase 1a, mitochondrial (AOX1A) thaliana] >gi|3915639|sp|Q39219|AX1A_ARATH Alternative oxidase
  misc_feature (1)..(354): Homolog of NCBI NO: 11278947 NR Description: alternative respiratory pathway oxidase (EC
  misc_feature (52)..(354): Homolog of NCBI NO: 421824 NR Description: alternative respiratory pathway oxidase (EC
  misc_feature (68)..(354): Homolog of NCBI NO: 1872517 NR Description: alternative oxidase [Arabidopsis thaliana]
  misc_feature (1)..(354): Homolog of NCBI NO: 6634501 NR Description: alternative oxidase [Populus tremula x Populus
  misc_feature (34)..(354): Homolog of NCBI NO: 15228729 NR Description: alternative oxidase 1b, mitochondrial (AOX1B) thaliana] >gi|3913143|sp|O23913|AX1B_ARATH Alternative oxidase
  misc_feature (2)..(354): Homolog of NCBI NO: 3023316 NR Description: Alternative oxidase 1, mitochondrial precursor
  misc_feature (30)..(354): Homolog of NCBI NO: 15232222 NR Description: alternative oxidase 1c, mitochondrial (AOX1C) thaliana] >gi|3913142|sp|O22048|AX1C_ARATH Alternative oxidase mitochondrial precursor >gi|2506049|dbj|BAA22635.1| alternative
  misc_feature (50)..(354): Homolog of NCBI NO: 3913066 NR Description: Alternative oxidase 2, mitochondrial precursor
  misc_feature (2)..(354): Homolog of NCBI NO: 29465622 NR Description: alternative oxidase 1a [Lycopersicon esculentum]

SEQ ID NO: 99544 - protein, 353 aa, Arabidopsis thaliana; identical to SEQ ID NO: 40786
  peptide (1)..(353): Ceres Seq. ID no. 13603180
  misc_feature (74)..(351): Pfam Name: Alternative oxidase Pfam Description: Alternative oxidase
  misc_feature (1)..(353): Homolog of NCBI NO: 15228734 NR Description: alternative oxidase 1a, mitochondrial (AOX1A) thaliana] >gi|3915639|sp|Q39219|AX1A_ARATH Alternative oxidase
  misc_feature (1)..(353): Homolog of NCBI NO: 11278947 NR Description: alternative respiratory pathway oxidase (EC
  misc_feature (51)..(353): Homolog of NCBI NO: 421824 NR Description: alternative respiratory pathway oxidase (EC
  misc_feature (67)..(353): Homolog of NCBI NO: 1872517 NR Description: alternative oxidase [Arabidopsis thaliana]
  misc_feature (1)..(353): Homolog of NCBI NO: 6634501 NR Description: alternative oxidase [Populus tremula x Populus
  misc_feature (33)..(353): Homolog of NCBI NO: 15228729 NR Description: alternative oxidase 1b, mitochondrial (AOX1B) thaliana] >gi|3913143|sp|O23913|AX1B_ARATH Alternative oxidase
  misc_feature (1)..(353): Homolog of NCBI NO: 3023316 NR Description: Alternative oxidase 1, mitochondrial precursor
  misc_feature (29)..(353): Homolog of NCBI NO: 15232222 NR Description: alternative oxidase 1c, mitochondrial (AOX1C) thaliana] >gi|3913142|sp|O22048|AX1C_ARATH Alternative oxidase mitochondrial precursor >gi|2506049|dbj|BAA22635.1| alternative
  misc_feature (49)..(353): Homolog of NCBI NO: 3913066 NR Description: Alternative oxidase 2, mitochondrial precursor
  misc_feature (1)..(353): Homolog of NCBI NO: 29465622 NR Description: alternative oxidase 1a [Lycopersicon esculentum]

SEQ ID NO: 99545 - DNA, 661 bp, Arabidopsis thaliana
  misc_feature (1)..(661): Ceres Seq. ID no. 13603181
  misc_feature: MA Experiment ID: 108434 Result: Up-regulated in Transcription
  misc_feature: MA Experiment 108434 PARAMETER Experiment Name: At_Root_Tips_cDNA_P Parameter: Tissue Value: Root Tips
  misc_feature: MA Experiment ID: 108462 Result: Down-regulated in Transcription
  misc_feature: MA Experiment 108462 PARAMETER Experiment Name: At_Germinating_Seeds_cDNA_P Parameter: Age (day) Value: 2 vs. 0
  misc_feature: MA Experiment 108462 PARAMETER Experiment Name: At_Germinating_Seeds_cDNA_P Parameter: Tissue Value: Germinating Seeds
  misc_feature: MA Experiment ID: 108463 Result: Down-regulated in Transcription
  misc_feature: MA Experiment 108463 PARAMETER Experiment Name: At_Germinating_Seeds_cDNA_P Parameter: Age (day) Value: 3 vs. 0
  misc_feature: MA Experiment 108463 PARAMETER Experiment Name: At_Germinating_Seeds_cDNA_P Parameter: Tissue Value: Germinating Seeds
  misc_feature: MA Experiment ID: 20000224 Result: Up-regulated in Transcription
ttgtttcttcatcttcctcactctctgcgccgcgtttgcttccatcgttctctcgattgtttcctctcaagcgaagcttcttcttcttcgatcttcttcctcgtgtgtggattcgtttctgaaataggatcgaagtaatggccagcaaatctggaagcggtggcctaagagaaccgccgaatgagcaagctgttttgaacatgtatgaaggcaagagatcagagctaagccaaatctactccaacataaccgacctcgagatgcaagtgagcgaacattctctggtcattaacgccattcagcctctcgaccaatcgaggaaatgcttccgcatgataggaggcgttcttgtcgaaagaaccatcaaagaggtactaccagctgtccaacgtaacaaggacggacttgaagaggttgtgaggaagctatacgagacattggagaaaaagaagaaagatcttacagagtttgaagctaagtataagatcaggataacgaaacaagaagataacaaggaaggaggtaacaagaaggaaggtaatgctcaaggtgttcttgttggagctgccagttcaagccagtaaaactctatatttggcagtttgttttactgttgtatctcttttttggatcttatggttaaaagccgtaaactttgctg

SEQ ID NO: 99546 - protein, 148 aa, Arabidopsis thaliana; identical to SEQ ID NO: 37084
  peptide (1)..(148): Ceres Seq. ID no. 13603182
  misc_feature (16)..(123): Pfam Name: KE2 family protein Pfam Description: KE2 family protein
  misc_feature (1)..(148): Homolog of NCBI NO: 15228766 NR Description: prefoldin-related protein [Arabidopsis thaliana]
  misc_feature (5)..(141): Homolog of NCBI NO: 12408675 NR Description: prefoldin 2 [Homo sapiens] Prefoldin subunit 2 (HSPC231) prefoldin subunit 2 [Homo sapiens]
  misc_feature (5)..(141): Homolog of NCBI NO: 28189659 NR Description: similar to prefoldin subunit 2 [Bos taurus]
  misc_feature (1)..(141): Homolog of NCBI NO: 31981577 NR Description: prefoldin 2; EST W48336 [Mus musculus] Prefoldin subunit 2 >gi|20070918|gb|AAH26839.1| Pfdn2 protein musculus] >gi|29612494|gb|AAH49606.1| Similar to prefoldin 2 [Mus
  misc_feature (14)..(141): Homolog of NCBI NO: 5690431 NR Description: prefoldin subunit 2 [Homo sapiens]
  misc_feature (1)..(141): Homolog of NCBI NO: 3212116 NR Description: prefoldin subunit 2 [Mus musculus]
  misc_feature (42)..(141): Homolog of NCBI NO: 7106852 NR Description: HSPC231 [Homo sapiens]
  misc_feature (2)..(148): Homolog of NCBI NO: 31215893 NR Description: ENSANGP00000020462 [Anopheles gambiae]
  misc_feature (15)..(141): Homolog of NCBI NO: 24662461 NR Description: CG6302-PA [Drosophila melanogaster]
  misc_feature (16)..(121): Homolog of NCBI NO: 32422395 NR Description: hypothetical protein [Neurospora crassa]

SEQ ID NO: 99547 - protein, 127 aa, Arabidopsis thaliana; identical to SEQ ID NO: 37085
  peptide (1)..(127): Ceres Seq. ID no. 13603183
  misc_feature (1)..(102): Pfam Name: KE2 family protein Pfam Description: KE2 family protein
  misc_feature (1)..(127): Homolog of NCBI NO: 15228766 NR Description: prefoldin-related protein [Arabidopsis thaliana]
  misc_feature (1)..(120): Homolog of NCBI NO: 12408675 NR Description: prefoldin 2 [Homo sapiens] Prefoldin subunit 2 (HSPC231) prefoldin subunit 2 [Homo sapiens]
  misc_feature (1)..(120): Homolog of NCBI NO: 28189659 NR Description: similar to prefoldin subunit 2 [Bos taurus]
  misc_feature (1)..(120): Homolog of NCBI NO: 31981577 NR Description: prefoldin 2; EST W48336 [Mus musculus] Prefoldin subunit 2 >gi|20070918|gb|AAH26839.1| Pfdn2 protein musculus] >gi|29612494|gb|AAH49606.1| Similar to prefoldin 2 [Mus
  misc_feature (1)..(120): Homolog of NCBI NO: 5690431 NR Description: prefoldin subunit 2 [Homo sapiens]
  misc_feature (1)..(120): Homolog of NCBI NO: 3212116 NR Description: prefoldin subunit 2 [Mus musculus]
  misc_feature (21)..(120): Homolog of NCBI NO: 7106852 NR Description: HSPC231 [Homo sapiens]
  misc_feature (1)..(127): Homolog of NCBI NO: 31215893 NR Description: ENSANGP00000020462 [Anopheles gambiae]
  misc_feature (1)..(120): Homolog of NCBI NO: 24662461 NR Description: CG6302-PA [Drosophila melanogaster]
  misc_feature (1)..(100): Homolog of NCBI NO: 32422395 NR Description: hypothetical protein [Neurospora crassa]

SEQ ID NO: 99548 - protein, 107 aa, Arabidopsis thaliana; identical to SEQ ID NO: 37086
  peptide (1)..(107): Ceres Seq. ID no. 13603184
  misc_feature (1)..(82): Pfam Name: KE2 family protein Pfam Description: KE2 family protein
  misc_feature (1)..(107): Homolog of NCBI NO: 15228766 NR Description: prefoldin-related protein [Arabidopsis thaliana]
  misc_feature (1)..(100): Homolog of NCBI NO: 12408675 NR Description: prefoldin 2 [Homo sapiens] Prefoldin subunit 2 (HSPC231) prefoldin subunit 2 [Homo sapiens]
  misc_feature (1)..(100): Homolog of NCBI NO: 28189659 NR Description: similar to prefoldin subunit 2 [Bos taurus]
  misc_feature (1)..(100): Homolog of NCBI NO: 31981577 NR Description: prefoldin 2; EST W48336 [Mus musculus] Prefoldin subunit 2 >gi|20070918|gb|AAH26839.1| Pfdn2 protein musculus] >gi|29612494|gb|AAH49606.1| Similar to prefoldin 2 [Mus
  misc_feature (1)..(100): Homolog of NCBI NO: 5690431 NR Description: prefoldin subunit 2 [Homo sapiens]
  misc_feature (1)..(100): Homolog of NCBI NO: 3212116 NR Description: prefoldin subunit 2 [Mus musculus]
  misc_feature (1)..(100): Homolog of NCBI NO: 7106852 NR Description: HSPC231 [Homo sapiens]
  misc_feature (1)..(107): Homolog of NCBI NO: 31215893 NR Description: ENSANGP00000020462 [Anopheles gambiae]
  misc_feature (1)..(100): Homolog of NCBI NO: 24662461 NR Description: CG6302-PA [Drosophila melanogaster]
  misc_feature (1)..(80): Homolog of NCBI NO: 32422395 NR Description: hypothetical protein [Neurospora crassa]

SEQ ID NO: 99549 - DNA, 995 bp, Arabidopsis thaliana
  misc_feature (1)..(995): Ceres Seq. ID no. 13603185
  misc_feature: MA Experiment ID: 20000171 Result: Up-regulated in Transcription
  misc_feature: MA Experiment 20000171 PARAMETER Experiment Name: At_42deg_Heat_P Parameter: Age (day) Value: 14
  misc_feature: MA Experiment 20000171 PARAMETER Experiment Name: At_42deg_Heat_P Parameter: Organism Value: A. thaliana
  misc_feature: MA Experiment 20000171 PARAMETER Experiment Name: At_42deg_Heat_P Parameter: Plant Line Value: WS
  misc_feature: MA Experiment 20000171 PARAMETER Experiment Name: At_42deg_Heat_P Parameter: Temperature (deg C) Value: 42 vs. 22
  misc_feature: MA Experiment 20000171 PARAMETER Experiment Name: At_42deg_Heat_P Parameter: Timepoint (hr) Value: 1
  misc_feature: MA Experiment 20000171 PARAMETER Experiment Name: At_42deg_Heat_P Parameter: Tissue Value: Aerial
  misc_feature: MA Experiment ID: 20000173 Result: Up-regulated in Transcription
  misc_feature: MA Experiment 20000173 PARAMETER Experiment Name: At_42deg_Heat_P Parameter: Age (day) Value: 14
  misc_feature: MA Experiment 20000173 PARAMETER Experiment Name: At_42deg_Heat_P Parameter: Organism Value: A. thaliana
  misc_feature: MA Experiment 20000173 PARAMETER Experiment Name: At_42deg_Heat_P Parameter: Plant Line Value: WS
  misc_feature: MA Experiment 20000173 PARAMETER Experiment Name: At_42deg_Heat_P Parameter: Temperature (deg C) Value: 42 vs. 22
  misc_feature: MA Experiment 20000173 PARAMETER Experiment Name: At_42deg_Heat_P Parameter: Timepoint (hr) Value: 6
  misc_feature: MA Experiment 20000173 PARAMETER Experiment Name: At_42deg_Heat_P Parameter: Tissue Value: Aerial
  misc_feature: MA Experiment ID: 20000437 Result: Up-regulated in Transcription
  misc_feature: MA Experiment 20000437 PARAMETER Experiment Name: At_Drought_P Parameter: Age (day) Value: 8
  misc_feature: MA Experiment 20000437 PARAMETER Experiment Name: At_Drought_P Parameter: Organism Value: A. thaliana
  misc_feature: MA Experiment 20000437 PARAMETER Experiment Name: At_Drought_P Parameter: Plant Line Value: WS
  misc_feature: MA Experiment 20000437 PARAMETER Experiment Name: At_Drought_P Parameter: Timepoint (hr) Value: 24
  misc_feature: MA Experiment 20000437 PARAMETER Experiment Name: At_Drought_P Parameter: Tissue Value: Whole Plant
  misc_feature: MA Experiment 20000437 PARAMETER Experiment Name: At_Drought_P Parameter: Treatment Value: Drought vs. No Drought
taatgttgctctcacactcatgcacctctcttatctttataggagttgttgtcacttttgtatgtaacacaaaacggaacataacataacaaaacagagagatgagtcaagaagaacaaccaaagcggccacaagagccagtcacttacggtgacgtttttgaagtctccggtgaactcgctgataagcctatagcgccggaggatgcaaacatgatgcaagcagcggagacacgtgtgtttggccacactcagaaaggcggtgcagcggcagtcatgcagtctgcagccactgctaataaacgcggtggctttgtccatccaggtgacacaactgatctcgccgctgaacgaggcgtcacagtggcgcaaactgacgtccctggtgcacgtgtcacaacagaattcgtcggtggacaggtcgttggacaatacgtcgagcctaggccagtggcgactgcggcagctatggaagcagaagttgtgggtttgagtttacaaagtgcaataacgattggagaagcattggaagcgactgtgcaaaccgctggaaacaaaccggtggatcaaagcgacgcagcagcgattcaagcggcagaggttagagcttgtggcactaatgtgattgctcctggtggaatcgccgcttctgctcaatcagcagcaaatcacaacgctaccatagaccgtgatgaggataaaatcaagctcattgatgttttggcggggtgcgaccgggaagttagccgcagataaagctgtgaccaggcaggacgcagagggagtggtgagcgctgagctgaggaacaatcctaatttgtctactcaccctggtggtgtagcggcttctattactgccgccgctaggcttaacgagagagctgatatatgaaaaatcctgcgagagggagatgttttggttctgttgttcaaaaaagttcagtcataatgtaaaaaaatggtcactttccggttataaagttgaaatctttctct

SEQ ID NO: 99550 - protein, 217 aa, Arabidopsis thaliana
  peptide (1)..(217): Ceres Seq. ID no. 13603186
  misc_feature (134)..(196): Pfam Name: Seed maturation protein Pfam Description: Seed maturation protein
  misc_feature (1)..(209): Homolog of NCBI NO: 15228768 NR Description: LEA protein -related [Arabidopsis thaliana]
  misc_feature (1)..(217): Homolog of NCBI NO: 2129632 NR Description: embryonic protein LEA.D34 homolog type 1 - thaliana >gi|1113094|emb|CAA63085.1| LEA D34 protein homologue
  misc_feature (1)..(215): Homolog of NCBI NO: 15228770 NR Description: LEA protein -related [Arabidopsis thaliana] LEA protein in group 5 [Arabidopsis thaliana] AT3g22500/F16J14_6 [Arabidopsis thaliana]
  misc_feature (1)..(215): Homolog of NCBI NO: 1526422 NR Description: LEA protein in group 5 [Arabidopsis thaliana]
  misc_feature (1)..(209): Homolog of NCBI NO: 126078 NR Description: LATE EMBRYOGENESIS ABUNDANT PROTEIN D-34 (LEA
MSQEEQPKRPQEPVTYGDVFEVSGELADKPIAPEDANMMQAAETRVFGHTQKGGAAAVMQSAATANKRGGFVHPGDTTDLAAERGVTVAQTDVPGARVTTEFVGGQVVGQYVEPRPVATAAAMEAEVVGLSLQSAITIGEALEATVQTAGNKPVDQSDAAAIQAAEVRACGTNVIAPGGIAASAQSAANHNATIDRDEDKIKLIDVLAGCDREVSRR

SEQ ID NO: 99551 - protein, 180 aa, Arabidopsis thaliana
  peptide (1)..(180): Ceres Seq. ID no. 13603187
  misc_feature (97)..(159): Pfam Name: Seed maturation protein Pfam Description: Seed maturation protein
  misc_feature (1)..(172): Homolog of NCBI NO: 15228768 NR Description: LEA protein -related [Arabidopsis thaliana]
  misc_feature (1)..(180): Homolog of NCBI NO: 2129632 NR Description: embryonic protein LEA.D34 homolog type 1 - thaliana >gi|1113094|emb|CAA63085.1| LEA D34 protein homologue
  misc_feature (1)..(178): Homolog of NCBI NO: 15228770 NR Description: LEA protein -related [Arabidopsis thaliana] LEA protein in group 5 [Arabidopsis thaliana] AT3g22500/F16J14_6 [Arabidopsis thaliana]
  misc_feature (1)..(178): Homolog of NCBI NO: 1526422 NR Description: LEA protein in group 5 [Arabidopsis thaliana]
  misc_feature (1)..(172): Homolog of NCBI NO: 126078 NR Description: LATE EMBRYOGENESIS ABUNDANT PROTEIN D-34 (LEA
MMQAAETRVFGHTQKGGAAAVMQSAATANKRGGFVHPGDTTDLAAERGVTVAQTDVPGARVTTEFVGGQVVGQYVEPRPVATAAAMEAEVVGLSLQSAITIGEALEATVQTAGNKPVDQSDAAAIQAAEVRACGTNVIAPGGIAASAQSAANHNATIDRDEDKIKLIDVLAGCDREVSRR

SEQ ID NO: 99552 - protein, 179 aa, Arabidopsis thaliana
  peptide (1)..(179): Ceres Seq. ID no. 13603188
  misc_feature (96)..(158): Pfam Name: Seed maturation protein Pfam Description: Seed maturation protein
  misc_feature (1)..(171): Homolog of NCBI NO: 15228768 NR Description: LEA protein -related [Arabidopsis thaliana]
  misc_feature (1)..(179): Homolog of NCBI NO: 2129632 NR Description: embryonic protein LEA.D34 homolog type 1 - thaliana >gi|1113094|emb|CAA63085.1| LEA D34 protein homologue
  misc_feature (1)..(177): Homolog of NCBI NO: 15228770 NR Description: LEA protein -related [Arabidopsis thaliana] LEA protein in group 5 [Arabidopsis thaliana] AT3g22500/F16J14_6 [Arabidopsis thaliana]
  misc_feature (1)..(177): Homolog of NCBI NO: 1526422 NR Description: LEA protein in group 5 [Arabidopsis thaliana]
  misc_feature (1)..(171): Homolog of NCBI NO: 126078 NR Description: LATE EMBRYOGENESIS ABUNDANT PROTEIN D-34 (LEA
MQAAETRVFGHTQKGGAAAVMQSAATANKRGGFVHPGDTTDLAAERGVTVAQTDVPGARVTTEFVGGQVVGQYVEPRPVATAAAMEAEVVGLSLQSAITIGEALEATVQTAGNKPVDQSDAAAIQAAEVRACGTNVIAPGGIAASAQSAANHNATIDRDEDKIKLIDVLAGCDREVSRR

SEQ ID NO: 99553 - DNA, 1030 bp, Arabidopsis thaliana
  misc_feature (1)..(1030): Ceres Seq. ID no. 13603189
  misc_feature: MA Experiment ID: 108488 Result: Down-regulated in Transcription
  misc_feature: MA Experiment ID: 108489 Result: Up-regulated in Transcription
  misc_feature: MA Experiment ID: 20000089 Result: Down-regulated in Transcription
  misc_feature: MA Experiment ID: 20000090 Result: Down-regulated in Transcription
  misc_feature: MA Experiment ID: 20000111 Result: Up-regulated in Transcription
  misc_feature: MA Experiment 20000111 PARAMETER Experiment Name: At_42deg_Heat_cDNA_P Parameter: Temperature (deg C) Value: 42 vs. 22
  misc_feature: MA Experiment 20000111 PARAMETER Experiment Name: At_42deg_Heat_cDNA_P Parameter: Timepoint (hr) Value: 6
  misc_feature: MA Experiment 20000111 PARAMETER Experiment Name: At_42deg_Heat_cDNA_P Parameter: Tissue Value: Aerial
  misc_feature: MA Experiment ID: 20001905 Result: Up-regulated in Transcription
  misc_feature: MA Experiment 20001905 PARAMETER Experiment Name: At_Drought_Reproduction_P Parameter: Age (day) Value: 40
  misc_feature: MA Experiment 20001905 PARAMETER Experiment Name: At_Drought_Reproduction_P Parameter: Organism Value: A. thaliana
  misc_feature: MA Experiment 20001905 PARAMETER Experiment Name: At_Drought_Reproduction_P Parameter: Plant Line Value: WS
  misc_feature: MA Experiment 20001905 PARAMETER Experiment Name: At_Drought_Reproduction_P Parameter: Timepoint (day) Value: 10
  misc_feature: MA Experiment 20001905 PARAMETER Experiment Name: At_Drought_Reproduction_P Parameter: Tissue Value: Rosettes
  misc_feature: MA Experiment 20001905 PARAMETER Experiment Name: At_Drought_Reproduction_P Parameter: Treatment Value: Drought vs. No Drought
agaggggtagtttggtaaattttcaaatgcccttatctcatttccgatcctccttcttcttgctaccgccttcgcacccattcataaaaaaggaaagacgcaatcttttcttgtctcttccattgcttcaaatcctcctaataaagctttcctctttcactttctaatctctttaatccgtttaaatccaatcccaaatacagattttgattacaaaaatctaacattttgctgatttgtgttttagggttctctcgtgttttttatgattttgattcccgtaaagattcaatcacttttctcatatctcttgttactgaatttgatccaatcgatcgataaaccaaacccagaagctatgagagtgcacccaattcccagaaacatcaacaacacattgatccatcatcatcatcataacccgacccgagaacccggaaagaatctccgacgattaccacatatcttcaaccgtgttctggagctaccattgaggtcagaagcagatgtagcagtggaagagagacacgactgttttcgatttgtggcggagacggtaggtctctgtaacggcgatggagaaatgagggcttatatggttgagattcatcctggtataaccaagatcgttgtgaggacaaatgggtcttcttctcttggtttgtctttagacgaattagagcttgacgtgtggcgttttaggttaccggaatcaactaggcctgagcttgttactgttgcttgtgttgatggtgatttgattgttactgtgcctaagaatgctgaagaagaagatgatgatggtggtggtggtgattttggacaaggtattggtagtggaaggcttgtgcttgttcagtgaatcaaagtaatgtcctctatgtaacatgagaagaagactaatctctaatcttcttcgtttcgttgatattgtgtagccttctgtttttgttgttggcaataaaagaaaagattgaatctttgatgatctcttattttgtaagatcaacaagggttgtttaaggttgta

SEQ ID NO: 99554 - protein, 198 aa, Arabidopsis thaliana; identical to SEQ ID NO: 29617
  peptide (1)..(198): Ceres Seq. ID no. 13603190
  misc_feature (1)..(198): Homolog of NCBI NO: 18403425 NR Description: expressed protein [Arabidopsis thaliana] unknown protein [Arabidopsis thaliana]
  misc_feature (1)..(198): Homolog of NCBI NO: 21553463 NR Description: unknown [Arabidopsis thaliana]
  misc_feature (32)..(198): Homolog of NCBI NO: 11994285 NR Description: emb|CAB10262.1~gene_id:F16J14.9~similar to
  misc_feature (32)..(171): Homolog of NCBI NO: 15233585 NR Description: expressed protein [Arabidopsis thaliana]
  misc_feature (32)..(197): Homolog of NCBI NO: 34394452 NR Description: hypothetical protein [Oryza sativa (japonica
  misc_feature (59)..(171): Homolog of NCBI NO: 22773244 NR Description: Hypothetical protein [Oryza sativa (japonica

SEQ ID NO: 99555 - protein, 167 aa, Arabidopsis thaliana; identical to SEQ ID NO: 29618
  peptide (1)..(167): Ceres Seq. ID no. 13603191
  misc_feature (1)..(167): Homolog of NCBI NO: 18403425 NR Description: expressed protein [Arabidopsis thaliana] unknown protein [Arabidopsis thaliana]
  misc_feature (1)..(167): Homolog of NCBI NO: 21553463 NR Description: unknown [Arabidopsis thaliana]
  misc_feature (1)..(167): Homolog of NCBI NO: 11994285 NR Description: emb|CAB10262.1~gene_id:F16J14.9~similar to
  misc_feature (1)..(140): Homolog of NCBI NO: 15233585 NR Description: expressed protein [Arabidopsis thaliana]
  misc_feature (1)..(166): Homolog of NCBI NO: 34394452 NR Description: hypothetical protein [Oryza sativa (japonica
  misc_feature (28)..(140): Homolog of NCBI NO: 22773244 NR Description: Hypothetical protein [Oryza sativa (japonica

SEQ ID NO: 99556 - DNA, 1525 bp, Arabidopsis thaliana
  misc_feature (1)..(1525): Ceres Seq. ID no. 13603204
  misc_feature: MA Experiment ID: 108573 Result: Up-regulated in Transcription
  misc_feature: MA Experiment 108573 PARAMETER Experiment Name: At_Drought_cDNA_P Parameter: Timepoint (hr) Value: 6
  misc_feature: MA Experiment 108573 PARAMETER Experiment Name: At_Drought_cDNA_P Parameter: Tissue Value: Aerial
  misc_feature: MA Experiment 108573 PARAMETER Experiment Name: At_Drought_cDNA_P Parameter: Treatment Value: Drought vs. No Drought
  misc_feature: MA Experiment ID: 108577 Result: Down-regulated in Transcription
  misc_feature: MA Experiment 108577 PARAMETER Experiment Name: At_42deg_Heat_cDNA_P Parameter: Temperature (deg C) Value: 42 vs. 22
  misc_feature: MA Experiment 108577 PARAMETER Experiment Name: At_42deg_Heat_cDNA_P Parameter: Timepoint (hr) Value: 6
  misc_feature: MA Experiment 108577 PARAMETER Experiment Name: At_42deg_Heat_cDNA_P Parameter: Tissue Value: Aerial
aaatctttcgggtcaaaatttccgaaccctaactttagccccaaattagagagagatgcagaaacgggagcttgggaaatccggcggtaattccggtggatcttcgggtccaccagcgaagagaggccgtcccttcggtagtacaagtgctaactcagctgctgctgctgcagcggcggcagcagcggacgcgatgtcaccgtcagctttacttggtccttctcttctagttcacaattccttcgtcgagcagaacaatagaagaatagttcttgcgttgcagagtggtttgaagagtgaggtgacatgggcattgaacacacttacgttgctttccttcaaggaaaaagaagatattcgaagagatgtcatgcctcttgctaagatagctggcttgcttgatgcccttctcttaattatagatgattggcgtgacatagctctcccaaaggacctgacaagaggaactagagttagaactttaggtacaaatgcttcagttacgggatttggcaatgagtatgatgctctagcctctattcaaccccctggatccgggattggttcttctgctgctgaggcattaggaaaaaagagcactggtaaacatcagtcatctcagtggtggatggaagaggatggtttgtttaatctagacgatgaagggagatcagagaaacaaatgtgtgctattgctgcatcgaacgttatccgcaacttctccttcatgcctgataatgaagttgtaatggctcagcatcgccattgcttagaaactgttttccagtgcatacacgatcatatgaccgaggatgaagagctggtcacaaactcgctagagacaattgtaaacctagcgcatttgatggatcttcgaattttcagctcgcttaagcagtcatacatcaacataaatgaaaagaaagctgttcaagctgtggtcggaatcctcaattcttctgtcaaagcttggaattgtgctgctgctgagttgctagggcgtttgataatcaatccggacaatgaacctttcattagtcctttaattccgcagatacacaagcgactaatcgatcttttgagcatacaagccgttgatgcacaagctgcagctgttggagcactctacaatctcgtggaagttaacatggattgcagattaaagctagcaagtgagagatgggcggttgataggttgctgaaagtgataaagactccgcatccggttccagaagtatgtaggaaagctgcaatgatccttgagaaccttgtctcggagcctcaaaacagaggattgctactcgcgtatgagaatgctttcgctgagctgctttttcaagagggtaagtattctgattcatttgctaggattttgtatgaactcactgctagatctaatagcagagttgcttcagctagaggaatctggggcatgtaaaagtcttctctagattagtgggtttgattaattgattgtgttgtaaactttaatcatttgctatgtattaaaaaagcagtgttgttg

SEQ ID NO: 99557 - protein, 460 aa, Arabidopsis thaliana; identical to SEQ ID NO: 41316
  peptide (1)..(460): Ceres Seq. ID no. 13603205
  misc_feature (1)..(460): Homolog of NCBI NO: 18403609 NR Description: expressed protein [Arabidopsis thaliana] gene_id:MXC7.2~unknown protein [Arabidopsis thaliana] unknown protein [Arabidopsis thaliana]
  misc_feature (1)..(460): Homolog of NCBI NO: 21537098 NR Description: unknown [Arabidopsis thaliana]
  misc_feature (7)..(459): Homolog of NCBI NO: 14192867 NR Description: Unknown protein [Oryza sativa]

SEQ ID NO: 99558 - protein, 414 aa, Arabidopsis thaliana; identical to SEQ ID NO: 41317
  peptide (1)..(414): Ceres Seq. ID no. 13603206
  misc_feature (1)..(414): Homolog of NCBI NO: 18403609 NR Description: expressed protein [Arabidopsis thaliana] gene_id:MXC7.2~unknown protein [Arabidopsis thaliana] unknown protein [Arabidopsis thaliana]
  misc_feature (1)..(414): Homolog of NCBI NO: 21537098 NR Description: unknown [Arabidopsis thaliana]
  misc_feature (1)..(413): Homolog of NCBI NO: 14192867 NR Description: Unknown protein [Oryza sativa]

SEQ ID NO: 99559 - protein, 355 aa, Arabidopsis thaliana; identical to SEQ ID NO: 41318
  peptide (1)..(355): Ceres Seq. ID no. 13603207
  misc_feature (1)..(355): Homolog of NCBI NO: 18403609 NR Description: expressed protein [Arabidopsis thaliana] gene_id:MXC7.2~unknown protein [Arabidopsis thaliana] unknown protein [Arabidopsis thaliana]
  misc_feature (1)..(355): Homolog of NCBI NO: 21537098 NR Description: unknown [Arabidopsis thaliana]
  misc_feature (1)..(354): Homolog of NCBI NO: 14192867 NR Description: Unknown protein [Oryza sativa]

SEQ ID NO: 99560 - DNA, 1196 bp, Arabidopsis thaliana
  misc_feature (1)..(1196): Ceres Seq. ID no. 13603208
  misc_feature: MA Experiment ID: 108434 Result: Up-regulated in Transcription
  misc_feature: MA Experiment 108434 PARAMETER Experiment Name: At_Root_Tips_cDNA_P Parameter: Tissue Value: Root Tips
  misc_feature: MA Experiment ID: 108461 Result: Up-regulated in Transcription
  misc_feature: MA Experiment 108461 PARAMETER Experiment Name: At_Germinating_Seeds_cDNA_P Parameter: Age (day) Value: 1 vs. 0
  misc_feature: MA Experiment 108461 PARAMETER Experiment Name: At_Germinating_Seeds_cDNA_P Parameter: Tissue Value: Germinating Seeds
  misc_feature: MA Experiment ID: 108462 Result: Up-regulated in Transcription
  misc_feature: MA Experiment 108462 PARAMETER Experiment Name: At_Germinating_Seeds_cDNA_P Parameter: Age (day) Value: 2 vs. 0
  misc_feature: MA Experiment 108462 PARAMETER Experiment Name: At_Germinating_Seeds_cDNA_P Parameter: Tissue Value: Germinating Seeds
  misc_feature: MA Experiment ID: 108463 Result: Up-regulated in Transcription
  misc_feature: MA Experiment 108463 PARAMETER Experiment Name: At_Germinating_Seeds_cDNA_P Parameter: Age (day) Value: 3 vs. 0
  misc_feature: MA Experiment 108463 PARAMETER Experiment Name: At_Germinating_Seeds_cDNA_P Parameter: Tissue Value: Germinating Seeds
  misc_feature: MA Experiment ID: 108464 Result: Up-regulated in Transcription
  misc_feature: MA Experiment 108464 PARAMETER Experiment Name: At_Germinating_Seeds_cDNA_P Parameter: Age (day) Value: 4 vs. 0
  misc_feature: MA Experiment 108464 PARAMETER Experiment Name: At_Germinating_Seeds_cDNA_P Parameter: Tissue Value: Germinating Seeds
  misc_feature: MA Experiment ID: 108488 Result: Up-regulated in Transcription
  misc_feature: MA Experiment ID: 108501 Result: Up-regulated in Transcription
  misc_feature: MA Experiment 108501 PARAMETER Experiment Name: At_ap2_floral_buds_cDNA_P Parameter: Plant Line Value: ap2 (Ler.)
  misc_feature: MA Experiment 108501 PARAMETER Experiment Name: At_ap2_floral_buds_cDNA_P Parameter: Tissue Value: Closed Flower
  misc_feature: MA Experiment ID: 108595 Result: Down-regulated in Transcription
  misc_feature: MA Experiment 108595 PARAMETER Experiment Name: At_Ler-pi_Ovule_cDNA_P Parameter: Plant Line Value: null
  misc_feature: MA Experiment ID: 108609 Result: Down-regulated in Transcription
  misc_feature: MA Experiment 108609 PARAMETER Experiment Name: At_100uM_ABA_cDNA_P Parameter: Timepoint (hr) Value: 24
  misc_feature: MA Experiment 108609 PARAMETER Experiment Name: At_100uM_ABA_cDNA_P Parameter: Tissue Value: Aerial
  misc_feature: MA Experiment 108609 PARAMETER Experiment Name: At_100uM_ABA_cDNA_P Parameter: Treatment Value: 100uM ABA vs. No Treatment
  misc_feature: MA Experiment ID: 20000069 Result: Down-regulated in Transcription
  misc_feature: MA Experiment 20000069 PARAMETER Experiment Name: At_100uM_ABA_Mutants_cDNA_P Parameter: Plant Line Value: CS23
  misc_feature: MA Experiment 20000069 PARAMETER Experiment Name: At_100uM_ABA_Mutants_cDNA_P Parameter: Timepoint (hr) Value: 6
  misc_feature: MA Experiment 20000069 PARAMETER Experiment Name: At_100uM_ABA_Mutants_cDNA_P Parameter: Tissue Value: Aerial
  misc_feature: MA Experiment 20000069 PARAMETER Experiment Name: At_100uM_ABA_Mutants_cDNA_P Parameter: Treatment Value: 100uM ABA vs. No Treatment
  misc_feature: MA Experiment ID: 20000071 Result: Down-regulated in Transcription
  misc_feature: MA Experiment 20000071 PARAMETER Experiment Name: At_100uM_ABA_Mutants_cDNA_P Parameter: Plant Line Value: CS8104
  misc_feature: MA Experiment 20000071 PARAMETER Experiment Name: At_100uM_ABA_Mutants_cDNA_P Parameter: Timepoint (hr) Value: 6
  misc_feature: MA Experiment 20000071 PARAMETER Experiment Name: At_100uM_ABA_Mutants_cDNA_P Parameter: Tissue Value: Aerial
  misc_feature: MA Experiment 20000071 PARAMETER Experiment Name: At_100uM_ABA_Mutants_cDNA_P Parameter: Treatment Value: 100uM ABA vs. No Treatment
  misc_feature: MA Experiment ID: 20000072 Result: Down-regulated in Transcription
  misc_feature: MA Experiment 20000072 PARAMETER Experiment Name: At_100uM_ABA_Mutants_cDNA_P Parameter: Plant Line Value: CS8105
  misc_feature: MA Experiment 20000072 PARAMETER Experiment Name: At_100uM_ABA_Mutants_cDNA_P Parameter: Timepoint (hr) Value: 6
  misc_feature: MA Experiment 20000072 PARAMETER Experiment Name: At_100uM_ABA_Mutants_cDNA_P Parameter: Tissue Value: Aerial
  misc_feature: MA Experiment 20000072 PARAMETER Experiment Name: At_100uM_ABA_Mutants_cDNA_P Parameter: Treatment Value: 100uM ABA vs. No Treatment
  misc_feature: MA Experiment ID: 20000086 Result: Down-regulated in Transcription
  misc_feature: MA Experiment 20000086 PARAMETER Experiment Name: At_100uM_ABA_Mutants_cDNA_P Parameter: Plant Line Value: CS22
  misc_feature: MA Experiment 20000086 PARAMETER Experiment Name: At_100uM_ABA_Mutants_cDNA_P Parameter: Timepoint (hr) Value: 6
  misc_feature: MA Experiment 20000086 PARAMETER Experiment Name: At_100uM_ABA_Mutants_cDNA_P Parameter: Tissue Value: Aerial
  misc_feature: MA Experiment 20000086 PARAMETER Experiment Name: At_100uM_ABA_Mutants_cDNA_P Parameter: Treatment Value: 100uM ABA vs. No Treatment
  misc_feature: MA Experiment ID: 20000088 Result: Down-regulated in Transcription
  misc_feature: MA Experiment 20000088 PARAMETER Experiment Name: At_100uM_ABA_Mutants_cDNA_P Parameter: Plant Line Value: Landsberg
  misc_feature: MA Experiment 20000088 PARAMETER Experiment Name: At_100uM_ABA_Mutants_cDNA_P Parameter: Timepoint (hr) Value: 6
  misc_feature: MA Experiment 20000088 PARAMETER Experiment Name: At_100uM_ABA_Mutants_cDNA_P Parameter: Tissue Value: Aerial
  misc_feature: MA Experiment 20000088 PARAMETER Experiment Name: At_100uM_ABA_Mutants_cDNA_P Parameter: Treatment Value: 100uM ABA vs. No Treatment
  misc_feature: MA Experiment ID: 20000117 Result: Down-regulated in Transcription
  misc_feature: MA Experiment 20000117 PARAMETER Experiment Name: At_100uM_ABA_Mutants_cDNA_P Parameter: Plant Line Value: Columbia
  misc_feature: MA Experiment 20000117 PARAMETER Experiment Name: At_100uM_ABA_Mutants_cDNA_P Parameter: Timepoint (hr) Value: 6
  misc_feature: MA Experiment 20000117 PARAMETER Experiment Name: At_100uM_ABA_Mutants_cDNA_P Parameter: Tissue Value: Aerial
  misc_feature: MA Experiment 20000117 PARAMETER Experiment Name: At_100uM_ABA_Mutants_cDNA_P Parameter: Treatment Value: 100uM ABA vs. No Treatment
  misc_feature: MA Experiment ID: 20000180 Result: Up-regulated in Transcription
  misc_feature: MA Experiment 20000180 PARAMETER Experiment Name: At_Germinating_Seeds_P Parameter: Age (hr) Value: 24 vs. 0
  misc_feature: MA Experiment 20000180 PARAMETER Experiment Name: At_Germinating_Seeds_P Parameter: Tissue Value: Germinating Seeds
  misc_feature: MA Experiment ID: 20000224 Result: Down-regulated in Transcription
  misc_feature: MA Experiment ID: 20000439 Result: Down-regulated in Transcription
  misc_feature: MA Experiment 20000439 PARAMETER Experiment Name: At_Roots__P Parameter: Age (day) Value: 14 vs. 21
  misc_feature: MA Experiment 20000439 PARAMETER Experiment Name: At_Roots__P Parameter: Organism Value: A. thaliana
  misc_feature: MA Experiment 20000439 PARAMETER Experiment Name: At_Roots__P Parameter: Tissue Value: Roots vs. Whole Plant
  misc_feature: MA Experiment ID: 20000445 Result: Up-regulated in Transcription
  misc_feature: MA Experiment 20000445 PARAMETER Experiment Name: At_100uM_NAA__P Parameter: Age (day) Value: 14
  misc_feature: MA Experiment 20000445 PARAMETER Experiment Name: At_100uM_NAA__P Parameter: Organism Value: A. thaliana
  misc_feature: MA Experiment 20000445 PARAMETER Experiment Name: At_100uM_NAA__P Parameter: Plant Line Value: WS
  misc_feature: MA Experiment 20000445 PARAMETER Experiment Name: At_100uM_NAA__P Parameter: Timepoint (hr) Value: 6
  misc_feature: MA Experiment 20000445 PARAMETER Experiment Name: At_100uM_NAA__P Parameter: Tissue Value: Aerial
  misc_feature: MA Experiment 20000445 PARAMETER Experiment Name: At_100uM_NAA__P Parameter: Treatment Value: 100uM NAA vs. No Treatment
  misc_feature: MA Experiment ID: 20001248 Result: Up-regulated in Transcription
  misc_feature: MA Experiment 20001248 PARAMETER Experiment Name: At_Far-red-induction_P Parameter: Age (day) Value: 7
  misc_feature: MA Experiment 20001248 PARAMETER Experiment Name: At_Far-red-induction_P Parameter: Light Value: Far-red vs. White
  misc_feature: MA Experiment 20001248 PARAMETER Experiment Name: At_Far-red-induction_P Parameter: Organism Value: A. thaliana
  misc_feature: MA Experiment 20001248 PARAMETER Experiment Name: At_Far-red-induction_P Parameter: Plant Line Value: Columbia
  misc_feature: MA Experiment 20001248 PARAMETER Experiment Name: At_Far-red-induction_P Parameter: Timepoint (hr) Value: 4
  misc_feature: MA Experiment 20001248 PARAMETER Experiment Name: At_Far-red-induction_P Parameter: Tissue Value: Whole Plant
  misc_feature: MA Experiment ID: 20001450 Result: Up-regulated in Transcription
  misc_feature: MA Experiment 20001450 PARAMETER Experiment Name: At_Far-red-induction_P Parameter: Age (day) Value: 7
  misc_feature: MA Experiment 20001450 PARAMETER Experiment Name: At_Far-red-induction_P Parameter: Light Value: Far-red vs. White
  misc_feature: MA Experiment 20001450 PARAMETER Experiment Name: At_Far-red-induction_P Parameter: Organism Value: A. thaliana
  misc_feature: MA Experiment 20001450 PARAMETER Experiment Name: At_Far-red-induction_P Parameter: Plant Line Value: Columbia
  misc_feature: MA Experiment 20001450 PARAMETER Experiment Name: At_Far-red-induction_P Parameter: Timepoint (hr) Value: 8
  misc_feature: MA Experiment 20001450 PARAMETER Experiment Name: At_Far-red-induction_P Parameter: Tissue Value: Whole Plant
  misc_feature: MA Experiment ID: 20001554 Result: Down-regulated in Transcription
  misc_feature: MA Experiment 20001554 PARAMETER Experiment Name: At_Drought_Soil_Dry_P Parameter: Age (day) Value: 21
  misc_feature: MA Experiment 20001554 PARAMETER Experiment Name: At_Drought_Soil_Dry_P Parameter: Organism Value: A. thaliana
  misc_feature: MA Experiment 20001554 PARAMETER Experiment Name: At_Drought_Soil_Dry_P Parameter: Plant Line Value: WS
  misc_feature: MA Experiment 20001554 PARAMETER Experiment Name: At_Drought_Soil_Dry_P Parameter: Post Timepoint (hr) Value: None
  misc_feature: MA Experiment 20001554 PARAMETER Experiment Name: At_Drought_Soil_Dry_P Parameter: Post-Treatment Value: None
  misc_feature: MA Experiment 20001554 PARAMETER Experiment Name: At_Drought_Soil_Dry_P Parameter: Timepoint (day) Value: 7
  misc_feature: MA Experiment 20001554 PARAMETER Experiment Name: At_Drought_Soil_Dry_P Parameter: Treatment Value: Drought vs. No Drought
  misc_feature: MA Experiment ID: 20001556 Result: Down-regulated in Transcription
  misc_feature: MA Experiment 20001556 PARAMETER Experiment Name: At_Drought_Soil_Dry_P Parameter: Age (day) Value: 26
  misc_feature: MA Experiment 20001556 PARAMETER Experiment Name: At_Drought_Soil_Dry_P Parameter: Organism Value: A. thaliana
  misc_feature: MA Experiment 20001556 PARAMETER Experiment Name: At_Drought_Soil_Dry_P Parameter: Plant Line Value: WS
  misc_feature: MA Experiment 20001556 PARAMETER Experiment Name: At_Drought_Soil_Dry_P Parameter: Post Timepoint (hr) Value: None
  misc_feature: MA Experiment 20001556 PARAMETER Experiment Name: At_Drought_Soil_Dry_P Parameter: Post-Treatment Value: None
  misc_feature: MA Experiment 20001556 PARAMETER Experiment Name: At_Drought_Soil_Dry_P Parameter: Timepoint (day) Value: 12
  misc_feature: MA Experiment 20001556 PARAMETER Experiment Name: At_Drought_Soil_Dry_P Parameter: Treatment Value: Drought vs. No Drought
  misc_feature: MA Experiment ID: 20001906 Result: Down-regulated in Transcription
  misc_feature: MA Experiment 20001906 PARAMETER Experiment Name: At_Drought_Reproduction_P Parameter: Age (day) Value: 35
  misc_feature: MA Experiment 20001906 PARAMETER Experiment Name: At_Drought_Reproduction_P Parameter: Organism Value: A. thaliana
  misc_feature: MA Experiment 20001906 PARAMETER Experiment Name: At_Drought_Reproduction_P Parameter: Plant Line Value: WS
  misc_feature: MA Experiment 20001906 PARAMETER Experiment Name: At_Drought_Reproduction_P Parameter: Timepoint (day) Value: 5
  misc_feature: MA Experiment 20001906 PARAMETER Experiment Name: At_Drought_Reproduction_P Parameter: Tissue Value: Siliques
  misc_feature: MA Experiment 20001906 PARAMETER Experiment Name: At_Drought_Reproduction_P Parameter: Treatment Value: Drought vs. No Drought
cttcccctcttaccttttcagagagagaaacaatatttctaatctattacaagtaacatgatcggccaacttatgaacctcaaggccacggagctctgtctcggcctccccggcggcgctgaagcagttgagagtcctgccaaatcggcggtgggaagcaagagaggcttctccgaaaccgttgatctcatgctcaatcttcaatctaacaaagaaggctccgttgatctcaaaaacgtttctgctgttcccaaggagaagactacccttaaagatccttctaagcctcctgctaaagcacaagtggtgggatggccacctgtgaggaactacaggaagaacatgatgactcagcagaagaccagtagtggtgcggaggaggccagcagtgagaaggccgggaactttggtggaggagcagccggagccggcttggtgaaggtctccatggacggtgctccatatctgaggaaagttgacctcaagatgtacaaaagctaccaggatctttctgatgcattggccaaaatgttcagctcctttactatgggaaactatggagcacaaggaatgatagatttcatgaacgagagcaagctaatgaatctgctgaatagctctgagtatgtgccaagctacgaggacaaagatggtgactggatgctcgttggcgatgtcccatgggaaatgtttgtcgagtcttgcaaacgtttgcgcattatgaagggatctgaagcagttggacttgctccgagagcaatggagaagtactgcaagaacagatcttgaattaataataaaaaaaaagaagcatcaatgatcaacaatatgacgggttcttgattttatatgtatttttatgattgtatgtggctatcacctatatatgtgtgttgtaattttaaatacttgatgggtatatagggcagtattttaccagtaagatgtggacaaacttgtaatgtgaccaaaagagaggaaacttcaatatctctgtgtttgtgtcatatttattgcccaacatgtgtctgtcggtttgatgatcaatcacaacttgatatgtgcatacatataaatgtgtgtatgtaggtgtgtgtacatgtacatgtgttttgatccctactctgctacttgtcgtttcttgtgtgtgttatctaatagttttttcccaaaatgaataattcgttgttatgttt

SEQ ID NO: 99561 - protein, 243 aa, Arabidopsis thaliana; identical to SEQ ID NO: 24397
  peptide (1)..(243): Ceres Seq. ID no. 13603209
  misc_feature (6)..(234): Pfam Name: AUX/IAA family Pfam Description: AUX/IAA family
  misc_feature (1)..(243): Homolog of NCBI NO: 15228943 NR Description: auxin-responsive protein IAA7 (Indoleacetic
  misc_feature (6)..(243): Homolog of NCBI NO: 21593352 NR Description: indoleacetic acid (IAA)-inducible gene (IAA7)
  misc_feature (6)..(243): Homolog of NCBI NO: 22328628 NR Description: auxin-responsive protein, putative [Arabidopsis >gi|12248009|gb|AAG50096.1|AF334718_1 IAA14 [Arabidopsis
  misc_feature (6)..(230): Homolog of NCBI NO: 7442224 NR Description: auxin-induced protein - Arabidopsis thaliana
  misc_feature (6)..(230): Homolog of NCBI NO: 25296229 NR Description: IAA7 like protein [imported] - Arabidopsis >gi|5302771|emb|CAB46059.1| IAA7 like protein [Arabidopsis >gi|7268161|emb|CAB78497.1| IAA7 like protein [Arabidopsis
  misc_feature (5)..(243): Homolog of NCBI NO: 20385508 NR Description: auxin-regulated protein [Populus tremula x
  misc_feature (5)..(243): Homolog of NCBI NO: 15229343 NR Description: auxin-responsive protein IAA16 (Indoleacetic
  misc_feature (1)..(243): Homolog of NCBI NO: 15219694 NR Description: auxin-responsive protein IAA17 (Indoleacetic
  misc_feature (6)..(243): Homolog of NCBI NO: 21592887 NR Description: putative auxin-induced protein, IAA17/AXR3-1
  misc_feature (11)..(243): Homolog of NCBI NO: 4887020 NR Description: Nt-iaa28 deduced protein [Nicotiana tabacum]

SEQ ID NO: 99562 - protein, 238 aa, Arabidopsis thaliana; identical to SEQ ID NO: 24398
  peptide (1)..(238): Ceres Seq. ID no. 13603210
  misc_feature (1)..(229): Pfam Name: AUX/IAA family Pfam Description: AUX/IAA family
  misc_feature (1)..(238): Homolog of NCBI NO: 15228943 NR Description: auxin-responsive protein IAA7 (Indoleacetic
  misc_feature (1)..(238): Homolog of NCBI NO: 21593352 NR Description: indoleacetic acid (IAA)-inducible gene (IAA7)
  misc_feature (1)..(238): Homolog of NCBI NO: 22328628 NR Description: auxin-responsive protein, putative [Arabidopsis >gi|12248009|gb|AAG50096.1|AF334718_1 IAA14 [Arabidopsis
  misc_feature (1)..(225): Homolog of NCBI NO: 7442224 NR Description: auxin-induced protein - Arabidopsis thaliana
  misc_feature (1)..(225): Homolog of NCBI NO: 25296229 NR Description: IAA7 like protein [imported] - Arabidopsis >gi|5302771|emb|CAB46059.1| IAA7 like protein [Arabidopsis >gi|7268161|emb|CAB78497.1| IAA7 like protein [Arabidopsis
  misc_feature (1)..(238): Homolog of NCBI NO: 20385508 NR Description: auxin-regulated protein [Populus tremula x
  misc_feature (1)..(238): Homolog of NCBI NO: 15229343 NR Description: auxin-responsive protein IAA16 (Indoleacetic
  misc_feature (1)..(238): Homolog of NCBI NO: 15219694 NR Description: auxin-responsive protein IAA17 (Indoleacetic
  misc_feature (1)..(238): Homolog of NCBI NO: 21592887 NR Description: putative auxin-induced protein, IAA17/AXR3-1
  misc_feature (6)..(238): Homolog of NCBI NO: 4887020 NR Description: Nt-iaa28 deduced protein [Nicotiana tabacum]

SEQ ID NO: 99563 - protein, 199 aa, Arabidopsis thaliana; identical to SEQ ID NO: 24399
  peptide (1)..(199): Ceres Seq. ID no. 13603211
  misc_feature (1)..(190): Pfam Name: AUX/IAA family Pfam Description: AUX/IAA family
  misc_feature (1)..(199): Homolog of NCBI NO: 15228943 NR Description: auxin-responsive protein IAA7 (Indoleacetic
  misc_feature (1)..(199): Homolog of NCBI NO: 21593352 NR Description: indoleacetic acid (IAA)-inducible gene (IAA7)
  misc_feature (1)..(199): Homolog of NCBI NO: 22328628 NR Description: auxin-responsive protein, putative [Arabidopsis >gi|12248009|gb|AAG50096.1|AF334718_1 IAA14 [Arabidopsis
  misc_feature (1)..(186): Homolog of NCBI NO: 7442224 NR Description: auxin-induced protein - Arabidopsis thaliana
  misc_feature (1)..(186): Homolog of NCBI NO: 25296229 NR Description: IAA7 like protein [imported] - Arabidopsis >gi|5302771|emb|CAB46059.1| IAA7 like protein [Arabidopsis >gi|7268161|emb|CAB78497.1| IAA7 like protein [Arabidopsis
  misc_feature (1)..(199): Homolog of NCBI NO: 20385508 NR Description: auxin-regulated protein [Populus tremula x
  misc_feature (1)..(199): Homolog of NCBI NO: 15229343 NR Description: auxin-responsive protein IAA16 (Indoleacetic
  misc_feature (1)..(199): Homolog of NCBI NO: 15219694 NR Description: auxin-responsive protein IAA17 (Indoleacetic
  misc_feature (1)..(199): Homolog of NCBI NO: 21592887 NR Description: putative auxin-induced protein, IAA17/AXR3-1
  misc_feature (1)..(199): Homolog of NCBI NO: 4887020 NR Description: Nt-iaa28 deduced protein [Nicotiana tabacum]

SEQ ID NO: 99564 - DNA, 1552 bp, Arabidopsis thaliana
  misc_feature (1)..(1552): Ceres Seq. ID no. 13603212
  misc_feature: MA Experiment ID: 20000306 Result: Up-regulated in Transcription
  misc_feature: MA Experiment 20000306 PARAMETER Experiment Name: At_Germinating_Seeds_Sub_P Parameter: Age (hr) Value: 6 vs. 0
  misc_feature: MA Experiment 20000306 PARAMETER Experiment Name: At_Germinating_Seeds_Sub_P Parameter: Organism Value: A. thaliana
  misc_feature: MA Experiment 20000306 PARAMETER Experiment Name: At_Germinating_Seeds_Sub_P Parameter: Plant Line Value: WS
  misc_feature: MA Experiment 20000306 PARAMETER Experiment Name: At_Germinating_Seeds_Sub_P Parameter: Tissue Value: Germinating Seeds
  misc_feature: MA Experiment ID: 20000307 Result: Up-regulated in Transcription
  misc_feature: MA Experiment 20000307 PARAMETER Experiment Name: At_Germinating_Seeds_Sub_P Parameter: Age (hr) Value: 24 vs. 0
  misc_feature: MA Experiment 20000307 PARAMETER Experiment Name: At_Germinating_Seeds_Sub_P Parameter: Organism Value: A. thaliana
  misc_feature: MA Experiment 20000307 PARAMETER Experiment Name: At_Germinating_Seeds_Sub_P Parameter: Plant Line Value: WS
  misc_feature: MA Experiment 20000307 PARAMETER Experiment Name: At_Germinating_Seeds_Sub_P Parameter: Tissue Value: Germinating Seeds
  misc_feature: MA Experiment ID: 20000314 Result: Down-regulated in Transcription
  misc_feature: MA Experiment 20000314 PARAMETER Experiment Name: At_14day_Shoots-Roots_Sub_P Parameter: Age (day) Value: 14
  misc_feature: MA Experiment 20000314 PARAMETER Experiment Name: At_14day_Shoots-Roots_Sub_P Parameter: Organism Value: A. thaliana
  misc_feature: MA Experiment 20000314 PARAMETER Experiment Name: At_14day_Shoots-Roots_Sub_P Parameter: Plant Line Value: WS
  misc_feature: MA Experiment 20000314 PARAMETER Experiment Name: At_14day_Shoots-Roots_Sub_P Parameter: Tissue Value: Roots vs. Whole Plant
  misc_feature: MA Experiment ID: 20000315 Result: Down-regulated in Transcription
  misc_feature: MA Experiment 20000315 PARAMETER Experiment Name: At_14day_Shoots-Roots_Sub_P Parameter: Age (day) Value: 14
  misc_feature: MA Experiment 20000315 PARAMETER Experiment Name: At_14day_Shoots-Roots_Sub_P Parameter: Organism Value: A. thaliana
  misc_feature: MA Experiment 20000315 PARAMETER Experiment Name: At_14day_Shoots-Roots_Sub_P Parameter: Plant Line Value: WS
  misc_feature: MA Experiment 20000315 PARAMETER Experiment Name: At_14day_Shoots-Roots_Sub_P Parameter: Tissue Value: Shoots vs. Whole Plant
  misc_feature: MA Experiment ID: 20000327 Result: Up-regulated in Transcription
  misc_feature: MA Experiment 20000327 PARAMETER Experiment Name: At_42deg_Heat_Sub_P Parameter: Age (day) Value: 14
  misc_feature: MA Experiment 20000327 PARAMETER Experiment Name: At_42deg_Heat_Sub_P Parameter: Organism Value: A. thaliana
  misc_feature: MA Experiment 20000327 PARAMETER Experiment Name: At_42deg_Heat_Sub_P Parameter: Plant Line Value: WS
  misc_feature: MA Experiment 20000327 PARAMETER Experiment Name: At_42deg_Heat_Sub_P Parameter: Temperature (deg C) Value: 42 vs. 22
  misc_feature: MA Experiment 20000327 PARAMETER Experiment Name: At_42deg_Heat_Sub_P Parameter: Timepoint (hr) Value: 1
  misc_feature: MA Experiment 20000327 PARAMETER Experiment Name: At_42deg_Heat_Sub_P Parameter: Tissue Value: Aerial
  misc_feature: MA Experiment ID: 20000355 Result: Down-regulated in Transcription
  misc_feature: MA Experiment 20000355 PARAMETER Experiment Name: At_Siliques_Sub_P Parameter: Age (day) Value: 21
  misc_feature: MA Experiment 20000355 PARAMETER Experiment Name: At_Siliques_Sub_P Parameter: Organism Value: A. thaliana
  misc_feature: MA Experiment 20000355 PARAMETER Experiment Name: At_Siliques_Sub_P Parameter: Plant Line Value: WS
  misc_feature: MA Experiment 20000355 PARAMETER Experiment Name: At_Siliques_Sub_P Parameter: Tissue Value: Less Than 5mm Siliques vs. Whole Plant
  misc_feature: MA Experiment ID: 20000440 Result: Down-regulated in Transcription
  misc_feature: MA Experiment 20000440 PARAMETER Experiment Name: At_Closed-Flower__Sub_P Parameter: Tissue Value: Closed Flower vs. Whole Plant
cttttggatcgcttccgttcaatgtaaccggcgaaacagagcaatctgaaattatcttagggctatagttatggatattttcatggatttcttcaataaaccttctgttacagagacattcgtcgacgttttgctatgtgcagttccgatttgggtcactgttatgatcgggcttctgatcggttggtcttggcgtcctagatggactagcttggtttatttaggtttccgttctaagcttcggtttctatgtactgttcctcctggatttggtgctcgtcgtatttggcttgctttcaccgctctctctgctttttccgtttgttcaacctccaataaatcctcggttaataacggttcctctaaaccggtcgaagaagaagcattttcacgagctagtgataaagttacagagaaagagaaagatgttgtgacagagaaggatttagagcatttgttgcatctgcttgaagctggaaatgctagttttgagtggcaatctatgatggataagtctactccgaatatgagctatcaagcttggcgtcatgagcctgagataggtcctgttgtttatcgtagtcgaactgtttttgaggatgtaacaccagacattgttagggatttcttctgggacgatgagtttcgacctaaatgggatactatgcttgcttacttcaaaactttagaggaagatcctaagacaggaactaccattgttcattggattaaaaagttcccattcttctgtagtgaccgggaatacatcattggtaggagaatatgggaatctggaagaaaatattatgctgtgactaagggagtaccgtataaagctttatcaaagcgtgataagccgaggcgagtcgaactttatttctcaagttggattatcaatgcagttgaatcaagaaaaggtgatgggcaaatgacagcttgtgaagtctctcttgttcactacgaagacatgggaatcccaaaagatgtagcaaagttaggagtccgtcatggcatgtggggagctgtaaagaagctaaactctggcttaagggcgtaccaaagcgctagaaaacctgggacgtcgctctcacggagtgcgcagatggcaagtatcaccacaaagctgaacatggatttggtggaaacatctggggcagaggacgaagagagaggacgagcagtagagaatgcgaggaaacaaaatgatcagttcggtgtagactggaaatggatcgttgtaggaggagtagctttggcttgtgggcttcattctagtgctataggtaaggcgttaatggttggagctggacagagacttgctcgtaggtgagatcttttgcctgagagtttcattatcttatctgtttccctggagaattcttagaccaacacagaaacactatattactgatatggattgtgttttcttgtaactgcactgaaatgagcatagtggtttcgaaagcaaaccatgcagagtagttttgaagcaagggcaaacatttggtcgaatatttcttgtaatacggtttaagattctggagacggtttt

SEQ ID NO: 99565 - protein, 419 aa, Arabidopsis thaliana
  peptide (1)..(419): Ceres Seq. ID no. 13603213
  misc_feature (169)..(248): Pfam Name: START domain Pfam Description: START domain
  misc_feature (1)..(419): Homolog of NCBI NO: 18403635 NR Description: expressed protein [Arabidopsis thaliana]
  misc_feature (1)..(419): Homolog of NCBI NO: 15810257 NR Description: unknown protein [Arabidopsis thaliana]
  misc_feature (5)..(419): Homolog of NCBI NO: 18414239 NR Description: expressed protein [Arabidopsis thaliana] AT4g14500/dl3290w [Arabidopsis thaliana]
  misc_feature (5)..(419): Homolog of NCBI NO: 7485064 NR Description: hypothetical protein - Arabidopsis thaliana hypothetical protein [Arabidopsis thaliana]
  misc_feature (120)..(415): Homolog of NCBI NO: 34393225 NR Description: putative membrane related protein CP5 [Oryza
  misc_feature (10)..(38): Homolog of NCBI NO: 34393225 NR Description: putative membrane related protein CP5 [Oryza
  misc_feature (115)..(417): Homolog of NCBI NO: 38344869 NR Description: OSJNBa0020P07.12 [Oryza sativa (japonica
  misc_feature (1)..(52): Homolog of NCBI NO: 38344869 NR Description: OSJNBa0020P07.12 [Oryza sativa (japonica
  misc_feature (26)..(415): Homolog of NCBI NO: 18033654 NR Description: putative nodule membrane protein [Medicago sativa]
  misc_feature (86)..(415): Homolog of NCBI NO: 18423599 NR Description: membrane related protein-like [Arabidopsis
MDIFMDFFNKPSVTETFVDVLLCAVPIWVTVMIGLLIGWSWRPRWTSLVYLGFRSKLRFLCTVPPGFGARRIWLAFTALSAFSVCSTSNKSSVNNGSSKPVEEEAFSRASDKVTEKEKDVVTEKDLEHLLHLLEAGNASFEWQSMMDKSTPNMSYQAWRHEPEIGPVVYRSRTVFEDVTPDIVRDFFWDDEFRPKWDTMLAYFKTLEEDPKTGTTIVHWIKKFPFFCSDREYIIGRRIWESGRKYYAVTKGVPYKALSKRDKPRRVELYFSSWIINAVESRKGDGQMTACEVSLVHYEDMGIPKDVAKLGVRHGMWGAVKKLNSGLRAYQSARKPGTSLSRSAQMASITTKLNMDLVETSGAEDEERGRAVENARKQNDQFGVDWKWIVVGGVALACGLHSSAIGKALMVGAGQRLARR

SEQ ID NO: 99566 - protein, 415 aa, Arabidopsis thaliana
  peptide (1)..(415): Ceres Seq. ID no. 13603214
  misc_feature (165)..(244): Pfam Name: START domain Pfam Description: START domain
  misc_feature (1)..(415): Homolog of NCBI NO: 18403635 NR Description: expressed protein [Arabidopsis thaliana]
  misc_feature (1)..(415): Homolog of NCBI NO: 15810257 NR Description: unknown protein [Arabidopsis thaliana]
  misc_feature (1)..(415): Homolog of NCBI NO: 18414239 NR Description: expressed protein [Arabidopsis thaliana] AT4g14500/dl3290w [Arabidopsis thaliana]
  misc_feature (1)..(415): Homolog of NCBI NO: 7485064 NR Description: hypothetical protein - Arabidopsis thaliana hypothetical protein [Arabidopsis thaliana]
  misc_feature (116)..(411): Homolog of NCBI NO: 34393225 NR Description: putative membrane related protein CP5 [Oryza
  misc_feature (6)..(34): Homolog of NCBI NO: 34393225 NR Description: putative membrane related protein CP5 [Oryza
  misc_feature (111)..(413): Homolog of NCBI NO: 38344869 NR Description: OSJNBa0020P07.12 [Oryza sativa (japonica
  misc_feature (1)..(48): Homolog of NCBI NO: 38344869 NR Description: OSJNBa0020P07.12 [Oryza sativa (japonica
  misc_feature (22)..(411): Homolog of NCBI NO: 18033654 NR Description: putative nodule membrane protein [Medicago sativa]
  misc_feature (82)..(411): Homolog of NCBI NO: 18423599 NR Description: membrane related protein-like [Arabidopsis
MDFFNKPSVTETFVDVLLCAVPIWVTVMIGLLIGWSWRPRWTSLVYLGFRSKLRFLCTVPPGFGARRIWLAFTALSAFSVCSTSNKSSVNNGSSKPVEEEAFSRASDKVTEKEKDVVTEKDLEHLLHLLEAGNASFEWQSMMDKSTPNMSYQAWRHEPEIGPVVYRSRTVFEDVTPDIVRDFFWDDEFRPKWDTMLAYFKTLEEDPKTGTTIVHWIKKFPFFCSDREYIIGRRIWESGRKYYAVTKGVPYKALSKRDKPRRVELYFSSWIINAVESRKGDGQMTACEVSLVHYEDMGIPKDVAKLGVRHGMWGAVKKLNSGLRAYQSARKPGTSLSRSAQMASITTKLNMDLVETSGAEDEERGRAVENARKQNDQFGVDWKWIVVGGVALACGLHSSAIGKALMVGAGQRLARR

SEQ ID NO: 99567 - protein, 388 aa, Arabidopsis thaliana
  peptide (1)..(388): Ceres Seq. ID no. 13603215
  misc_feature (138)..(217): Pfam Name: START domain Pfam Description: START domain
  misc_feature (1)..(388): Homolog of NCBI NO: 18403635 NR Description: expressed protein [Arabidopsis thaliana]
  misc_feature (1)..(388): Homolog of NCBI NO: 15810257 NR Description: unknown protein [Arabidopsis thaliana]
  misc_feature (1)..(388): Homolog of NCBI NO: 18414239 NR Description: expressed protein [Arabidopsis thaliana] AT4g14500/dl3290w [Arabidopsis thaliana]
  misc_feature (1)..(388): Homolog of NCBI NO: 7485064 NR Description: hypothetical protein - Arabidopsis thaliana hypothetical protein [Arabidopsis thaliana]
  misc_feature (89)..(384): Homolog of NCBI NO: 34393225 NR Description: putative membrane related protein CP5 [Oryza
  misc_feature (84)..(386): Homolog of NCBI NO: 38344869 NR Description: OSJNBa0020P07.12 [Oryza sativa (japonica
  misc_feature (1)..(21): Homolog of NCBI NO: 38344869 NR Description: OSJNBa0020P07.12 [Oryza sativa (japonica
  misc_feature (1)..(384): Homolog of NCBI NO: 18033654 NR Description: putative nodule membrane protein [Medicago sativa]
  misc_feature (55)..(384): Homolog of NCBI NO: 18423599 NR Description: membrane related protein-like [Arabidopsis
  misc_feature (1)..(36): Homolog of NCBI NO: 18423599 NR Description: membrane related protein-like [Arabidopsis
MIGLLIGWSWRPRWTSLVYLGFRSKLRFLCTVPPGFGARRIWLAFTALSAFSVCSTSNKSSVNNGSSKPVEEEAFSRASDKVTEKEKDVVTEKDLEHLLHLLEAGNASFEWQSMMDKSTPNMSYQAWRHEPEIGPVVYRSRTVFEDVTPDIVRDFFWDDEFRPKWDTMLAYFKTLEEDPKTGTTIVHWIKKFPFFCSDREYIIGRRIWESGRKYYAVTKGVPYKALSKRDKPRRVELYFSSWIINAVESRKGDGQMTACEVSLVHYEDMGIPKDVAKLGVRHGMWGAVKKLNSGLRAYQSARKPGTSLSRSAQMASITTKLNMDLVETSGAEDEERGRAVENARKQNDQFGVDWKWIVVGGVALACGLHSSAIGKALMVGAGQRLARR

SEQ ID NO: 99568 - DNA, 774 bp, Arabidopsis thaliana
  misc_feature (1)..(774): Ceres Seq. ID no. 13603220
  misc_feature: MA Experiment ID: 108434 Result: Up-regulated in Transcription
  misc_feature: MA Experiment 108434 PARAMETER Experiment Name: At_Root_Tips_cDNA_P Parameter: Tissue Value: Root Tips
  misc_feature: MA Experiment ID: 108462 Result: Down-regulated in Transcription
  misc_feature: MA Experiment 108462 PARAMETER Experiment Name: At_Germinating_Seeds_cDNA_P Parameter: Age (day) Value: 2 vs. 0
  misc_feature: MA Experiment 108462 PARAMETER Experiment Name: At_Germinating_Seeds_cDNA_P Parameter: Tissue Value: Germinating Seeds
  misc_feature: MA Experiment ID: 108463 Result: Down-regulated in Transcription
  misc_feature: MA Experiment 108463 PARAMETER Experiment Name: At_Germinating_Seeds_cDNA_P Parameter: Age (day) Value: 3 vs. 0
  misc_feature: MA Experiment 108463 PARAMETER Experiment Name: At_Germinating_Seeds_cDNA_P Parameter: Tissue Value: Germinating Seeds
  misc_feature: MA Experiment ID: 108464 Result: Down-regulated in Transcription
  misc_feature: MA Experiment 108464 PARAMETER Experiment Name: At_Germinating_Seeds_cDNA_P Parameter: Age (day) Value: 4 vs. 0
  misc_feature: MA Experiment 108464 PARAMETER Experiment Name: At_Germinating_Seeds_cDNA_P Parameter: Tissue Value: Germinating Seeds
  misc_feature: MA Experiment ID: 108488 Result: Up-regulated in Transcription
  misc_feature: MA Experiment ID: 108573 Result: Down-regulated in Transcription
  misc_feature: MA Experiment 108573 PARAMETER Experiment Name: At_Drought_cDNA_P Parameter: Timepoint (hr) Value: 6
  misc_feature: MA Experiment 108573 PARAMETER Experiment Name: At_Drought_cDNA_P Parameter: Tissue Value: Aerial
  misc_feature: MA Experiment 108573 PARAMETER Experiment Name: At_Drought_cDNA_P Parameter: Treatment Value: Drought vs. No Drought
  misc_feature: MA Experiment ID: 20000184 Result: Up-regulated in Transcription
  misc_feature: MA Experiment 20000184 PARAMETER Experiment Name: At_Shoots__P Parameter: Age (day) Value: 7
  misc_feature: MA Experiment 20000184 PARAMETER Experiment Name: At_Shoots__P Parameter: Tissue Value: Shoots vs. Whole Plant
  misc_feature: MA Experiment ID: 20000224 Result: Down-regulated in Transcription
  misc_feature: MA Experiment ID: 20000234 Result: Up-regulated in Transcription
  misc_feature: MA Experiment 20000234 PARAMETER Experiment Name: At_Siliques_P Parameter: Age (day) Value: 21
  misc_feature: MA Experiment 20000234 PARAMETER Experiment Name: At_Siliques_P Parameter: Organism Value: A. thaliana
  misc_feature: MA Experiment 20000234 PARAMETER Experiment Name: At_Siliques_P Parameter: Plant Line Value: WS
  misc_feature: MA Experiment 20000234 PARAMETER Experiment Name: At_Siliques_P Parameter: Tissue Value: Less Than 5mm Siliques vs. Whole Plant
  misc_feature: MA Experiment ID: 20000265 Result: Up-regulated in Transcription
  misc_feature: MA Experiment 20000265 PARAMETER Experiment Name: At_Open_Flower_P Parameter: Age (day) Value: 21
  misc_feature: MA Experiment 20000265 PARAMETER Experiment Name: At_Open_Flower_P Parameter: Plant Line Value: WS
  misc_feature: MA Experiment 20000265 PARAMETER Experiment Name: At_Open_Flower_P Parameter: Tissue Value: Closed Flower vs. Whole Plant
  misc_feature: MA Experiment ID: 20000794 Result: Down-regulated in Transcription
  misc_feature: MA Experiment 20000794 PARAMETER Experiment Name: At_Petals_P Parameter: Age (day) Value: 23-25 days
  misc_feature: MA Experiment 20000794 PARAMETER Experiment Name: At_Petals_P Parameter: Plant Line Value: WS
  misc_feature: MA Experiment 20000794 PARAMETER Experiment Name: At_Petals_P Parameter: Tissue Value: Petals vs. Whole plant
  misc_feature: MA Experiment ID: 20001557 Result: Up-regulated in Transcription
  misc_feature: MA Experiment 20001557 PARAMETER Experiment Name: At_Drought_Soil_Dry_P Parameter: Age (day) Value: 27
  misc_feature: MA Experiment 20001557 PARAMETER Experiment Name: At_Drought_Soil_Dry_P Parameter: Organism Value: A. thaliana
  misc_feature: MA Experiment 20001557 PARAMETER Experiment Name: At_Drought_Soil_Dry_P Parameter: Plant Line Value: WS
  misc_feature: MA Experiment 20001557 PARAMETER Experiment Name: At_Drought_Soil_Dry_P Parameter: Post Timepoint (hr) Value: 3
  misc_feature: MA Experiment 20001557 PARAMETER Experiment Name: At_Drought_Soil_Dry_P Parameter: Post-Treatment Value: Re-Water vs. No Drought
  misc_feature: MA Experiment 20001557 PARAMETER Experiment Name: At_Drought_Soil_Dry_P Parameter: Timepoint (day) Value: 13
  misc_feature: MA Experiment 20001557 PARAMETER Experiment Name: At_Drought_Soil_Dry_P Parameter: Treatment Value: Drought vs. No Drought
  misc_feature: MA Experiment ID: 20001558 Result: Up-regulated in Transcription
  misc_feature: MA Experiment 20001558 PARAMETER Experiment Name: At_Drought_Soil_Dry_P Parameter: Age (day) Value: 27
  misc_feature: MA Experiment 20001558 PARAMETER Experiment Name: At_Drought_Soil_Dry_P Parameter: Organism Value: A. thaliana
  misc_feature: MA Experiment 20001558 PARAMETER Experiment Name: At_Drought_Soil_Dry_P Parameter: Plant Line Value: WS
  misc_feature: MA Experiment 20001558 PARAMETER Experiment Name: At_Drought_Soil_Dry_P Parameter: Post Timepoint (hr) Value: 6
  misc_feature: MA Experiment 20001558 PARAMETER Experiment Name: At_Drought_Soil_Dry_P Parameter: Post-Treatment Value: Re-Water vs. No Drought
  misc_feature: MA Experiment 20001558 PARAMETER Experiment Name: At_Drought_Soil_Dry_P Parameter: Timepoint (day) Value: 13
  misc_feature: MA Experiment 20001558 PARAMETER Experiment Name: At_Drought_Soil_Dry_P Parameter: Treatment Value: Drought vs. No Drought
  misc_feature: MA Experiment ID: 20001560 Result: Up-regulated in Transcription
  misc_feature: MA Experiment 20001560 PARAMETER Experiment Name: At_Drought_Soil_Dry_P Parameter: Age (day) Value: 28
  misc_feature: MA Experiment 20001560 PARAMETER Experiment Name: At_Drought_Soil_Dry_P Parameter: Organism Value: A. thaliana
  misc_feature: MA Experiment 20001560 PARAMETER Experiment Name: At_Drought_Soil_Dry_P Parameter: Plant Line Value: WS
  misc_feature: MA Experiment 20001560 PARAMETER Experiment Name: At_Drought_Soil_Dry_P Parameter: Post Timepoint (hr) Value: None
  misc_feature: MA Experiment 20001560 PARAMETER Experiment Name: At_Drought_Soil_Dry_P Parameter: Post-Treatment Value: None
  misc_feature: MA Experiment 20001560 PARAMETER Experiment Name: At_Drought_Soil_Dry_P Parameter: Timepoint (day) Value: 14
  misc_feature: MA Experiment 20001560 PARAMETER Experiment Name: At_Drought_Soil_Dry_P Parameter: Treatment Value: Drought vs. No Drought
  misc_feature: MA Experiment ID: 20001757 Result: Up-regulated in Transcription
  misc_feature: MA Experiment 20001757 PARAMETER Experiment Name: At_50mM_NH4NO3_L-to-H_P Parameter: Timepoint (hr) Value: 6
  misc_feature: MA Experiment 20001757 PARAMETER Experiment Name: At_50mM_NH4NO3_L-to-H_P Parameter: Tissue Value: Leaf
  misc_feature: MA Experiment 20001757 PARAMETER Experiment Name: At_50mM_NH4NO3_L-to-H_P Parameter: Treatment Value: 50mM NH4NO3 vs 100mM Mannitol
aaaaccctagttttttgctctctcgaagttccgtgcgactctctgctcgagcaagatctcctaccgatacaatgattatctcagaggctaaccgcaaagaaatctgcaagtacctcttcaaagaaggagtttgctttgcgaagaaggatttcaatcttgctaagcatccgttgatcgatgtccccaacctacaagtgattaagcttatgcagagtttcaaatccaaggagtatgttagggagacatttgcctggatgcattactattggtttttgaccaatgaagggatcgagttcttgagaacttatcttaatcttccatctgatgttgttcctgctactttgaagaagtcagctaagcctggtggtcgtccatttggtggcccacctggtgatcgctcaagaggacctcgccatgaaggaggagaccgtcccaggtttggtgaccgtgatgggtaccgtgcaggtcctcgagctggtggtgagtttggaggtgaaaagggtggagctcccgcagattaccagccatctttccaaggaagtggccgtggttttggccgtggtgctggtggctacagcgcagctgcaccatctggttcaggtttgccttgaaaaagaaatgtctttaggtgacagtaagaccatggaggagttttcagctttaaattttgcttttgtaattcagattccggaatccttcataatctctatctgagtttagttttgttgttgaatcaaacatccgatttaaagttatgttcattccatcttctct

SEQ ID NO: 99569 - protein, 202 aa, Arabidopsis thaliana
  peptide (1)..(202): Ceres Seq. ID no. 13603221
  misc_feature (26)..(121): Pfam Name: Plectin/S10 domain Pfam Description: Plectin/S10 domain
  misc_feature (24)..(202): Homolog of NCBI NO: 15237217 NR Description: 40S ribosomal protein S10 (RPS10C) [Arabidopsis >gi|17528966|gb|AAL38693.1| unknown protein [Arabidopsis >gi|21617950|gb|AAM67000.1| putative ribosomal protein S10
  misc_feature (24)..(202): Homolog of NCBI NO: 20139798 NR Description: 40S ribosomal protein S10-3 contains similarity to 40S ribosomal protein S10~gene_id:F6N7.14
  misc_feature (24)..(202): Homolog of NCBI NO: 15235985 NR Description: 40S ribosomal protein S10 (RPS10A) [Arabidopsis
  misc_feature (24)..(201): Homolog of NCBI NO: 34897532 NR Description: OSJNBa0042L16.3 [Oryza sativa (japonica
  misc_feature (24)..(197): Homolog of NCBI NO: 34905824 NR Description: putative ribosomal protein S10 [Oryza sativa
  misc_feature (24)..(201): Homolog of NCBI NO: 20140213 NR Description: 40S ribosomal protein S10
  misc_feature (24)..(202): Homolog of NCBI NO: 15238099 NR Description: expressed protein [Arabidopsis thaliana]
  misc_feature (24)..(196): Homolog of NCBI NO: 40642980 NR Description: ribosomal protein S10 [Crassostrea gigas]
  misc_feature (24)..(189): Homolog of NCBI NO: 24266976 NR Description: ribosomal protein S10 [Branchiostoma belcheri]
  misc_feature (24)..(189): Homolog of NCBI NO: 28200289 NR Description: ribosomal protein S10 [Branchiostoma belcheri
NPSFLLSRSSVRLSARARSPTDTMIISEANRKEICKYLFKEGVCFAKKDFNLAKHPLIDVPNLQVIKLMQSFKSKEYVRETFAWMHYYWFLTNEGIEFLRTYLNLPSDVVPATLKKSAKPGGRPFGGPPGDRSRGPRHEGGDRPRFGDRDGYRAGPRAGGEFGGEKGGAPADYQPSFQGSGRGFGRGAGGYSAAAPSGSGLP

SEQ ID NO: 99570 - protein, 179 aa, Arabidopsis thaliana; identical to SEQ ID NO: 37920
  peptide (1)..(179): Ceres Seq. ID no. 13603222
  misc_feature (3)..(98): Pfam Name: Plectin/S10 domain Pfam Description: Plectin/S10 domain
  misc_feature (1)..(179): Homolog of NCBI NO: 15237217 NR Description: 40S ribosomal protein S10 (RPS10C) [Arabidopsis >gi|17528966|gb|AAL38693.1| unknown protein [Arabidopsis >gi|21617950|gb|AAM67000.1| putative ribosomal protein S10
  misc_feature (1)..(179): Homolog of NCBI NO: 20139798 NR Description: 40S ribosomal protein S10-3 contains similarity to 40S ribosomal protein S10~gene_id:F6N7.14
  misc_feature (1)..(179): Homolog of NCBI NO: 15235985 NR Description: 40S ribosomal protein S10 (RPS10A) [Arabidopsis
  misc_feature (1)..(178): Homolog of NCBI NO: 34897532 NR Description: OSJNBa0042L16.3 [Oryza sativa (japonica
  misc_feature (1)..(174): Homolog of NCBI NO: 34905824 NR Description: putative ribosomal protein S10 [Oryza sativa
  misc_feature (1)..(178): Homolog of NCBI NO: 20140213 NR Description: 40S ribosomal protein S10
  misc_feature (1)..(179): Homolog of NCBI NO: 15238099 NR Description: expressed protein [Arabidopsis thaliana]
  misc_feature (1)..(173): Homolog of NCBI NO: 40642980 NR Description: ribosomal protein S10 [Crassostrea gigas]
  misc_feature (1)..(166): Homolog of NCBI NO: 24266976 NR Description: ribosomal protein S10 [Branchiostoma belcheri]
  misc_feature (1)..(166): Homolog of NCBI NO: 28200289 NR Description: ribosomal protein S10 [Branchiostoma belcheri

SEQ ID NO: 99571 - protein, 134 aa, Arabidopsis thaliana; identical to SEQ ID NO: 37921
  peptide (1)..(134): Ceres Seq. ID no. 13603223
  misc_feature (1)..(53): Pfam Name: Plectin/S10 domain Pfam Description: Plectin/S10 domain
  misc_feature (1)..(134): Homolog of NCBI NO: 15237217 NR Description: 40S ribosomal protein S10 (RPS10C) [Arabidopsis >gi|17528966|gb|AAL38693.1| unknown protein [Arabidopsis >gi|21617950|gb|AAM67000.1| putative ribosomal protein S10
  misc_feature (1)..(134): Homolog of NCBI NO: 20139798 NR Description: 40S ribosomal protein S10-3 contains similarity to 40S ribosomal protein S10~gene_id:F6N7.14
  misc_feature (1)..(134): Homolog of NCBI NO: 15235985 NR Description: 40S ribosomal protein S10 (RPS10A) [Arabidopsis
  misc_feature (1)..(133): Homolog of NCBI NO: 34897532 NR Description: OSJNBa0042L16.3 [Oryza sativa (japonica
  misc_feature (1)..(129): Homolog of NCBI NO: 34905824 NR Description: putative ribosomal protein S10 [Oryza sativa
  misc_feature (1)..(133): Homolog of NCBI NO: 20140213 NR Description: 40S ribosomal protein S10
  misc_feature (1)..(134): Homolog of NCBI NO: 15238099 NR Description: expressed protein [Arabidopsis thaliana]
  misc_feature (1)..(128): Homolog of NCBI NO: 40642980 NR Description: ribosomal protein S10 [Crassostrea gigas]
  misc_feature (1)..(121): Homolog of NCBI NO: 24266976 NR Description: ribosomal protein S10 [Branchiostoma belcheri]
  misc_feature (1)..(121): Homolog of NCBI NO: 28200289 NR Description: ribosomal protein S10 [Branchiostoma belcheri

SEQ ID NO: 99572 - DNA, 1332 bp, Arabidopsis thaliana
  misc_feature (1)..(1332): Ceres Seq. ID no. 13603224
  misc_feature: MA Experiment ID: 108434 Result: Down-regulated in Transcription
  misc_feature: MA Experiment 108434 PARAMETER Experiment Name: At_Root_Tips_cDNA_P Parameter: Tissue Value: Root Tips
  misc_feature: MA Experiment ID: 108573 Result: Up-regulated in Transcription
  misc_feature: MA Experiment 108573 PARAMETER Experiment Name: At_Drought_cDNA_P Parameter: Timepoint (hr) Value: 6
  misc_feature: MA Experiment 108573 PARAMETER Experiment Name: At_Drought_cDNA_P Parameter: Tissue Value: Aerial
  misc_feature: MA Experiment 108573 PARAMETER Experiment Name: At_Drought_cDNA_P Parameter: Treatment Value: Drought vs. No Drought
  misc_feature: MA Experiment ID: 108574 Result: Up-regulated in Transcription
  misc_feature: MA Experiment 108574 PARAMETER Experiment Name: At_Wounding__cDNA_P Parameter: Timepoint (hr) Value: 1
  misc_feature: MA Experiment 108574 PARAMETER Experiment Name: At_Wounding__cDNA_P Parameter: Tissue Value: Aerial
  misc_feature: MA Experiment 108574 PARAMETER Experiment Name: At_Wounding__cDNA_P Parameter: Treatment Value: Wounding vs. No Wounding
  misc_feature: MA Experiment ID: 108579 Result: Up-regulated in Transcription
  misc_feature: MA Experiment 108579 PARAMETER Experiment Name: At_4deg_Cold_cDNA_P Parameter: Temperature (deg C) Value: 4 vs. 22
  misc_feature: MA Experiment 108579 PARAMETER Experiment Name: At_4deg_Cold_cDNA_P Parameter: Timepoint (hr) Value: 6
  misc_feature: MA Experiment 108579 PARAMETER Experiment Name: At_4deg_Cold_cDNA_P Parameter: Tissue Value: Aerial
  misc_feature: MA Experiment ID: 108608 Result: Up-regulated in Transcription
  misc_feature: MA Experiment 108608 PARAMETER Experiment Name: At_100uM_ABA_cDNA_P Parameter: Timepoint (hr) Value: 1
  misc_feature: MA Experiment 108608 PARAMETER Experiment Name: At_100uM_ABA_cDNA_P Parameter: Tissue Value: Aerial
  misc_feature: MA Experiment 108608 PARAMETER Experiment Name: At_100uM_ABA_cDNA_P Parameter: Treatment Value: 100uM ABA vs. No Treatment
  misc_feature: MA Experiment ID: 20000437 Result: Up-regulated in Transcription
  misc_feature: MA Experiment 20000437 PARAMETER Experiment Name: At_Drought_P Parameter: Age (day) Value: 8
  misc_feature: MA Experiment 20000437 PARAMETER Experiment Name: At_Drought_P Parameter: Organism Value: A. thaliana
  misc_feature: MA Experiment 20000437 PARAMETER Experiment Name: At_Drought_P Parameter: Plant Line Value: WS
  misc_feature: MA Experiment 20000437 PARAMETER Experiment Name: At_Drought_P Parameter: Timepoint (hr) Value: 24
  misc_feature: MA Experiment 20000437 PARAMETER Experiment Name: At_Drought_P Parameter: Tissue Value: Whole Plant
  misc_feature: MA Experiment 20000437 PARAMETER Experiment Name: At_Drought_P Parameter: Treatment Value: Drought vs. No Drought
  misc_feature: MA Experiment ID: 20001911 Result: Up-regulated in Transcription
  misc_feature: MA Experiment 20001911 PARAMETER Experiment Name: At_Drought_Reproduction_P Parameter: Age (day) Value: 40
  misc_feature: MA Experiment 20001911 PARAMETER Experiment Name: At_Drought_Reproduction_P Parameter: Organism Value: A. thaliana
  misc_feature: MA Experiment 20001911 PARAMETER Experiment Name: At_Drought_Reproduction_P Parameter: Plant Line Value: WS
  misc_feature: MA Experiment 20001911 PARAMETER Experiment Name: At_Drought_Reproduction_P Parameter: Timepoint (day) Value: 10
  misc_feature: MA Experiment 20001911 PARAMETER Experiment Name: At_Drought_Reproduction_P Parameter: Tissue Value: Flowers
  misc_feature: MA Experiment 20001911 PARAMETER Experiment Name: At_Drought_Reproduction_P Parameter: Treatment Value: Drought vs. No Drought
ctacacaacacagctttttaaacccaacagagcaaaaaagcaaaagattcaacaaaaatctcctcaaattctattcatggtctctagaaattctgacggatatttcttggatccgaccggtatgactgttcctggtctcggaccttcctttacagccgccgtttcttcttcttcttcaccaacgacttcttctacggccgtggctgtggcggatgtgacggcgatggtttcttcttcggaggaggatttgagtaagaagattaggaagccttatactattactaagtctagagagagctggacggagcctgagcatgataaattccttgaagctcttcaattgtttgatagagactggaagaagattgaagcttttattggttcaaagacagtgattcagatacgaagtcatgctcagaagtattttcttaaggtacaaaagagtgggaccggtgaacatctccctcctcctcgacctaaaaggaaagccgctcatccatatcctcagaaggctcacaagaatgtgcaactgcaagtaccagggtcattcaagtcaacatctgaaccaaatgacccaagttttatgtttaggcctgagtcttcttcaatgctgatgacttcgccaaccactgctgctgcggctccatggacaaataatgcgcaaacaattagcttcactcccctcccaaaaggagcaggagctaataacaattgttctagtagttctgaaaatactccaagaccacgatccaacagggacgcaagagaccatggaaatgttggccattcattaagagttttaccggactttgcccaagtatacggcttcattggaagtgtgtttgacccatatgcaagtaatcatctacaaaagctgaagaagatggaccccatagatgttgaaacagtgttactattgatgagaaatctatccatcaacttgtctagtcctgactttgaggatcatagacggcttctttcgtcttatgatatcggatctgagacagcaactgatcatggtggagtgaataaaaccttaaacaaagacccacctgaaatctctacttaatgtttaatagaagaggagaactgtgaaaagtgtctcaggtgagccagccaacaaccagatggctacaaaatacagagattctgttgtggttttttgtttgtacataggaagaagatgaagctgatgttactcggtttagttgttgttactgttataaatagtctgttgggttaaggatggtatatgtacagtgtattatcataagttagatctcaagtttaaacatatgtatcagtctctttgatgggagaccaaaatctctt

SEQ ID NO: 99573 - protein, 355 aa, Arabidopsis thaliana
  peptide (1)..(355): Ceres Seq. ID no. 13603225
  misc_feature (97)..(142): Pfam Name: Myb-like DNA-binding domain Pfam Description: Myb-like DNA-binding domain
  misc_feature (26)..(355): Homolog of NCBI NO: 30696221 NR Description: myb family transcription factor [Arabidopsis
  misc_feature (26)..(355): Homolog of NCBI NO: 30696225 NR Description: myb family transcription factor [Arabidopsis >gi|25082907|gb|AAN72013.1| putative protein [Arabidopsis
  misc_feature (41)..(326): Homolog of NCBI NO: 8953721 NR Description: contains similarity to MYB-related DNA-binding
  misc_feature (73)..(329): Homolog of NCBI NO: 15234118 NR Description: myb family transcription factor [Arabidopsis
  misc_feature (57)..(330): Homolog of NCBI NO: 30680926 NR Description: myb family transcription factor [Arabidopsis >gi|20268705|gb|AAM14056.1| unknown protein [Arabidopsis >gi|21689883|gb|AAM67502.1| unknown protein [Arabidopsis
  misc_feature (60)..(330): Homolog of NCBI NO: 15223419 NR Description: myb family transcription factor [Arabidopsis
  misc_feature (25)..(330): Homolog of NCBI NO: 25517982 NR Description: F22L4.6 protein - Arabidopsis thaliana
  misc_feature (63)..(215): Homolog of NCBI NO: 11357907 NR Description: hypothetical protein F9G14.150 - Arabidopsis >gi|7413559|emb|CAB86038.1| putative protein [Arabidopsis
  misc_feature (263)..(334): Homolog of NCBI NO: 11357907 NR Description: hypothetical protein F9G14.150 - Arabidopsis >gi|7413559|emb|CAB86038.1| putative protein [Arabidopsis
  misc_feature (63)..(334): Homolog of NCBI NO: 18414039 NR Description: myb family transcription factor [Arabidopsis >gi|30679792|ref|NP_850756.1| myb family transcription factor
YTTQLFKPNRAKKQKIQQKSPQILFMVSRNSDGYFLDPTGMTVPGLGPSFTAAVSSSSSPTTSSTAVAVADVTAMVSSSEEDLSKKIRKPYTITKSRESWTEPEHDKFLEALQLFDRDWKKIEAFIGSKTVIQIRSHAQKYFLKVQKSGTGEHLPPPRPKRKAAHPYPQKAHKNVQLQVPGSFKSTSEPNDPSFMFRPESSSMLMTSPTTAAAAPWTNNAQTISFTPLPKGAGANNNCSSSSENTPRPRSNRDARDHGNVGHSLRVLPDFAQVYGFIGSVFDPYASNHLQKLKKMDPIDVETVLLLMRNLSINLSSPDFEDHRRLLSSYDIGSETATDHGGVNKTLNKDPPEIST

SEQ ID NO: 99574 - protein, 330 aa, Arabidopsis thaliana
  peptide (1)..(330): Ceres Seq. ID no. 13603226
  misc_feature (72)..(117): Pfam Name: Myb-like DNA-binding domain Pfam Description: Myb-like DNA-binding domain
  misc_feature (1)..(330): Homolog of NCBI NO: 30696221 NR Description: myb family transcription factor [Arabidopsis
  misc_feature (1)..(330): Homolog of NCBI NO: 30696225 NR Description: myb family transcription factor [Arabidopsis >gi|25082907|gb|AAN72013.1| putative protein [Arabidopsis
  misc_feature (16)..(301): Homolog of NCBI NO: 8953721 NR Description: contains similarity to MYB-related DNA-binding
  misc_feature (48)..(304): Homolog of NCBI NO: 15234118 NR Description: myb family transcription factor [Arabidopsis
  misc_feature (32)..(305): Homolog of NCBI NO: 30680926 NR Description: myb family transcription factor [Arabidopsis >gi|20268705|gb|AAM14056.1| unknown protein [Arabidopsis >gi|21689883|gb|AAM67502.1| unknown protein [Arabidopsis
  misc_feature (35)..(305): Homolog of NCBI NO: 15223419 NR Description: myb family transcription factor [Arabidopsis
  misc_feature (1)..(305): Homolog of NCBI NO: 25517982 NR Description: F22L4.6 protein - Arabidopsis thaliana
  misc_feature (38)..(190): Homolog of NCBI NO: 11357907 NR Description: hypothetical protein F9G14.150 - Arabidopsis >gi|7413559|emb|CAB86038.1| putative protein [Arabidopsis
  misc_feature (238)..(309): Homolog of NCBI NO: 11357907 NR Description: hypothetical protein F9G14.150 - Arabidopsis >gi|7413559|emb|CAB86038.1| putative protein [Arabidopsis
  misc_feature (38)..(309): Homolog of NCBI NO: 18414039 NR Description: myb family transcription factor [Arabidopsis >gi|30679792|ref|NP_850756.1| myb family transcription factor
MVSRNSDGYFLDPTGMTVPGLGPSFTAAVSSSSSPTTSSTAVAVADVTAMVSSSEEDLSKKIRKPYTITKSRESWTEPEHDKFLEALQLFDRDWKKIEAFIGSKTVIQIRSHAQKYFLKVQKSGTGEHLPPPRPKRKAAHPYPQKAHKNVQLQVPGSFKSTSEPNDPSFMFRPESSSMLMTSPTTAAAAPWTNNAQTISFTPLPKGAGANNNCSSSSENTPRPRSNRDARDHGNVGHSLRVLPDFAQVYGFIGSVFDPYASNHLQKLKKMDPIDVETVLLLMRNLSINLSSPDFEDHRRLLSSYDIGSETATDHGGVNKTLNKDPPEIST

SEQ ID NO: 99575 - protein, 315 aa, Arabidopsis thaliana
  peptide (1)..(315): Ceres Seq. ID no. 13603227
  misc_feature (57)..(102): Pfam Name: Myb-like DNA-binding domain Pfam Description: Myb-like DNA-binding domain
  misc_feature (1)..(315): Homolog of NCBI NO: 30696221 NR Description: myb family transcription factor [Arabidopsis
  misc_feature (1)..(315): Homolog of NCBI NO: 30696225 NR Description: myb family transcription factor [Arabidopsis >gi|25082907|gb|AAN72013.1| putative protein [Arabidopsis
  misc_feature (1)..(286): Homolog of NCBI NO: 8953721 NR Description: contains similarity to MYB-related DNA-binding
  misc_feature (33)..(289): Homolog of NCBI NO: 15234118 NR Description: myb family transcription factor [Arabidopsis
  misc_feature (17)..(290): Homolog of NCBI NO: 30680926 NR Description: myb family transcription factor [Arabidopsis >gi|20268705|gb|AAM14056.1| unknown protein [Arabidopsis >gi|21689883|gb|AAM67502.1| unknown protein [Arabidopsis
  misc_feature (20)..(290): Homolog of NCBI NO: 15223419 NR Description: myb family transcription factor [Arabidopsis
  misc_feature (1)..(290): Homolog of NCBI NO: 25517982 NR Description: F22L4.6 protein - Arabidopsis thaliana
  misc_feature (23)..(175): Homolog of NCBI NO: 11357907 NR Description: hypothetical protein F9G14.150 - Arabidopsis >gi|7413559|emb|CAB86038.1| putative protein [Arabidopsis
  misc_feature (223)..(294): Homolog of NCBI NO: 11357907 NR Description: hypothetical protein F9G14.150 - Arabidopsis >gi|7413559|emb|CAB86038.1| putative protein [Arabidopsis
  misc_feature (23)..(294): Homolog of NCBI NO: 18414039 NR Description: myb family transcription factor [Arabidopsis >gi|30679792|ref|NP_850756.1| myb family transcription factor
MTVPGLGPSFTAAVSSSSSPTTSSTAVAVADVTAMVSSSEEDLSKKIRKPYTITKSRESWTEPEHDKFLEALQLFDRDWKKIEAFIGSKTVIQIRSHAQKYFLKVQKSGTGEHLPPPRPKRKAAHPYPQKAHKNVQLQVPGSFKSTSEPNDPSFMFRPESSSMLMTSPTTAAAAPWTNNAQTISFTPLPKGAGANNNCSSSSENTPRPRSNRDARDHGNVGHSLRVLPDFAQVYGFIGSVFDPYASNHLQKLKKMDPIDVETVLLLMRNLSINLSSPDFEDHRRLLSSYDIGSETATDHGGVNKTLNKDPPEIST

SEQ ID NO: 99576 - DNA, 969 bp, Arabidopsis thaliana
  misc_feature (1)..(969): Ceres Seq. ID no. 13603249
  misc_feature: MA Experiment ID: 108434 Result: Up-regulated in Transcription
  misc_feature: MA Experiment 108434 PARAMETER Experiment Name: At_Root_Tips_cDNA_P Parameter: Tissue Value: Root Tips
  misc_feature: MA Experiment ID: 108462 Result: Down-regulated in Transcription
  misc_feature: MA Experiment 108462 PARAMETER Experiment Name: At_Germinating_Seeds_cDNA_P Parameter: Age (day) Value: 2 vs. 0
  misc_feature: MA Experiment 108462 PARAMETER Experiment Name: At_Germinating_Seeds_cDNA_P Parameter: Tissue Value: Germinating Seeds
  misc_feature: MA Experiment ID: 108463 Result: Down-regulated in Transcription
  misc_feature: MA Experiment 108463 PARAMETER Experiment Name: At_Germinating_Seeds_cDNA_P Parameter: Age (day) Value: 3 vs. 0
  misc_feature: MA Experiment 108463 PARAMETER Experiment Name: At_Germinating_Seeds_cDNA_P Parameter: Tissue Value: Germinating Seeds
  misc_feature: MA Experiment ID: 108464 Result: Down-regulated in Transcription
  misc_feature: MA Experiment 108464 PARAMETER Experiment Name: At_Germinating_Seeds_cDNA_P Parameter: Age (day) Value: 4 vs. 0
  misc_feature: MA Experiment 108464 PARAMETER Experiment Name: At_Germinating_Seeds_cDNA_P Parameter: Tissue Value: Germinating Seeds
  misc_feature: MA Experiment ID: 108573 Result: Down-regulated in Transcription
  misc_feature: MA Experiment 108573 PARAMETER Experiment Name: At_Drought_cDNA_P Parameter: Timepoint (hr) Value: 6
  misc_feature: MA Experiment 108573 PARAMETER Experiment Name: At_Drought_cDNA_P Parameter: Tissue Value: Aerial
  misc_feature: MA Experiment 108573 PARAMETER Experiment Name: At_Drought_cDNA_P Parameter: Treatment Value: Drought vs. No Drought
  misc_feature: MA Experiment ID: 20000224 Result: Up-regulated in Transcription
  misc_feature: MA Experiment ID: 20000227 Result: Up-regulated in Transcription
  misc_feature: MA Experiment 20000227 PARAMETER Experiment Name: At_Root-Tips-vs-Tops_P Parameter: Tissue Value: Root Tips vs. Root Tops
  misc_feature: MA Experiment ID: 20000234 Result: Up-regulated in Transcription
  misc_feature: MA Experiment 20000234 PARAMETER Experiment Name: At_Siliques_P Parameter: Age (day) Value: 21
  misc_feature: MA Experiment 20000234 PARAMETER Experiment Name: At_Siliques_P Parameter: Organism Value: A. thaliana
  misc_feature: MA Experiment 20000234 PARAMETER Experiment Name: At_Siliques_P Parameter: Plant Line Value: WS
  misc_feature: MA Experiment 20000234 PARAMETER Experiment Name: At_Siliques_P Parameter: Tissue Value: Less Than 5mm Siliques vs. Whole Plant
  misc_feature: MA Experiment ID: 20000495 Result: Up-regulated in Transcription
  misc_feature: MA Experiment 20000495 PARAMETER Experiment Name: At_Guard_Cells_P Parameter: Harvest Date Value: 8/2/2002
  misc_feature: MA Experiment 20000495 PARAMETER Experiment Name: At_Guard_Cells_P Parameter: Organism Value: A. thaliana
  misc_feature: MA Experiment 20000495 PARAMETER Experiment Name: At_Guard_Cells_P Parameter: Tissue Value: Guard Cells vs. Leaves
  misc_feature: MA Experiment ID: 20001556 Result: Up-regulated in Transcription
  misc_feature: MA Experiment 20001556 PARAMETER Experiment Name: At_Drought_Soil_Dry_P Parameter: Age (day) Value: 26
  misc_feature: MA Experiment 20001556 PARAMETER Experiment Name: At_Drought_Soil_Dry_P Parameter: Organism Value: A. thaliana
  misc_feature: MA Experiment 20001556 PARAMETER Experiment Name: At_Drought_Soil_Dry_P Parameter: Plant Line Value: WS
  misc_feature: MA Experiment 20001556 PARAMETER Experiment Name: At_Drought_Soil_Dry_P Parameter: Post Timepoint (hr) Value: None
  misc_feature: MA Experiment 20001556 PARAMETER Experiment Name: At_Drought_Soil_Dry_P Parameter: Post-Treatment Value: None
  misc_feature: MA Experiment 20001556 PARAMETER Experiment Name: At_Drought_Soil_Dry_P Parameter: Timepoint (day) Value: 12
  misc_feature: MA Experiment 20001556 PARAMETER Experiment Name: At_Drought_Soil_Dry_P Parameter: Treatment Value: Drought vs. No Drought
  misc_feature: MA Experiment ID: 20001560 Result: Up-regulated in Transcription
  misc_feature: MA Experiment 20001560 PARAMETER Experiment Name: At_Drought_Soil_Dry_P Parameter: Age (day) Value: 28
  misc_feature: MA Experiment 20001560 PARAMETER Experiment Name: At_Drought_Soil_Dry_P Parameter: Organism Value: A. thaliana
  misc_feature: MA Experiment 20001560 PARAMETER Experiment Name: At_Drought_Soil_Dry_P Parameter: Plant Line Value: WS
  misc_feature: MA Experiment 20001560 PARAMETER Experiment Name: At_Drought_Soil_Dry_P Parameter: Post Timepoint (hr) Value: None
  misc_feature: MA Experiment 20001560 PARAMETER Experiment Name: At_Drought_Soil_Dry_P Parameter: Post-Treatment Value: None
  misc_feature: MA Experiment 20001560 PARAMETER Experiment Name: At_Drought_Soil_Dry_P Parameter: Timepoint (day) Value: 14
  misc_feature: MA Experiment 20001560 PARAMETER Experiment Name: At_Drought_Soil_Dry_P Parameter: Treatment Value: Drought vs. No Drought
  misc_feature: MA Experiment ID: 20001757 Result: Up-regulated in Transcription
  misc_feature: MA Experiment 20001757 PARAMETER Experiment Name: At_50mM_NH4NO3_L-to-H_P Parameter: Timepoint (hr) Value: 6
  misc_feature: MA Experiment 20001757 PARAMETER Experiment Name: At_50mM_NH4NO3_L-to-H_P Parameter: Tissue Value: Leaf
  misc_feature: MA Experiment 20001757 PARAMETER Experiment Name: At_50mM_NH4NO3_L-to-H_P Parameter: Treatment Value: 50mM NH4NO3 vs 100mM Mannitol
gagttcgtgaaaaagagacgtcgcatcgcaccgccgtcgccatttccaccgtcgtagcattgccgcttcactgactgtcgcactgaatattgttgaatcgagaaaatggcttatgttgggcaaagtagaaacgtgattcggcatgtagtctcgagaggaacagcttatcacaagtatgaaaatgcgattcatcatcctctccttttcgcttgtcaaggagttcgatacagaaaattagaagttattcttacaacgggcattgagaagcttggcaaagctggtgagactgtgaaggtagctcctggatacttcaggaatcaccttatgccaaaacttcttgctgtgcctaacattgacaagtatgcttatctcatccgagagcaacgcaagatgtataatcatgaagaagtaaaggaggaggttaaggtggttcataaaacttctgaagtccagacaaaagagtatgaaaaggctgcaaagcgtctggcgaatgctaatttggtattgaggaagttagttgacaaggaaaagttcaaaaaccgctcctcaaaagacgacaaacctgatgttcaaactcctatcacaaaggaagagatagtctctgaggtggcgaggcagctctgtgtgaagattgatccagacaatgtggttttagcggcgcctttggaaacttttggcgagtacgaggtgcctcttaaattccccaagacaattcctttgccacaaggaactgttcaatggattctcaaagtcaaagtccgtggccattaaatcttccacctttgaaagtcctccttcagtgatagttctcttcttcaatatgtttcaatatagttttggaattgcagaaacataagcaaacacaaatcagttacatttcccttgactcagtttttttttttttttttttgtagttgtataaaccgggtttactccggtctttaatttaaacaatgactcgaattttgc

SEQ ID NO: 99577 - protein, 221 aa, Arabidopsis thaliana; identical to SEQ ID NO: 41469
  peptide (1)..(221): Ceres Seq. ID no. 13603250
  misc_feature (44)..(93): Pfam Name: Ribosomal protein L9, N-terminal domain Pfam Description: Ribosomal protein L9, N-terminal domain
  misc_feature (1)..(221): Homolog of NCBI NO: 15237342 NR Description: expressed protein [Arabidopsis thaliana] contains similarity to ribosomal protein L9~gene_id:MNB8.13 thaliana] >gi|27754507|gb|AAO22701.1| unknown protein

SEQ ID NO: 99578 - protein, 148 aa, Arabidopsis thaliana; identical to SEQ ID NO: 41470
  peptide (1)..(148): Ceres Seq. ID no. 13603251
  misc_feature (54)..(130): Pfam Name: Ribosomal protein L9, C-terminal domain Pfam Description: Ribosomal protein L9, C-terminal domain
  misc_feature (1)..(148): Homolog of NCBI NO: 15237342 NR Description: expressed protein [Arabidopsis thaliana] contains similarity to ribosomal protein L9~gene_id:MNB8.13 thaliana] >gi|27754507|gb|AAO22701.1| unknown protein

SEQ ID NO: 99579 - protein, 126 aa, Arabidopsis thaliana; identical to SEQ ID NO: 41471
  peptide (1)..(126): Ceres Seq. ID no. 13603252
  misc_feature (32)..(108): Pfam Name: Ribosomal protein L9, C-terminal domain Pfam Description: Ribosomal protein L9, C-terminal domain
  misc_feature (1)..(126): Homolog of NCBI NO: 15237342 NR Description: expressed protein [Arabidopsis thaliana] contains similarity to ribosomal protein L9~gene_id:MNB8.13 thaliana] >gi|27754507|gb|AAO22701.1| unknown protein

SEQ ID NO: 99580 - DNA, 2726 bp, Arabidopsis thaliana
  misc_feature (1)..(2726): Ceres Seq. ID no. 13603255
  misc_feature: MA Experiment ID: 20000184 Result: Down-regulated in Transcription
  misc_feature: MA Experiment 20000184 PARAMETER Experiment Name: At_Shoots__P Parameter: Age (day) Value: 7
  misc_feature: MA Experiment 20000184 PARAMETER Experiment Name: At_Shoots__P Parameter: Tissue Value: Shoots vs. Whole Plant
  misc_feature: MA Experiment ID: 20001757 Result: Up-regulated in Transcription
  misc_feature: MA Experiment 20001757 PARAMETER Experiment Name: At_50mM_NH4NO3_L-to-H_P Parameter: Timepoint (hr) Value: 6
  misc_feature: MA Experiment 20001757 PARAMETER Experiment Name: At_50mM_NH4NO3_L-to-H_P Parameter: Tissue Value: Leaf
  misc_feature: MA Experiment 20001757 PARAMETER Experiment Name: At_50mM_NH4NO3_L-to-H_P Parameter: Treatment Value: 50mM NH4NO3 vs 100mM Mannitol
  misc_feature: MA Experiment ID: 20001905 Result: Down-regulated in Transcription
  misc_feature: MA Experiment 20001905 PARAMETER Experiment Name: At_Drought_Reproduction_P Parameter: Age (day) Value: 40
  misc_feature: MA Experiment 20001905 PARAMETER Experiment Name: At_Drought_Reproduction_P Parameter: Organism Value: A. thaliana
  misc_feature: MA Experiment 20001905 PARAMETER Experiment Name: At_Drought_Reproduction_P Parameter: Plant Line Value: WS
  misc_feature: MA Experiment 20001905 PARAMETER Experiment Name: At_Drought_Reproduction_P Parameter: Timepoint (day) Value: 10
  misc_feature: MA Experiment 20001905 PARAMETER Experiment Name: At_Drought_Reproduction_P Parameter: Tissue Value: Rosettes
  misc_feature: MA Experiment 20001905 PARAMETER Experiment Name: At_Drought_Reproduction_P Parameter: Treatment Value: Drought vs. No Drought
aaaggattcaaaaaaccctaaacactccaatgtcttcttctactcttcaagcttctctttttcttcgtcctcctctccatacttcttcgtttaagctttacccttgtctattctcttcttcttcattgagtttttgtccacaatctctctcaagtttctaccgtctttcttcagttcttcacaactctcgatttcgtccccttccttgctcattgcgtcaagacaatgtcgcttccgattctgatttcattcccaaagactccgcttttgaggttacggattcagctgagagtaatagattggtttccgatacggaggtttcggaattagagacgaatgatagatttgtgggtggtgaggagacgaaaagtggaggagaagaagcggaggttagtaatggagtaacggaaggtaaggaggaagatcagaagaagagcaagtttaggattgtggtgttgatgatggcactatgggcggctataaagagagctatagagaaggtaatggagtgggaatggttaagctggtggcctttctctcgccaggagaagcggctcgagaaacttattgctgaggctgatgctaatccaaaggacgcagctttgcagggtgctttattggctgagctcaataagcatattcctgaggctgtagttcaacggtttgaacaaagggaacacacagtggatagtagaggagttgctgaatatattcgagctcttgtcattacaaatgctatctcggagtatcttcctgatgaacaaacggggaagccatctagtcttcccgcactgctgcaagagctgaagcatcgtgcatcaggcaatatggacgaatcatttgtgaaccctggtatatctgagaagcaaccactgcatgttaccatggttaatcctaaagtttcaaacaaatcaagatttgcgcaagagcttgtctctacgatcttgttcactgttgcggtgggattagtgtggattatgggtgcagctgctctgcaaaagtatattggaagtcttggaggaattggaacttcgggtgttggttcaagctcttcatattccccaaaagagctgaacaaagaaataacgccagaaaagaatgtcaaaacatttaaggacgtaaagggttgtgatgatgcaaaacaagagctcgaagaggtagttgaatatctcaaaaatccatcaaagtttacccgccttggaggaaagttgccaaagggaattcttctaaccggggcacctggtactggaaagacattgctggccaaagcaattgctggagaagctggagtacccttcttctatagagctggatctgaatttgaagagatgtttgttggggtaggagctcgccgtgtgagatccttgtttcaggcagccaagaagaaggcaccttgtattattttcattgacgaaattgatgctgttggatccacaagaaaacaatgggaagggcatacaaagaagacattgcatcaactacttgttgaaatggatggttttgagcagaatgagggaataatagttatggctgcaacaaacttgcctgatatacttgatccagctctgacaagaccgggtagatttgatagacatattgtcgtacccagtccggatgtccgtggacgcgaagagattttggaactctacctccaaggcaaacctatgtcagaagatgttgatgttaaagcaattgctcgtggaactcctggattcaatggtgctgatcttgcaaacctggtaaatattgctgccataaaagcagctgttgaaggtgctgagaagttatcttctgaacagttggaattcgcaaaggaccgaattgtcatgggcacagagaggaagacaatgttcgtatcagaggactcaaaaaagctcactgcataccatgagagtggtcatgctattgtcgctttaaatacgaaaggtgcgcacccgatccacaaagcgactataatgccacgtggatctgcattgggaatggttacacagttaccttcaaacgatgaaacatcagtgagcaagaggcagttattagctcgtctcgatgtatgtatgggaggaagagttgcagaggagctcatctttggcttggaccatattaccactggagcgagtagcgatctgtcacaggccactgaacttgcacaatacatggtatcgagttgtgggatgagtgaggcaataggaccagttcatataaaagaaagaccaagctctgatatgcaatcacgcattgatgccgaggttgtgaagcttcttagagaagcatatgagagagtgaaatctctcttgaaacggcatgagaagcagctacacacgttagcaaacgcacttctagagtatgaaacgctaaccgcagaggacataaagcgtattctccttccaaagcaggaaggcgagaaatttgaagagcaacaacaagaagaaggagacttggtattggcctaatcacatcattcattaccataaacacacttctttgggtgaaaaagggagattcaaagctttgtacagagtaaatctcccatagcttctacaacaacaaccaaaagaaaaacatatgaaattattgatctcatgttacaaaattattgtagtttttatttcattagctcattagttttcgcttcgaccttgaaccttttgccctttttgacattctgttcaattctatgaagaaaaatgtaaaacaacattgaaaagaaagtaataattgttgtcttt

SEQ ID NO: 99581 - protein, 815 aa, Arabidopsis thaliana; identical to SEQ ID NO: 21131
  peptide (1)..(815): Ceres Seq. ID no. 13603256
  misc_feature (595)..(792): Pfam Name: Peptidase family M41 Pfam Description: Peptidase family M41
  misc_feature (124)..(694): Homolog of NCBI NO: 34912722 NR Description: putative cell division protein FtsH protease-like
  misc_feature (688)..(808): Homolog of NCBI NO: 34912722 NR Description: putative cell division protein FtsH protease-like
  misc_feature (204)..(793): Homolog of NCBI NO: 18401040 NR Description: FtsH protease, putative [Arabidopsis thaliana]
  misc_feature (207)..(807): Homolog of NCBI NO: 30526336 NR Description: putative FtsH protease [Lycopersicon esculentum]
  misc_feature (229)..(793): Homolog of NCBI NO: 7488430 NR Description: probable YME1 ATP-dependant proteinase [imported]
  misc_feature (287)..(812): Homolog of NCBI NO: 23509838 NR Description: hypothetical protein, conserved [Plasmodium
  misc_feature (181)..(246): Homolog of NCBI NO: 23509838 NR Description: hypothetical protein, conserved [Plasmodium
  misc_feature (320)..(812): Homolog of NCBI NO: 23479426 NR Description: ATP-dependent metalloprotease FtsH, putative
  misc_feature (183)..(305): Homolog of NCBI NO: 23479426 NR Description: ATP-dependent metalloprotease FtsH, putative
  misc_feature (365)..(803): Homolog of NCBI NO: 7305635 NR Description: YME1-like 1; ATP-dependent metalloprotease FtsH1

SEQ ID NO: 99582 - protein, 806 aa, Arabidopsis thaliana; identical to SEQ ID NO: 21132
  peptide (1)..(806): Ceres Seq. ID no. 13603257
  misc_feature (586)..(783): Pfam Name: Peptidase family M41 Pfam Description: Peptidase family M41
  misc_feature (115)..(685): Homolog of NCBI NO: 34912722 NR Description: putative cell division protein FtsH protease-like
  misc_feature (679)..(799): Homolog of NCBI NO: 34912722 NR Description: putative cell division protein FtsH protease-like
  misc_feature (195)..(784): Homolog of NCBI NO: 18401040 NR Description: FtsH protease, putative [Arabidopsis thaliana]
  misc_feature (198)..(798): Homolog of NCBI NO: 30526336 NR Description: putative FtsH protease [Lycopersicon esculentum]
  misc_feature (220)..(784): Homolog of NCBI NO: 7488430 NR Description: probable YME1 ATP-dependant proteinase [imported]
  misc_feature (278)..(803): Homolog of NCBI NO: 23509838 NR Description: hypothetical protein, conserved [Plasmodium
  misc_feature (172)..(237): Homolog of NCBI NO: 23509838 NR Description: hypothetical protein, conserved [Plasmodium
  misc_feature (311)..(803): Homolog of NCBI NO: 23479426 NR Description: ATP-dependent metalloprotease FtsH, putative
  misc_feature (174)..(296): Homolog of NCBI NO: 23479426 NR Description: ATP-dependent metalloprotease FtsH, putative
  misc_feature (356)..(794): Homolog of NCBI NO: 7305635 NR Description: YME1-like 1; ATP-dependent metalloprotease FtsH1

SEQ ID NO: 99583 - protein, 663 aa, Arabidopsis thaliana; identical to SEQ ID NO: 21133
  peptide (1)..(663): Ceres Seq. ID no. 13603258
  misc_feature (443)..(640): Pfam Name: Peptidase family M41 Pfam Description: Peptidase family M41
  misc_feature (1)..(542): Homolog of NCBI NO: 34912722 NR Description: putative cell division protein FtsH protease-like
  misc_feature (536)..(656): Homolog of NCBI NO: 34912722 NR Description: putative cell division protein FtsH protease-like
  misc_feature (52)..(641): Homolog of NCBI NO: 18401040 NR Description: FtsH protease, putative [Arabidopsis thaliana]
  misc_feature (55)..(655): Homolog of NCBI NO: 30526336 NR Description: putative FtsH protease [Lycopersicon esculentum]
  misc_feature (77)..(641): Homolog of NCBI NO: 7488430 NR Description: probable YME1 ATP-dependant proteinase [imported]
  misc_feature (135)..(660): Homolog of NCBI NO: 23509838 NR Description: hypothetical protein, conserved [Plasmodium
  misc_feature (29)..(94): Homolog of NCBI NO: 23509838 NR Description: hypothetical protein, conserved [Plasmodium
  misc_feature (168)..(660): Homolog of NCBI NO: 23479426 NR Description: ATP-dependent metalloprotease FtsH, putative
  misc_feature (31)..(153): Homolog of NCBI NO: 23479426 NR Description: ATP-dependent metalloprotease FtsH, putative
  misc_feature (213)..(651): Homolog of NCBI NO: 7305635 NR Description: YME1-like 1; ATP-dependent metalloprotease FtsH1

SEQ ID NO: 99584 - DNA, 1146 bp, Arabidopsis thaliana
  misc_feature (1)..(1146): Ceres Seq. ID no. 13603263
  misc_feature: MA Experiment ID: 108462 Result: Down-regulated in Transcription
  misc_feature: MA Experiment 108462 PARAMETER Experiment Name: At_Germinating_Seeds_cDNA_P Parameter: Age (day) Value: 2 vs. 0
  misc_feature: MA Experiment 108462 PARAMETER Experiment Name: At_Germinating_Seeds_cDNA_P Parameter: Tissue Value: Germinating Seeds
  misc_feature: MA Experiment ID: 108463 Result: Down-regulated in Transcription
  misc_feature: MA Experiment 108463 PARAMETER Experiment Name: At_Germinating_Seeds_cDNA_P Parameter: Age (day) Value: 3 vs. 0
  misc_feature: MA Experiment 108463 PARAMETER Experiment Name: At_Germinating_Seeds_cDNA_P Parameter: Tissue Value: Germinating Seeds
  misc_feature: MA Experiment ID: 108464 Result: Down-regulated in Transcription
  misc_feature: MA Experiment 108464 PARAMETER Experiment Name: At_Germinating_Seeds_cDNA_P Parameter: Age (day) Value: 4 vs. 0
  misc_feature: MA Experiment 108464 PARAMETER Experiment Name: At_Germinating_Seeds_cDNA_P Parameter: Tissue Value: Germinating Seeds
  misc_feature: MA Experiment ID: 20000087 Result: Down-regulated in Transcription
  misc_feature: MA Experiment 20000087 PARAMETER Experiment Name: At_100uM_ABA_Mutants_cDNA_P Parameter: Plant Line Value: WS
  misc_feature: MA Experiment 20000087 PARAMETER Experiment Name: At_100uM_ABA_Mutants_cDNA_P Parameter: Timepoint (hr) Value: 6
  misc_feature: MA Experiment 20000087 PARAMETER Experiment Name: At_100uM_ABA_Mutants_cDNA_P Parameter: Tissue Value: Aerial
  misc_feature: MA Experiment 20000087 PARAMETER Experiment Name: At_100uM_ABA_Mutants_cDNA_P Parameter: Treatment Value: 100uM ABA vs. No Treatment
  misc_feature: MA Experiment ID: 20000573 Result: Down-regulated in Transcription
  misc_feature: MA Experiment 20000573 PARAMETER Experiment Name: At_100uM_ABA_Mutants__P Parameter: Organism Value: A. thaliana
  misc_feature: MA Experiment 20000573 PARAMETER Experiment Name: At_100uM_ABA_Mutants__P Parameter: Plant Line Value: CS22 vs. Ler wt
  misc_feature: MA Experiment 20000573 PARAMETER Experiment Name: At_100uM_ABA_Mutants__P Parameter: Timepoint (hr) Value: N/A
  misc_feature: MA Experiment 20000573 PARAMETER Experiment Name: At_100uM_ABA_Mutants__P Parameter: Tissue Value: Whole Plant
  misc_feature: MA Experiment 20000573 PARAMETER Experiment Name: At_100uM_ABA_Mutants__P Parameter: Treatment Value: None
  misc_feature: MA Experiment ID: 20001248 Result: Down-regulated in Transcription
  misc_feature: MA Experiment 20001248 PARAMETER Experiment Name: At_Far-red-induction_P Parameter: Age (day) Value: 7
  misc_feature: MA Experiment 20001248 PARAMETER Experiment Name: At_Far-red-induction_P Parameter: Light Value: Far-red vs. White
  misc_feature: MA Experiment 20001248 PARAMETER Experiment Name: At_Far-red-induction_P Parameter: Organism Value: A. thaliana
  misc_feature: MA Experiment 20001248 PARAMETER Experiment Name: At_Far-red-induction_P Parameter: Plant Line Value: Columbia
  misc_feature: MA Experiment 20001248 PARAMETER Experiment Name: At_Far-red-induction_P Parameter: Timepoint (hr) Value: 4
  misc_feature: MA Experiment 20001248 PARAMETER Experiment Name: At_Far-red-induction_P Parameter: Tissue Value: Whole Plant
acaattaaagtgagaattttcctgaagaagaagaacttttgctttttttctgggtttgcttttttgttgtgtcaatgaaatgggagaaatggagatcgaagaaatcgaagctgttcttgagaaaatctgggatctacatgacaagcttagcgatgagattcacttgatttcgaagtctcactttctcaaatcggttaaaccttcaaatagatcggagaagagaaagaatcctcacggaaattccggcgaagataagcgacctggttatgttttcatcaaaggattcgccgtcgatgataacgactccacgattcaggaggcgaagagtcttaacgcaattcgaaccgctcttgagaaccttgaagaccagctcgagtttttccatactatacatacacagcagcgaacagagaaagatgttgcgattgctcggcttgaacagagcaggatattactagcaatgagattagctgaacaccacggcaagaactatggagtcctagaggaagctcttgcatttgttgggagcattaaatccaactcgcattacgtttcacctgatcacctctacgattcctctcgaaacccagacggagcaaactctattccagatggaatagagtcaaactttgtaatcaacgcctttgcctcgactttcgggtttgccaagagagcacttggattcaaccatgtgaaaggcgtacttggaaacgctgctatatttgccataagcgtggtcgctatgctacatcttcaccaagtggctactagtgaacatcatctgcagaagaaagaagacagattctacagaagccaacaaaggaaaacatacggaagagataagtcttcagctgacagaagtttggatcacttggacgtaatgatggctcgtggttaagaccagagatcgaacttgtctacacgtgagaaaactaaagaagagaagagataattgttgctctcataggtttcgatattatcagcaaaaggataagaatttggaggcaaagtgttggaattttctgagctcgtctgatgcaaatattgttcctttcttctaattttgattttcaaacactgtggttaatgttttgtttgttttgtttggttttgttgatttcaaatgtggttaggctttcttgtaaa

SEQ ID NO: 99585 - protein, 272 aa, Arabidopsis thaliana
  peptide (1)..(272): Ceres Seq. ID no. 13603264
  misc_feature (1)..(272): Homolog of NCBI NO: 15238704 NR Description: expressed protein [Arabidopsis thaliana] gb|AAD26950.1~gene_id:K19E1.8~similar to unknown protein
  misc_feature (4)..(272): Homolog of NCBI NO: 21592900 NR Description: unknown [Arabidopsis thaliana]
  misc_feature (4)..(272): Homolog of NCBI NO: 34904152 NR Description: P0417G05.19 [Oryza sativa (japonica
MGEMEIEEIEAVLEKIWDLHDKLSDEIHLISKSHFLKSVKPSNRSEKRKNPHGNSGEDKRPGYVFIKGFAVDDNDSTIQEAKSLNAIRTALENLEDQLEFFHTIHTQQRTEKDVAIARLEQSRILLAMRLAEHHGKNYGVLEEALAFVGSIKSNSHYVSPDHLYDSSRNPDGANSIPDGIESNFVINAFASTFGFAKRALGFNHVKGVLGNAAIFAISVVAMLHLHQVATSEHHLQKKEDRFYRSQQRKTYGRDKSSADRSLDHLDVMMARG

SEQ ID NO: 99586 - protein, 269 aa, Arabidopsis thaliana
  peptide (1)..(269): Ceres Seq. ID no. 13603265
  misc_feature (1)..(269): Homolog of NCBI NO: 15238704 NR Description: expressed protein [Arabidopsis thaliana] gb|AAD26950.1~gene_id:K19E1.8~similar to unknown protein
  misc_feature (1)..(269): Homolog of NCBI NO: 21592900 NR Description: unknown [Arabidopsis thaliana]
  misc_feature (1)..(269): Homolog of NCBI NO: 34904152 NR Description: P0417G05.19 [Oryza sativa (japonica
MEIEEIEAVLEKIWDLHDKLSDEIHLISKSHFLKSVKPSNRSEKRKNPHGNSGEDKRPGYVFIKGFAVDDNDSTIQEAKSLNAIRTALENLEDQLEFFHTIHTQQRTEKDVAIARLEQSRILLAMRLAEHHGKNYGVLEEALAFVGSIKSNSHYVSPDHLYDSSRNPDGANSIPDGIESNFVINAFASTFGFAKRALGFNHVKGVLGNAAIFAISVVAMLHLHQVATSEHHLQKKEDRFYRSQQRKTYGRDKSSADRSLDHLDVMMARG

SEQ ID NO: 99587 - protein, 145 aa, Arabidopsis thaliana
  peptide (1)..(145): Ceres Seq. ID no. 13603266
  misc_feature (1)..(145): Homolog of NCBI NO: 15238704 NR Description: expressed protein [Arabidopsis thaliana] gb|AAD26950.1~gene_id:K19E1.8~similar to unknown protein
  misc_feature (1)..(145): Homolog of NCBI NO: 21592900 NR Description: unknown [Arabidopsis thaliana]
  misc_feature (1)..(145): Homolog of NCBI NO: 34904152 NR Description: P0417G05.19 [Oryza sativa (japonica
MRLAEHHGKNYGVLEEALAFVGSIKSNSHYVSPDHLYDSSRNPDGANSIPDGIESNFVINAFASTFGFAKRALGFNHVKGVLGNAAIFAISVVAMLHLHQVATSEHHLQKKEDRFYRSQQRKTYGRDKSSADRSLDHLDVMMARG

SEQ ID NO: 99588 - DNA, 1600 bp, Arabidopsis thaliana
  misc_feature (1)..(1600): Ceres Seq. ID no. 13603271
  misc_feature: MA Experiment ID: 108461 Result: Up-regulated in Transcription
  misc_feature: MA Experiment 108461 PARAMETER Experiment Name: At_Germinating_Seeds_cDNA_P Parameter: Age (day) Value: 1 vs. 0
  misc_feature: MA Experiment 108461 PARAMETER Experiment Name: At_Germinating_Seeds_cDNA_P Parameter: Tissue Value: Germinating Seeds
  misc_feature: MA Experiment ID: 20000113 Result: Down-regulated in Transcription
  misc_feature: MA Experiment 20000113 PARAMETER Experiment Name: At_42deg_Heat_cDNA_P Parameter: Temperature (deg C) Value: 42 vs. 22
  misc_feature: MA Experiment 20000113 PARAMETER Experiment Name: At_42deg_Heat_cDNA_P Parameter: Timepoint (hr) Value: 8
  misc_feature: MA Experiment 20000113 PARAMETER Experiment Name: At_42deg_Heat_cDNA_P Parameter: Tissue Value: Aerial
  misc_feature: MA Experiment ID: 20000173 Result: Down-regulated in Transcription
  misc_feature: MA Experiment 20000173 PARAMETER Experiment Name: At_42deg_Heat_P Parameter: Age (day) Value: 14
  misc_feature: MA Experiment 20000173 PARAMETER Experiment Name: At_42deg_Heat_P Parameter: Organism Value: A. thaliana
  misc_feature: MA Experiment 20000173 PARAMETER Experiment Name: At_42deg_Heat_P Parameter: Plant Line Value: WS
  misc_feature: MA Experiment 20000173 PARAMETER Experiment Name: At_42deg_Heat_P Parameter: Temperature (deg C) Value: 42 vs. 22
  misc_feature: MA Experiment 20000173 PARAMETER Experiment Name: At_42deg_Heat_P Parameter: Timepoint (hr) Value: 6
  misc_feature: MA Experiment 20000173 PARAMETER Experiment Name: At_42deg_Heat_P Parameter: Tissue Value: Aerial
  misc_feature: MA Experiment ID: 20000180 Result: Up-regulated in Transcription
  misc_feature: MA Experiment 20000180 PARAMETER Experiment Name: At_Germinating_Seeds_P Parameter: Age (hr) Value: 24 vs. 0
  misc_feature: MA Experiment 20000180 PARAMETER Experiment Name: At_Germinating_Seeds_P Parameter: Tissue Value: Germinating Seeds
  misc_feature: MA Experiment ID: 20000184 Result: Down-regulated in Transcription
  misc_feature: MA Experiment 20000184 PARAMETER Experiment Name: At_Shoots__P Parameter: Age (day) Value: 7
  misc_feature: MA Experiment 20000184 PARAMETER Experiment Name: At_Shoots__P Parameter: Tissue Value: Shoots vs. Whole Plant
  misc_feature: MA Experiment ID: 20000227 Result: Up-regulated in Transcription
  misc_feature: MA Experiment 20000227 PARAMETER Experiment Name: At_Root-Tips-vs-Tops_P Parameter: Tissue Value: Root Tips vs. Root Tops
  misc_feature: MA Experiment ID: 20000234 Result: Up-regulated in Transcription
  misc_feature: MA Experiment 20000234 PARAMETER Experiment Name: At_Siliques_P Parameter: Age (day) Value: 21
  misc_feature: MA Experiment 20000234 PARAMETER Experiment Name: At_Siliques_P Parameter: Organism Value: A. thaliana
  misc_feature: MA Experiment 20000234 PARAMETER Experiment Name: At_Siliques_P Parameter: Plant Line Value: WS
  misc_feature: MA Experiment 20000234 PARAMETER Experiment Name: At_Siliques_P Parameter: Tissue Value: Less Than 5mm Siliques vs. Whole Plant
  misc_feature: MA Experiment ID: 20000235 Result: Up-regulated in Transcription
  misc_feature: MA Experiment 20000235 PARAMETER Experiment Name: At_Siliques_P Parameter: Age (day) Value: 21
  misc_feature: MA Experiment 20000235 PARAMETER Experiment Name: At_Siliques_P Parameter: Organism Value: A. thaliana
  misc_feature: MA Experiment 20000235 PARAMETER Experiment Name: At_Siliques_P Parameter: Plant Line Value: WS
  misc_feature: MA Experiment 20000235 PARAMETER Experiment Name: At_Siliques_P Parameter: Tissue Value: 5-10mm Siliques vs. Whole Plant
  misc_feature: MA Experiment ID: 20000264 Result: Up-regulated in Transcription
  misc_feature: MA Experiment 20000264 PARAMETER Experiment Name: At_Open_Flower_P Parameter: Age (day) Value: 21
  misc_feature: MA Experiment 20000264 PARAMETER Experiment Name: At_Open_Flower_P Parameter: Plant Line Value: WS
  misc_feature: MA Experiment 20000264 PARAMETER Experiment Name: At_Open_Flower_P Parameter: Tissue Value: Open Flower vs. Whole Plant
  misc_feature: MA Experiment ID: 20000265 Result: Up-regulated in Transcription
  misc_feature: MA Experiment 20000265 PARAMETER Experiment Name: At_Open_Flower_P Parameter: Age (day) Value: 21
  misc_feature: MA Experiment 20000265 PARAMETER Experiment Name: At_Open_Flower_P Parameter: Plant Line Value: WS
  misc_feature: MA Experiment 20000265 PARAMETER Experiment Name: At_Open_Flower_P Parameter: Tissue Value: Closed Flower vs. Whole Plant
  misc_feature: MA Experiment ID: 20000286 Result: Up-regulated in Transcription
  misc_feature: MA Experiment 20000286 PARAMETER Experiment Name: At_Open_Flower_P Parameter: Age (day) Value: 21
  misc_feature: MA Experiment 20000286 PARAMETER Experiment Name: At_Open_Flower_P Parameter: Plant Line Value: WS
  misc_feature: MA Experiment 20000286 PARAMETER Experiment Name: At_Open_Flower_P Parameter: Tissue Value: Half Open vs. Whole Plant
  misc_feature: MA Experiment ID: 20000794 Result: Up-regulated in Transcription
  misc_feature: MA Experiment 20000794 PARAMETER Experiment Name: At_Petals_P Parameter: Age (day) Value: 23-25 days
  misc_feature: MA Experiment 20000794 PARAMETER Experiment Name: At_Petals_P Parameter: Plant Line Value: WS
  misc_feature: MA Experiment 20000794 PARAMETER Experiment Name: At_Petals_P Parameter: Tissue Value: Petals vs. Whole plant
atcagagagactaggtttggtaattgatcagaaagtaattaagaagatcacacaaaattgacatcccaaaaactaatccgataaaaatcataaatctcaacggcactctcttctcttgtctctccttatttctcaatccagattccaatttttctcagcgaagtgagtgatctcgccgtttgtgttccgctggtgaatcatcaccggagaattgcagatccaatgatacattcctaatcggttttattttgagtgacgacgaatcattggatccagaaaatccgatttctggagatttgaattagtgaaatttgatcgaatttcgacagtgaagaggcatttgcgtctgattgctttgactaagagatctgattttggatctatttcaatggcgaggaaagggtcgagtataagattatcgagctcgagaatatcaacccttttgctctttatgtttgcaacttttgcttccttctatgtagcaggccgtttatggcaagaatctcaaactagggttcatctaatcaatgagctcgatagagtaaccggacaggggaaatctgctatatcagtggatgatactttgaagatcatagcttgcagggaacagaagaagacactagcagctcttgagatggaattaagttcagctaggcaagaaggctttgtttcaaaaagtcccaaacttgctgatggaactgaaaccaagaaaagaccgttagtggttatcgggataatgacaagtttgggtaacaagaagaagagggatgcagttcgtcaagcatggatggggactggtgcatcacttaaaaaacttgaaagtgaaaagggtgtgattgcaagatttgttattggaagaagtgcaaataaaggggacagcatggacaagagcattgatactgaaaatagtcaaaccgatgacttcattattctcgatgatgtagttgaggcacccgaggaagcttctaagaaggtaaaactgttctttgcctacgctgcagataggtgggatgcacagttttatgcaaaagccatcgacaatatctacgtaaatatagatgctctgggaactacgcttgcagcacatctggaaaacccacgggcttacatcggttgcatgaaatcaggcgaagtcttctcagaaccgaaccacaaatggtatgaaccagagtggtggaaattcggtgacaagaaagcatacttccggcatgcttatggggagatgtatgttataacgcacgcattggctagatttgtatcgatcaatagagacattcttcattcgtatgctcatgatgacgtcagcacgggttcatggtttgtgggtcttgatgttaagcatgtagatgaaggaaagttttgctgttctgcgtggtcctcagaagccatatgcgcaggagtgtagtagaaccaaagacgaatccaaagtgtgaggctcttggctctttggtgcttatagagaaagaagaacaaatgacatttgtctgaacttgccattttattggcattgcattatacgaagtctaggatttggatgtgggaatagatattcttaccgacaaacgttaaactccaaaaaaaataatcattcatttacagc

SEQ ID NO: 99589 - protein, 338 aa, Arabidopsis thaliana; identical to SEQ ID NO: 26027
  peptide (1)..(338): Ceres Seq. ID no. 13603272
  misc_feature (124)..(322): Pfam Name: Galactosyltransferase Pfam Description: Galactosyltransferase
  misc_feature (1)..(328): Homolog of NCBI NO: 9759181 NR Description: Avr9 elicitor response protein-like [Arabidopsis
  misc_feature (1)..(338): Homolog of NCBI NO: 18423501 NR Description: galactosyltransferase family [Arabidopsis
  misc_feature (1)..(336): Homolog of NCBI NO: 20372915 NR Description: beta 1,3-glycosyltransferase-like protein I
  misc_feature (3)..(338): Homolog of NCBI NO: 40253477 NR Description: putative Avr9 elicitor response protein [Oryza
  misc_feature (15)..(331): Homolog of NCBI NO: 22553068 NR Description: beta 1,3-glycosyltransferase-like protein I
  misc_feature (1)..(336): Homolog of NCBI NO: 34898462 NR Description: ESTs D47620(S13223),AU029621(E31157) correspond a region of the predicted gene.~Similar to Arabidopsis thaliana
  misc_feature (3)..(336): Homolog of NCBI NO: 15236681 NR Description: galactosyltransferase family [Arabidopsis >gi|15292683|gb|AAK92710.1| unknown protein [Arabidopsis >gi|21281129|gb|AAM44999.1| unknown protein [Arabidopsis
  misc_feature (4)..(328): Homolog of NCBI NO: 15224704 NR Description: galactosyltransferase family [Arabidopsis
  misc_feature (55)..(336): Homolog of NCBI NO: 26451702 NR Description: unknown protein [Arabidopsis thaliana]
  misc_feature (10)..(326): Homolog of NCBI NO: 15223337 NR Description: galactosyltransferase family [Arabidopsis

SEQ ID NO: 99590 - protein, 317 aa, Arabidopsis thaliana; identical to SEQ ID NO: 26028
  peptide (1)..(317): Ceres Seq. ID no. 13603273
  misc_feature (103)..(301): Pfam Name: Galactosyltransferase Pfam Description: Galactosyltransferase
  misc_feature (1)..(307): Homolog of NCBI NO: 9759181 NR Description: Avr9 elicitor response protein-like [Arabidopsis
  misc_feature (1)..(317): Homolog of NCBI NO: 18423501 NR Description: galactosyltransferase family [Arabidopsis
  misc_feature (1)..(315): Homolog of NCBI NO: 20372915 NR Description: beta 1,3-glycosyltransferase-like protein I
  misc_feature (1)..(317): Homolog of NCBI NO: 40253477 NR Description: putative Avr9 elicitor response protein [Oryza
  misc_feature (1)..(310): Homolog of NCBI NO: 22553068 NR Description: beta 1,3-glycosyltransferase-like protein I
  misc_feature (1)..(315): Homolog of NCBI NO: 34898462 NR Description: ESTs D47620(S13223),AU029621(E31157) correspond a region of the predicted gene.~Similar to Arabidopsis thaliana
  misc_feature (1)..(315): Homolog of NCBI NO: 15236681 NR Description: galactosyltransferase family [Arabidopsis >gi|15292683|gb|AAK92710.1| unknown protein [Arabidopsis >gi|21281129|gb|AAM44999.1| unknown protein [Arabidopsis
  misc_feature (1)..(307): Homolog of NCBI NO: 15224704 NR Description: galactosyltransferase family [Arabidopsis
  misc_feature (34)..(315): Homolog of NCBI NO: 26451702 NR Description: unknown protein [Arabidopsis thaliana]
  misc_feature (1)..(305): Homolog of NCBI NO: 15223337 NR Description: galactosyltransferase family [Arabidopsis

SEQ ID NO: 99591 - protein, 256 aa, Arabidopsis thaliana; identical to SEQ ID NO: 77663
  peptide (1)..(256): Ceres Seq. ID no. 13603274
  misc_feature (42)..(240): Pfam Name: Galactosyltransferase Pfam Description: Galactosyltransferase
  misc_feature (1)..(246): Homolog of NCBI NO: 9759181 NR Description: Avr9 elicitor response protein-like [Arabidopsis
  misc_feature (1)..(256): Homolog of NCBI NO: 18423501 NR Description: galactosyltransferase family [Arabidopsis
  misc_feature (1)..(254): Homolog of NCBI NO: 20372915 NR Description: beta 1,3-glycosyltransferase-like protein I
  misc_feature (1)..(256): Homolog of NCBI NO: 40253477 NR Description: putative Avr9 elicitor response protein [Oryza
  misc_feature (1)..(249): Homolog of NCBI NO: 22553068 NR Description: beta 1,3-glycosyltransferase-like protein I
  misc_feature (1)..(254): Homolog of NCBI NO: 34898462 NR Description: ESTs D47620(S13223),AU029621(E31157) correspond a region of the predicted gene.~Similar to Arabidopsis thaliana
  misc_feature (1)..(254): Homolog of NCBI NO: 15236681 NR Description: galactosyltransferase family [Arabidopsis >gi|15292683|gb|AAK92710.1| unknown protein [Arabidopsis >gi|21281129|gb|AAM44999.1| unknown protein [Arabidopsis
  misc_feature (1)..(246): Homolog of NCBI NO: 15224704 NR Description: galactosyltransferase family [Arabidopsis
  misc_feature (1)..(254): Homolog of NCBI NO: 26451702 NR Description: unknown protein [Arabidopsis thaliana]
  misc_feature (1)..(244): Homolog of NCBI NO: 15223337 NR Description: galactosyltransferase family [Arabidopsis

SEQ ID NO: 99592 - DNA, 1663 bp, Arabidopsis thaliana
  misc_feature (1)..(1663): Ceres Seq. ID no. 13603279
  misc_feature: MA Experiment ID: 108435 Result: Up-regulated in Transcription
  misc_feature: MA Experiment 108435 PARAMETER Experiment Name: At_stm_Mutants_cDNA_P Parameter: Plant Line Value: wt Landsburg vs stm
  misc_feature: MA Experiment 108435 PARAMETER Experiment Name: At_stm_Mutants_cDNA_P Parameter: Tissue Value: Shoot Apical Meristem Region
  misc_feature: MA Experiment ID: 20000264 Result: Up-regulated in Transcription
  misc_feature: MA Experiment 20000264 PARAMETER Experiment Name: At_Open_Flower_P Parameter: Age (day) Value: 21
  misc_feature: MA Experiment 20000264 PARAMETER Experiment Name: At_Open_Flower_P Parameter: Plant Line Value: WS
  misc_feature: MA Experiment 20000264 PARAMETER Experiment Name: At_Open_Flower_P Parameter: Tissue Value: Open Flower vs. Whole Plant
  misc_feature: MA Experiment ID: 20000265 Result: Up-regulated in Transcription
  misc_feature: MA Experiment 20000265 PARAMETER Experiment Name: At_Open_Flower_P Parameter: Age (day) Value: 21
  misc_feature: MA Experiment 20000265 PARAMETER Experiment Name: At_Open_Flower_P Parameter: Plant Line Value: WS
  misc_feature: MA Experiment 20000265 PARAMETER Experiment Name: At_Open_Flower_P Parameter: Tissue Value: Closed Flower vs. Whole Plant
  misc_feature: MA Experiment ID: 20000286 Result: Up-regulated in Transcription
  misc_feature: MA Experiment 20000286 PARAMETER Experiment Name: At_Open_Flower_P Parameter: Age (day) Value: 21
  misc_feature: MA Experiment 20000286 PARAMETER Experiment Name: At_Open_Flower_P Parameter: Plant Line Value: WS
  misc_feature: MA Experiment 20000286 PARAMETER Experiment Name: At_Open_Flower_P Parameter: Tissue Value: Half Open vs. Whole Plant
  misc_feature: MA Experiment ID: 20000443 Result: Down-regulated in Transcription
  misc_feature: MA Experiment 20000443 PARAMETER Experiment Name: At_1uM_BR-BRZ__P Parameter: Tissue Value: Shoot Apices
  misc_feature: MA Experiment 20000443 PARAMETER Experiment Name: At_1uM_BR-BRZ__P Parameter: Treatment Value: 1uM BRZ vs. No Treatment
  misc_feature: MA Experiment ID: 20001910 Result: Down-regulated in Transcription
  misc_feature: MA Experiment 20001910 PARAMETER Experiment Name: At_Drought_Reproduction_P Parameter: Age (day) Value: 37
  misc_feature: MA Experiment 20001910 PARAMETER Experiment Name: At_Drought_Reproduction_P Parameter: Organism Value: A. thaliana
  misc_feature: MA Experiment 20001910 PARAMETER Experiment Name: At_Drought_Reproduction_P Parameter: Plant Line Value: WS
  misc_feature: MA Experiment 20001910 PARAMETER Experiment Name: At_Drought_Reproduction_P Parameter: Timepoint (day) Value: 7
  misc_feature: MA Experiment 20001910 PARAMETER Experiment Name: At_Drought_Reproduction_P Parameter: Tissue Value: Flowers
  misc_feature: MA Experiment 20001910 PARAMETER Experiment Name: At_Drought_Reproduction_P Parameter: Treatment Value: Drought vs. No Drought
atgggtgaagacaagaagacggcaagggagacggtggaggaggaaccacttagcccatgttcacggctgttcaattcgccggattttaactgtgcaataatcgttacaatgggatctaaagttaaaggagacacaccagccatcatccacggccttgaacacaccctcgtaaaccaccctcgcttctctagcattttagagatgaacaatgggaagaagccgcgttgggttcggacaaaagttaaagtagaagagcatgtgattgttcctgatgtggatcccgacattgaaaatccggatcagtatcttgaagactatatctctaagttaacgaccattcctatggatttgtctaaaccattatgggaaatgcacttactaggcgtcaaaacatcgaacgctgaatcctatgctattctcaagatccatcattctttgggtgatggaatgtctctcatgtctcttttactggcttgtacccgcaaaacatcagaccccgaggctttgcctaccgttgcggttcataaaaaacgctttggaccgagctgcaacagcgggtttttcaacaagatttggtggttatttgtagggctctggttcatcctaagattgctattcaacacttttgttgatatcttaatgtttgctcttacaatatttgtcttgagggatacggagactcctctcttggccaaacccggtagtgaacttatccctaagaggttcgtccaccggattatcagttttgacgatgttaagctggtgaaaaacgcaatgaaaatgacggtgaacgatgttcttcttggagtaacgcaagccggactttcgcgttaccttagtcgaaaatatgatcaagaagcaacaccgaaatcgaaagagtccatgaggagaatccgacttcgttcagccattatgattaacttgagaccaaacgcaggaattgaggctctagcggatatgatggccaagaaatcaaaatgcagatggggaaatctcttcggctacattctcctaccgttctccgttgggctagagaccgatcctctagaatacgtgcgccaagctaaagccacgattgaccgcaagaaacactctctagaagccgtattctccatggcattctttaaattgatactaaaagttcttgggctcaaggcaagtgtagttcttgtaaggaaagtgatccatagcacaacgttatcattttcaaatgtggtcggtccaaaggaagaaattacattccatggtcacccactgaattatatctccccatgtgtttttggccacccacatgctcttactctacatttccagacctacgcgaacaaggtcataatatcggtaacggctgatccaacggtcattcctgaccctcacaagatgtgtgatgatttggtggagtctctcaagatgattaaagccgctgttcttgaaagagggttatatgagattgaggtctaactaaagctcttttgttgtggatcacaatgtggattcgcccgtttcttctttgtctacggctcctcaatgattactctaaattgataccttaggaagttattattataataactagacatattgatataaaaaagttgtaagacatcaagttaaaattttaagcatgtagtgtatcattttaatagatactaattcacttccg

SEQ ID NO: 99593 - protein, 486 aa, Arabidopsis thaliana
  peptide (1)..(486): Ceres Seq. ID no. 13603280
  misc_feature (13)..(301): Pfam Name: Condensation domain Pfam Description: Condensation domain
  misc_feature (1)..(486): Homolog of NCBI NO: 30696326 NR Description: expressed protein [Arabidopsis thaliana]
  misc_feature (1)..(486): Homolog of NCBI NO: 26451548 NR Description: unknown protein [Arabidopsis thaliana]
  misc_feature (1)..(486): Homolog of NCBI NO: 9759186 NR Description: emb|CAB66399.1~gene_id:K19E1.19~strong similarity
  misc_feature (6)..(486): Homolog of NCBI NO: 30687731 NR Description: hypothetical protein [Arabidopsis thaliana]
  misc_feature (7)..(479): Homolog of NCBI NO: 15229103 NR Description: hypothetical protein [Arabidopsis thaliana]
  misc_feature (9)..(486): Homolog of NCBI NO: 15218351 NR Description: expressed protein [Arabidopsis thaliana]
  misc_feature (10)..(479): Homolog of NCBI NO: 15229102 NR Description: expressed protein [Arabidopsis thaliana]
  misc_feature (10)..(486): Homolog of NCBI NO: 9758716 NR Description: emb|CAB66398.1~gene_id:MNJ8.9~strong similarity
  misc_feature (10)..(486): Homolog of NCBI NO: 18421632 NR Description: expressed protein [Arabidopsis thaliana]
  misc_feature (4)..(481): Homolog of NCBI NO: 15242259 NR Description: hypothetical protein [Arabidopsis thaliana] emb|CAB66399.1~gene_id:MQJ16.3~strong similarity to unknown
MGEDKKTARETVEEEPLSPCSRLFNSPDFNCAIIVTMGSKVKGDTPAIIHGLEHTLVNHPRFSSILEMNNGKKPRWVRTKVKVEEHVIVPDVDPDIENPDQYLEDYISKLTTIPMDLSKPLWEMHLLGVKTSNAESYAILKIHHSLGDGMSLMSLLLACTRKTSDPEALPTVAVHKKRFGPSCNSGFFNKIWWLFVGLWFILRLLFNTFVDILMFALTIFVLRDTETPLLAKPGSELIPKRFVHRIISFDDVKLVKNAMKMTVNDVLLGVTQAGLSRYLSRKYDQEATPKSKESMRRIRLRSAIMINLRPNAGIEALADMMAKKSKCRWGNLFGYILLPFSVGLETDPLEYVRQAKATIDRKKHSLEAVFSMAFFKLILKVLGLKASVVLVRKVIHSTTLSFSNVVGPKEEITFHGHPLNYISPCVFGHPHALTLHFQTYANKVIISVTADPTVIPDPHKMCDDLVESLKMIKAAVLERGLYEIEV

SEQ ID NO: 99594 - protein, 450 aa, Arabidopsis thaliana
  peptide (1)..(450): Ceres Seq. ID no. 13603281
  misc_feature (1)..(265): Pfam Name: Condensation domain Pfam Description: Condensation domain
  misc_feature (1)..(450): Homolog of NCBI NO: 30696326 NR Description: expressed protein [Arabidopsis thaliana]
  misc_feature (1)..(450): Homolog of NCBI NO: 26451548 NR Description: unknown protein [Arabidopsis thaliana]
  misc_feature (1)..(450): Homolog of NCBI NO: 9759186 NR Description: emb|CAB66399.1~gene_id:K19E1.19~strong similarity
  misc_feature (1)..(450): Homolog of NCBI NO: 30687731 NR Description: hypothetical protein [Arabidopsis thaliana]
  misc_feature (1)..(443): Homolog of NCBI NO: 15229103 NR Description: hypothetical protein [Arabidopsis thaliana]
  misc_feature (1)..(450): Homolog of NCBI NO: 15218351 NR Description: expressed protein [Arabidopsis thaliana]
  misc_feature (1)..(443): Homolog of NCBI NO: 15229102 NR Description: expressed protein [Arabidopsis thaliana]
  misc_feature (1)..(450): Homolog of NCBI NO: 9758716 NR Description: emb|CAB66398.1~gene_id:MNJ8.9~strong similarity
  misc_feature (1)..(450): Homolog of NCBI NO: 18421632 NR Description: expressed protein [Arabidopsis thaliana]
  misc_feature (1)..(445): Homolog of NCBI NO: 15242259 NR Description: hypothetical protein [Arabidopsis thaliana] emb|CAB66399.1~gene_id:MQJ16.3~strong similarity to unknown
MGSKVKGDTPAIIHGLEHTLVNHPRFSSILEMNNGKKPRWVRTKVKVEEHVIVPDVDPDIENPDQYLEDYISKLTTIPMDLSKPLWEMHLLGVKTSNAESYAILKIHHSLGDGMSLMSLLLACTRKTSDPEALPTVAVHKKRFGPSCNSGFFNKIWWLFVGLWFILRLLFNTFVDILMFALTIFVLRDTETPLLAKPGSELIPKRFVHRIISFDDVKLVKNAMKMTVNDVLLGVTQAGLSRYLSRKYDQEATPKSKESMRRIRLRSAIMINLRPNAGIEALADMMAKKSKCRWGNLFGYILLPFSVGLETDPLEYVRQAKATIDRKKHSLEAVFSMAFFKLILKVLGLKASVVLVRKVIHSTTLSFSNVVGPKEEITFHGHPLNYISPCVFGHPHALTLHFQTYANKVIISVTADPTVIPDPHKMCDDLVESLKMIKAAVLERGLYEIEV

SEQ ID NO: 99595 - protein, 419 aa, Arabidopsis thaliana; identical to SEQ ID NO: 72929
  peptide (1)..(419): Ceres Seq. ID no. 13603282
  misc_feature (1)..(234): Pfam Name: Condensation domain Pfam Description: Condensation domain
  misc_feature (1)..(419): Homolog of NCBI NO: 30696326 NR Description: expressed protein [Arabidopsis thaliana]
  misc_feature (1)..(419): Homolog of NCBI NO: 26451548 NR Description: unknown protein [Arabidopsis thaliana]
  misc_feature (1)..(419): Homolog of NCBI NO: 9759186 NR Description: emb|CAB66399.1~gene_id:K19E1.19~strong similarity
  misc_feature (1)..(419): Homolog of NCBI NO: 30687731 NR Description: hypothetical protein [Arabidopsis thaliana]
  misc_feature (1)..(412): Homolog of NCBI NO: 15229103 NR Description: hypothetical protein [Arabidopsis thaliana]
  misc_feature (1)..(419): Homolog of NCBI NO: 15218351 NR Description: expressed protein [Arabidopsis thaliana]
  misc_feature (1)..(412): Homolog of NCBI NO: 15229102 NR Description: expressed protein [Arabidopsis thaliana]
  misc_feature (1)..(419): Homolog of NCBI NO: 9758716 NR Description: emb|CAB66398.1~gene_id:MNJ8.9~strong similarity
  misc_feature (1)..(419): Homolog of NCBI NO: 18421632 NR Description: expressed protein [Arabidopsis thaliana]
  misc_feature (1)..(414): Homolog of NCBI NO: 15242259 NR Description: hypothetical protein [Arabidopsis thaliana] emb|CAB66399.1~gene_id:MQJ16.3~strong similarity to unknown

SEQ ID NO: 99596 - DNA, 1225 bp, Arabidopsis thaliana
  misc_feature (1)..(1225): Ceres Seq. ID no. 13603283
  misc_feature: MA Experiment ID: 108434 Result: Up-regulated in Transcription
  misc_feature: MA Experiment 108434 PARAMETER Experiment Name: At_Root_Tips_cDNA_P Parameter: Tissue Value: Root Tips
  misc_feature: MA Experiment ID: 108461 Result: Down-regulated in Transcription
  misc_feature: MA Experiment 108461 PARAMETER Experiment Name: At_Germinating_Seeds_cDNA_P Parameter: Age (day) Value: 1 vs. 0
  misc_feature: MA Experiment 108461 PARAMETER Experiment Name: At_Germinating_Seeds_cDNA_P Parameter: Tissue Value: Germinating Seeds
  misc_feature: MA Experiment ID: 108462 Result: Down-regulated in Transcription
  misc_feature: MA Experiment 108462 PARAMETER Experiment Name: At_Germinating_Seeds_cDNA_P Parameter: Age (day) Value: 2 vs. 0
  misc_feature: MA Experiment 108462 PARAMETER Experiment Name: At_Germinating_Seeds_cDNA_P Parameter: Tissue Value: Germinating Seeds
  misc_feature: MA Experiment ID: 108463 Result: Down-regulated in Transcription
  misc_feature: MA Experiment 108463 PARAMETER Experiment Name: At_Germinating_Seeds_cDNA_P Parameter: Age (day) Value: 3 vs. 0
  misc_feature: MA Experiment 108463 PARAMETER Experiment Name: At_Germinating_Seeds_cDNA_P Parameter: Tissue Value: Germinating Seeds
  misc_feature: MA Experiment ID: 108464 Result: Down-regulated in Transcription
  misc_feature: MA Experiment 108464 PARAMETER Experiment Name: At_Germinating_Seeds_cDNA_P Parameter: Age (day) Value: 4 vs. 0
  misc_feature: MA Experiment 108464 PARAMETER Experiment Name: At_Germinating_Seeds_cDNA_P Parameter: Tissue Value: Germinating Seeds
  misc_feature: MA Experiment ID: 108576 Result: Up-regulated in Transcription
  misc_feature: MA Experiment 108576 PARAMETER Experiment Name: At_42deg_Heat_cDNA_P Parameter: Temperature (deg C) Value: 42 vs. 22
  misc_feature: MA Experiment 108576 PARAMETER Experiment Name: At_42deg_Heat_cDNA_P Parameter: Timepoint (hr) Value: 1
  misc_feature: MA Experiment 108576 PARAMETER Experiment Name: At_42deg_Heat_cDNA_P Parameter: Tissue Value: Aerial
  misc_feature: MA Experiment ID: 108577 Result: Up-regulated in Transcription
  misc_feature: MA Experiment 108577 PARAMETER Experiment Name: At_42deg_Heat_cDNA_P Parameter: Temperature (deg C) Value: 42 vs. 22
  misc_feature: MA Experiment 108577 PARAMETER Experiment Name: At_42deg_Heat_cDNA_P Parameter: Timepoint (hr) Value: 6
  misc_feature: MA Experiment 108577 PARAMETER Experiment Name: At_42deg_Heat_cDNA_P Parameter: Tissue Value: Aerial
  misc_feature: MA Experiment ID: 20000093 Result: Up-regulated in Transcription
  misc_feature: MA Experiment 20000093 PARAMETER Experiment Name: At_42deg_Heat_cDNA_P Parameter: Temperature (deg C) Value: 42 vs. 22
  misc_feature: MA Experiment 20000093 PARAMETER Experiment Name: At_42deg_Heat_cDNA_P Parameter: Timepoint (hr) Value: 0.5
  misc_feature: MA Experiment 20000093 PARAMETER Experiment Name: At_42deg_Heat_cDNA_P Parameter: Tissue Value: Aerial
  misc_feature: MA Experiment ID: 20000111 Result: Up-regulated in Transcription
  misc_feature: MA Experiment 20000111 PARAMETER Experiment Name: At_42deg_Heat_cDNA_P Parameter: Temperature (deg C) Value: 42 vs. 22
  misc_feature: MA Experiment 20000111 PARAMETER Experiment Name: At_42deg_Heat_cDNA_P Parameter: Timepoint (hr) Value: 6
  misc_feature: MA Experiment 20000111 PARAMETER Experiment Name: At_42deg_Heat_cDNA_P Parameter: Tissue Value: Aerial
  misc_feature: MA Experiment ID: 20000112 Result: Up-regulated in Transcription
  misc_feature: MA Experiment 20000112 PARAMETER Experiment Name: At_42deg_Heat_cDNA_P Parameter: Temperature (deg C) Value: 42 vs. 22
  misc_feature: MA Experiment 20000112 PARAMETER Experiment Name: At_42deg_Heat_cDNA_P Parameter: Timepoint (hr) Value: 2
  misc_feature: MA Experiment 20000112 PARAMETER Experiment Name: At_42deg_Heat_cDNA_P Parameter: Tissue Value: Aerial
  misc_feature: MA Experiment ID: 20000113 Result: Up-regulated in Transcription
  misc_feature: MA Experiment 20000113 PARAMETER Experiment Name: At_42deg_Heat_cDNA_P Parameter: Temperature (deg C) Value: 42 vs. 22
  misc_feature: MA Experiment 20000113 PARAMETER Experiment Name: At_42deg_Heat_cDNA_P Parameter: Timepoint (hr) Value: 8
  misc_feature: MA Experiment 20000113 PARAMETER Experiment Name: At_42deg_Heat_cDNA_P Parameter: Tissue Value: Aerial
  misc_feature: MA Experiment ID: 20000144 Result: Up-regulated in Transcription
  misc_feature: MA Experiment 20000144 PARAMETER Experiment Name: At_42deg_Heat_cDNA_P Parameter: Temperature (deg C) Value: 42 vs. 22
  misc_feature: MA Experiment 20000144 PARAMETER Experiment Name: At_42deg_Heat_cDNA_P Parameter: Timepoint (hr) Value: 1
  misc_feature: MA Experiment 20000144 PARAMETER Experiment Name: At_42deg_Heat_cDNA_P Parameter: Tissue Value: Aerial
  misc_feature: MA Experiment ID: 20000171 Result: Up-regulated in Transcription
  misc_feature: MA Experiment 20000171 PARAMETER Experiment Name: At_42deg_Heat_P Parameter: Age (day) Value: 14
  misc_feature: MA Experiment 20000171 PARAMETER Experiment Name: At_42deg_Heat_P Parameter: Organism Value: A. thaliana
  misc_feature: MA Experiment 20000171 PARAMETER Experiment Name: At_42deg_Heat_P Parameter: Plant Line Value: WS
  misc_feature: MA Experiment 20000171 PARAMETER Experiment Name: At_42deg_Heat_P Parameter: Temperature (deg C) Value: 42 vs. 22
  misc_feature: MA Experiment 20000171 PARAMETER Experiment Name: At_42deg_Heat_P Parameter: Timepoint (hr) Value: 1
  misc_feature: MA Experiment 20000171 PARAMETER Experiment Name: At_42deg_Heat_P Parameter: Tissue Value: Aerial
  misc_feature: MA Experiment ID: 20000173 Result: Up-regulated in Transcription
  misc_feature: MA Experiment 20000173 PARAMETER Experiment Name: At_42deg_Heat_P Parameter: Age (day) Value: 14
  misc_feature: MA Experiment 20000173 PARAMETER Experiment Name: At_42deg_Heat_P Parameter: Organism Value: A. thaliana
  misc_feature: MA Experiment 20000173 PARAMETER Experiment Name: At_42deg_Heat_P Parameter: Plant Line Value: WS
  misc_feature: MA Experiment 20000173 PARAMETER Experiment Name: At_42deg_Heat_P Parameter: Temperature (deg C) Value: 42 vs. 22
  misc_feature: MA Experiment 20000173 PARAMETER Experiment Name: At_42deg_Heat_P Parameter: Timepoint (hr) Value: 6
  misc_feature: MA Experiment 20000173 PARAMETER Experiment Name: At_42deg_Heat_P Parameter: Tissue Value: Aerial
aatttccctatcaaagtgaatgactttcttctccaaaatcgatttctgaaacatcccatttcttgatttccctctttgtcgcaaacccaacaaagtagagcaaaaccctaaaacggaaaccttccatggcgattatctctgaggtagaagaagaaagcagtagcagccgacccatgatatttccctttagggcaacactcagttctgcaaacccattagggtttttggagaaagttttcgactttctcggagaacagagcgattttctcaagaaaccctccgcggaggacgagatcgtcgtcgcggttagggcggcgaaggagaagttgaaaaaggctgagaagaagaaagctgagaaggagagtgtgaagcctgtggagaagaaagccgagaaggaaattgttaagcttgtggagaagaaggtagagaaggagagtgtcaagccaactatagctgcttcaagtgctgagcctatagaagtggagaagcctaaggaggaagaggagaagaaggaatctggtcccattgttcctaacaaaggtaatggaactgatcttgagaactactcatggatccagaatctccaggaggttacagttaacattccagtgcctactgggactaaagcacggactgttgtatgtgagattaagaaaaaccgtctcaaggttggtctcaaaggccaggatccaatcgtcgatggggagctctaccgatctgtgaagcctgatgactgctactggaatatcgaggatcaaaaggtgatttcgattctcttgactaagtctgatcagatggagtggtggaaatgctgtgtgaaaggtgaacctgaaatcgatactcagaaagttgaaccagagactagtaaattaggtgaccttgatccagaaactcgctcgactgttgagaaaatgatgtttgatcaaaggcaaaagcagatgggtcttccaacaagcgaggagctacagaagcaagagatccttaagaaattcatgtctgagcatccggagatggacttctcaaatgcaaagtttaactgatgctcgtatcgtccagtctctctgccaaaaaagaaaaaccagtttttgcatcttcaccagtttttaaaagcttgttacttttgtttagtttctcatttctgaatacatagttcggtttatgtccctagctttatgattctctggtttttattgaaactttttctgaaaaaaaaaactgttttctc

SEQ ID NO: 99597 - protein, 304 aa, Arabidopsis thaliana
  peptide (1)..(304): Ceres Seq. ID no. 13603284
  misc_feature (137)..(288): Pfam Name: Nuclear movement protein Pfam Description: Nuclear movement protein
  misc_feature (1)..(304): Homolog of NCBI NO: 15238732 NR Description: expressed protein [Arabidopsis thaliana] contains similarity to nuclear movement protein [Arabidopsis thaliana] >gi|27765036|gb|AAO23639.1| At5g53400
  misc_feature (1)..(304): Homolog of NCBI NO: 21593329 NR Description: unknown [Arabidopsis thaliana]
  misc_feature (1)..(304): Homolog of NCBI NO: 15234308 NR Description: expressed protein [Arabidopsis thaliana]
  misc_feature (1)..(304): Homolog of NCBI NO: 30524691 NR Description: salt tolerance protein 5 [Beta vulgaris]
  misc_feature (65)..(304): Homolog of NCBI NO: 6754910 NR Description: nuclear distribution gene C homolog [Mus >gi|20846655|ref|XP_124402.1| nuclear distribution gene C homolog musculus] >gi|2654358|emb|CAA75677.1| MNUDC protein [Mus
  misc_feature (65)..(304): Homolog of NCBI NO: 8394272 NR Description: nuclear distribution gene C homolog [Rattus
  misc_feature (10)..(304): Homolog of NCBI NO: 8101760 NR Description: putative nuclear movement protein PNUDC
  misc_feature (65)..(304): Homolog of NCBI NO: 5729953 NR Description: nuclear distribution gene C homolog (A. nuclear distribution gene C (A.nidulans) homolog [Homo sapiens] nuclear distribution protein C (A.nidulans) homolog [Homo
  misc_feature (61)..(304): Homolog of NCBI NO: 21356395 NR Description: CG9710-PA [Drosophila melanogaster]
  misc_feature (65)..(304): Homolog of NCBI NO: 12052969 NR Description: hypothetical protein [Homo sapiens]
MAIISEVEEESSSSRPMIFPFRATLSSANPLGFLEKVFDFLGEQSDFLKKPSAEDEIVVAVRAAKEKLKKAEKKKAEKESVKPVEKKAEKEIVKLVEKKVEKESVKPTIAASSAEPIEVEKPKEEEEKKESGPIVPNKGNGTDLENYSWIQNLQEVTVNIPVPTGTKARTVVCEIKKNRLKVGLKGQDPIVDGELYRSVKPDDCYWNIEDQKVISILLTKSDQMEWWKCCVKGEPEIDTQKVEPETSKLGDLDPETRSTVEKMMFDQRQKQMGLPTSEELQKQEILKKFMSEHPEMDFSNAKFN

SEQ ID NO: 99598 - protein, 288 aa, Arabidopsis thaliana
  peptide (1)..(288): Ceres Seq. ID no. 13603285
  misc_feature (121)..(272): Pfam Name: Nuclear movement protein Pfam Description: Nuclear movement protein
  misc_feature (1)..(288): Homolog of NCBI NO: 15238732 NR Description: expressed protein [Arabidopsis thaliana] contains similarity to nuclear movement protein [Arabidopsis thaliana] >gi|27765036|gb|AAO23639.1| At5g53400
  misc_feature (1)..(288): Homolog of NCBI NO: 21593329 NR Description: unknown [Arabidopsis thaliana]
  misc_feature (1)..(288): Homolog of NCBI NO: 15234308 NR Description: expressed protein [Arabidopsis thaliana]
  misc_feature (1)..(288): Homolog of NCBI NO: 30524691 NR Description: salt tolerance protein 5 [Beta vulgaris]
  misc_feature (49)..(288): Homolog of NCBI NO: 6754910 NR Description: nuclear distribution gene C homolog [Mus >gi|20846655|ref|XP_124402.1| nuclear distribution gene C homolog musculus] >gi|2654358|emb|CAA75677.1| MNUDC protein [Mus
  misc_feature (49)..(288): Homolog of NCBI NO: 8394272 NR Description: nuclear distribution gene C homolog [Rattus
  misc_feature (1)..(288): Homolog of NCBI NO: 8101760 NR Description: putative nuclear movement protein PNUDC
  misc_feature (49)..(288): Homolog of NCBI NO: 5729953 NR Description: nuclear distribution gene C homolog (A. nuclear distribution gene C (A.nidulans) homolog [Homo sapiens] nuclear distribution protein C (A.nidulans) homolog [Homo
  misc_feature (45)..(288): Homolog of NCBI NO: 21356395 NR Description: CG9710-PA [Drosophila melanogaster]
  misc_feature (49)..(288): Homolog of NCBI NO: 12052969 NR Description: hypothetical protein [Homo sapiens]
MIFPFRATLSSANPLGFLEKVFDFLGEQSDFLKKPSAEDEIVVAVRAAKEKLKKAEKKKAEKESVKPVEKKAEKEIVKLVEKKVEKESVKPTIAASSAEPIEVEKPKEEEEKKESGPIVPNKGNGTDLENYSWIQNLQEVTVNIPVPTGTKARTVVCEIKKNRLKVGLKGQDPIVDGELYRSVKPDDCYWNIEDQKVISILLTKSDQMEWWKCCVKGEPEIDTQKVEPETSKLGDLDPETRSTVEKMMFDQRQKQMGLPTSEELQKQEILKKFMSEHPEMDFSNAKFN

SEQ ID NO: 99599 - DNA, 1743 bp, Arabidopsis thaliana
  misc_feature (1)..(1743): Ceres Seq. ID no. 13603290
  misc_feature: MA Experiment ID: 108434 Result: Up-regulated in Transcription
  misc_feature: MA Experiment 108434 PARAMETER Experiment Name: At_Root_Tips_cDNA_P Parameter: Tissue Value: Root Tips
  misc_feature: MA Experiment ID: 108577 Result: Down-regulated in Transcription
  misc_feature: MA Experiment 108577 PARAMETER Experiment Name: At_42deg_Heat_cDNA_P Parameter: Temperature (deg C) Value: 42 vs. 22
  misc_feature: MA Experiment 108577 PARAMETER Experiment Name: At_42deg_Heat_cDNA_P Parameter: Timepoint (hr) Value: 6
  misc_feature: MA Experiment 108577 PARAMETER Experiment Name: At_42deg_Heat_cDNA_P Parameter: Tissue Value: Aerial
  misc_feature: MA Experiment ID: 108579 Result: Down-regulated in Transcription
  misc_feature: MA Experiment 108579 PARAMETER Experiment Name: At_4deg_Cold_cDNA_P Parameter: Temperature (deg C) Value: 4 vs. 22
  misc_feature: MA Experiment 108579 PARAMETER Experiment Name: At_4deg_Cold_cDNA_P Parameter: Timepoint (hr) Value: 6
  misc_feature: MA Experiment 108579 PARAMETER Experiment Name: At_4deg_Cold_cDNA_P Parameter: Tissue Value: Aerial
  misc_feature: MA Experiment ID: 108609 Result: Down-regulated in Transcription
  misc_feature: MA Experiment 108609 PARAMETER Experiment Name: At_100uM_ABA_cDNA_P Parameter: Timepoint (hr) Value: 24
  misc_feature: MA Experiment 108609 PARAMETER Experiment Name: At_100uM_ABA_cDNA_P Parameter: Tissue Value: Aerial
  misc_feature: MA Experiment 108609 PARAMETER Experiment Name: At_100uM_ABA_cDNA_P Parameter: Treatment Value: 100uM ABA vs. No Treatment
  misc_feature: MA Experiment ID: 20000069 Result: Down-regulated in Transcription
  misc_feature: MA Experiment 20000069 PARAMETER Experiment Name: At_100uM_ABA_Mutants_cDNA_P Parameter: Plant Line Value: CS23
  misc_feature: MA Experiment 20000069 PARAMETER Experiment Name: At_100uM_ABA_Mutants_cDNA_P Parameter: Timepoint (hr) Value: 6
  misc_feature: MA Experiment 20000069 PARAMETER Experiment Name: At_100uM_ABA_Mutants_cDNA_P Parameter: Tissue Value: Aerial
  misc_feature: MA Experiment 20000069 PARAMETER Experiment Name: At_100uM_ABA_Mutants_cDNA_P Parameter: Treatment Value: 100uM ABA vs. No Treatment
  misc_feature: MA Experiment ID: 20000071 Result: Down-regulated in Transcription
  misc_feature: MA Experiment 20000071 PARAMETER Experiment Name: At_100uM_ABA_Mutants_cDNA_P Parameter: Plant Line Value: CS8104
  misc_feature: MA Experiment 20000071 PARAMETER Experiment Name: At_100uM_ABA_Mutants_cDNA_P Parameter: Timepoint (hr) Value: 6
  misc_feature: MA Experiment 20000071 PARAMETER Experiment Name: At_100uM_ABA_Mutants_cDNA_P Parameter: Tissue Value: Aerial
  misc_feature: MA Experiment 20000071 PARAMETER Experiment Name: At_100uM_ABA_Mutants_cDNA_P Parameter: Treatment Value: 100uM ABA vs. No Treatment
  misc_feature: MA Experiment ID: 20000072 Result: Down-regulated in Transcription
  misc_feature: MA Experiment 20000072 PARAMETER Experiment Name: At_100uM_ABA_Mutants_cDNA_P Parameter: Plant Line Value: CS8105
  misc_feature: MA Experiment 20000072 PARAMETER Experiment Name: At_100uM_ABA_Mutants_cDNA_P Parameter: Timepoint (hr) Value: 6
  misc_feature: MA Experiment 20000072 PARAMETER Experiment Name: At_100uM_ABA_Mutants_cDNA_P Parameter: Tissue Value: Aerial
  misc_feature: MA Experiment 20000072 PARAMETER Experiment Name: At_100uM_ABA_Mutants_cDNA_P Parameter: Treatment Value: 100uM ABA vs. No Treatment
  misc_feature: MA Experiment ID: 20000086 Result: Down-regulated in Transcription
  misc_feature: MA Experiment 20000086 PARAMETER Experiment Name: At_100uM_ABA_Mutants_cDNA_P Parameter: Plant Line Value: CS22
  misc_feature: MA Experiment 20000086 PARAMETER Experiment Name: At_100uM_ABA_Mutants_cDNA_P Parameter: Timepoint (hr) Value: 6
  misc_feature: MA Experiment 20000086 PARAMETER Experiment Name: At_100uM_ABA_Mutants_cDNA_P Parameter: Tissue Value: Aerial
  misc_feature: MA Experiment 20000086 PARAMETER Experiment Name: At_100uM_ABA_Mutants_cDNA_P Parameter: Treatment Value: 100uM ABA vs. No Treatment
  misc_feature: MA Experiment ID: 20000111 Result: Down-regulated in Transcription
  misc_feature: MA Experiment 20000111 PARAMETER Experiment Name: At_42deg_Heat_cDNA_P Parameter: Temperature (deg C) Value: 42 vs. 22
  misc_feature: MA Experiment 20000111 PARAMETER Experiment Name: At_42deg_Heat_cDNA_P Parameter: Timepoint (hr) Value: 6
  misc_feature: MA Experiment 20000111 PARAMETER Experiment Name: At_42deg_Heat_cDNA_P Parameter: Tissue Value: Aerial
  misc_feature: MA Experiment ID: 20000113 Result: Down-regulated in Transcription
  misc_feature: MA Experiment 20000113 PARAMETER Experiment Name: At_42deg_Heat_cDNA_P Parameter: Temperature (deg C) Value: 42 vs. 22
  misc_feature: MA Experiment 20000113 PARAMETER Experiment Name: At_42deg_Heat_cDNA_P Parameter: Timepoint (hr) Value: 8
  misc_feature: MA Experiment 20000113 PARAMETER Experiment Name: At_42deg_Heat_cDNA_P Parameter: Tissue Value: Aerial
  misc_feature: MA Experiment ID: 20000117 Result: Down-regulated in Transcription
  misc_feature: MA Experiment 20000117 PARAMETER Experiment Name: At_100uM_ABA_Mutants_cDNA_P Parameter: Plant Line Value: Columbia
  misc_feature: MA Experiment 20000117 PARAMETER Experiment Name: At_100uM_ABA_Mutants_cDNA_P Parameter: Timepoint (hr) Value: 6
  misc_feature: MA Experiment 20000117 PARAMETER Experiment Name: At_100uM_ABA_Mutants_cDNA_P Parameter: Tissue Value: Aerial
  misc_feature: MA Experiment 20000117 PARAMETER Experiment Name: At_100uM_ABA_Mutants_cDNA_P Parameter: Treatment Value: 100uM ABA vs. No Treatment
  misc_feature: MA Experiment ID: 20000144 Result: Down-regulated in Transcription
  misc_feature: MA Experiment 20000144 PARAMETER Experiment Name: At_42deg_Heat_cDNA_P Parameter: Temperature (deg C) Value: 42 vs. 22
  misc_feature: MA Experiment 20000144 PARAMETER Experiment Name: At_42deg_Heat_cDNA_P Parameter: Timepoint (hr) Value: 1
  misc_feature: MA Experiment 20000144 PARAMETER Experiment Name: At_42deg_Heat_cDNA_P Parameter: Tissue Value: Aerial
  misc_feature: MA Experiment ID: 20000173 Result: Down-regulated in Transcription
  misc_feature: MA Experiment 20000173 PARAMETER Experiment Name: At_42deg_Heat_P Parameter: Age (day) Value: 14
  misc_feature: MA Experiment 20000173 PARAMETER Experiment Name: At_42deg_Heat_P Parameter: Organism Value: A. thaliana
  misc_feature: MA Experiment 20000173 PARAMETER Experiment Name: At_42deg_Heat_P Parameter: Plant Line Value: WS
  misc_feature: MA Experiment 20000173 PARAMETER Experiment Name: At_42deg_Heat_P Parameter: Temperature (deg C) Value: 42 vs. 22
  misc_feature: MA Experiment 20000173 PARAMETER Experiment Name: At_42deg_Heat_P Parameter: Timepoint (hr) Value: 6
  misc_feature: MA Experiment 20000173 PARAMETER Experiment Name: At_42deg_Heat_P Parameter: Tissue Value: Aerial
  misc_feature: MA Experiment ID: 20000184 Result: Up-regulated in Transcription
  misc_feature: MA Experiment 20000184 PARAMETER Experiment Name: At_Shoots__P Parameter: Age (day) Value: 7
  misc_feature: MA Experiment 20000184 PARAMETER Experiment Name: At_Shoots__P Parameter: Tissue Value: Shoots vs. Whole Plant
  misc_feature: MA Experiment ID: 20000265 Result: Up-regulated in Transcription
  misc_feature: MA Experiment 20000265 PARAMETER Experiment Name: At_Open_Flower_P Parameter: Age (day) Value: 21
  misc_feature: MA Experiment 20000265 PARAMETER Experiment Name: At_Open_Flower_P Parameter: Plant Line Value: WS
  misc_feature: MA Experiment 20000265 PARAMETER Experiment Name: At_Open_Flower_P Parameter: Tissue Value: Closed Flower vs. Whole Plant
  misc_feature: MA Experiment ID: 20000573 Result: Down-regulated in Transcription
  misc_feature: MA Experiment 20000573 PARAMETER Experiment Name: At_100uM_ABA_Mutants__P Parameter: Organism Value: A. thaliana
  misc_feature: MA Experiment 20000573 PARAMETER Experiment Name: At_100uM_ABA_Mutants__P Parameter: Plant Line Value: CS22 vs. Ler wt
  misc_feature: MA Experiment 20000573 PARAMETER Experiment Name: At_100uM_ABA_Mutants__P Parameter: Timepoint (hr) Value: N/A
  misc_feature: MA Experiment 20000573 PARAMETER Experiment Name: At_100uM_ABA_Mutants__P Parameter: Tissue Value: Whole Plant
  misc_feature: MA Experiment 20000573 PARAMETER Experiment Name: At_100uM_ABA_Mutants__P Parameter: Treatment Value: None
  misc_feature: MA Experiment ID: 20001757 Result: Up-regulated in Transcription
  misc_feature: MA Experiment 20001757 PARAMETER Experiment Name: At_50mM_NH4NO3_L-to-H_P Parameter: Timepoint (hr) Value: 6
  misc_feature: MA Experiment 20001757 PARAMETER Experiment Name: At_50mM_NH4NO3_L-to-H_P Parameter: Tissue Value: Leaf
  misc_feature: MA Experiment 20001757 PARAMETER Experiment Name: At_50mM_NH4NO3_L-to-H_P Parameter: Treatment Value: 50mM NH4NO3 vs 100mM Mannitol
agagaagaaatagagagagaggccacaaggcacacacaagtcagtatcccacgtgcatctgggaactcgacccctctcctctgccacaacccactcttcatttctctctttctccaccaatctctctttctctctctcaaaagaagagaaactaataattctcaaaagctcacacacagaaacagaggaatctataaggaagttttggtttttggttatcaacaatggtggaagcaaaagatcaagatatgggtgatggtatgcaatgtataaaccatccatttactaaaaacccaggtgggatctgtgctttttgtcttcaagaaaagcttggaaagcttgtaacttcatctttcccacttcctaaacacctcacttcctcttcaacttcttcttctccttccttcagatctgactctgttggtagcacaaccactgcctctgccgcaaatctctcagcgtctctttctctctctgtctccggagcaacaaacaacaacaacagcaagcttccgtttttgttagctaagaagaagaagaagatgcttactgcttcttcttcttcttcgaccacggctaatattgtctacaagagaagtcaatctacaaggactacgaagacaacgtacggagattcagatttgagcccgagaaagagaaatgggttttggtccttttttcatctctactcttcgaaacaacatggtagcagtaagaaagttggaaactttcatcaacccataagccagactgagacaaaaacagagttggcagagactacaacagtgggatcttcgtcttcttcgtcagcttcttcttcaatgtcaaagagagttgttggtggtggtgggagtagtagtaacagaaacggtattgatgtgattgttgaagaagatggaagtcctaacattgaagtcacaccaagtgagaggaaagtgtcgagatctagatctgttgggtgtggaagtagaagcttctctggtgatttctttgagaggatcacaaatgggtttggagattgtactttgagaagagttgagtcacagagagaaggtaataataacaaaggtaacaaggtcagtagtaaccctagtaatggtgttagagagatggtgagatgtggtgggatctttggtgggtttatgataatgacgtcatcgtcttcttcttcatcttcatcatcatgggtatcatcatcatcagctgaacatcatcatcatcataatcataacatgggtcatggtggtggaggaaggaacagaagctggggatggtcatttgcaagtccaatgagagcttttacttcttcttcttactctggtaaaagaggccgtacaatttcagattctactacaagcaagaacacaactccaaacttgggtgcaattccttctttgttgtctgtcagaagctgaattaataataaactttgatctatgtgtttctaataagttcttaaacgagaaaatacatttaattagtttttatcattttcatcaatgtgtttatcttttttttaggtgttcttcaaatatttgttgatgctctttttgataatcttattagtattgtaatgtcacaccactcttctatgttcattatcatcttttgtcaaacaaggaacttaggatactttgagctactttttctgtttatttgtctttttctcttttgtttattttgatctttggattgattcctatgtctctttgaatgatctaatggtaaataaattggttttat

SEQ ID NO: 99600 - protein, 396 aa, Arabidopsis thaliana; identical to SEQ ID NO: 40793
  peptide (1)..(396): Ceres Seq. ID no. 13603291
  misc_feature (1)..(396): Homolog of NCBI NO: 18422990 NR Description: expressed protein [Arabidopsis thaliana] gene_id:K20J1.7~unknown protein [Arabidopsis thaliana] unknown protein [Arabidopsis thaliana]
  misc_feature (9)..(396): Homolog of NCBI NO: 21536969 NR Description: unknown [Arabidopsis thaliana]
  misc_feature (78)..(365): Homolog of NCBI NO: 32490296 NR Description: OSJNBa0042I15.1 [Oryza sativa (japonica
  misc_feature (78)..(365): Homolog of NCBI NO: 32487915 NR Description: OJ000315_02.19 [Oryza sativa (japonica
  misc_feature (35)..(367): Homolog of NCBI NO: 28828184 NR Description: similar to Leishmania major. Ppg3 [Dictyostelium
  misc_feature (51)..(345): Homolog of NCBI NO: 28828184 NR Description: similar to Leishmania major. Ppg3 [Dictyostelium
  misc_feature (30)..(396): Homolog of NCBI NO: 32477034 NR Description: hypothetical protein-signal peptide prediction
  misc_feature (66)..(386): Homolog of NCBI NO: 28828184 NR Description: similar to Leishmania major. Ppg3 [Dictyostelium
  misc_feature (70)..(384): Homolog of NCBI NO: 28828184 NR Description: similar to Leishmania major. Ppg3 [Dictyostelium
  misc_feature (39)..(382): Homolog of NCBI NO: 28828184 NR Description: similar to Leishmania major. Ppg3 [Dictyostelium

SEQ ID NO: 99601 - protein, 388 aa, Arabidopsis thaliana; identical to SEQ ID NO: 40794
  peptide (1)..(388): Ceres Seq. ID no. 13603292
  misc_feature (1)..(388): Homolog of NCBI NO: 18422990 NR Description: expressed protein [Arabidopsis thaliana] gene_id:K20J1.7~unknown protein [Arabidopsis thaliana] unknown protein [Arabidopsis thaliana]
  misc_feature (1)..(388): Homolog of NCBI NO: 21536969 NR Description: unknown [Arabidopsis thaliana]
  misc_feature (70)..(357): Homolog of NCBI NO: 32490296 NR Description: OSJNBa0042I15.1 [Oryza sativa (japonica
  misc_feature (70)..(357): Homolog of NCBI NO: 32487915 NR Description: OJ000315_02.19 [Oryza sativa (japonica
  misc_feature (27)..(359): Homolog of NCBI NO: 28828184 NR Description: similar to Leishmania major. Ppg3 [Dictyostelium
  misc_feature (43)..(337): Homolog of NCBI NO: 28828184 NR Description: similar to Leishmania major. Ppg3 [Dictyostelium
  misc_feature (22)..(388): Homolog of NCBI NO: 32477034 NR Description: hypothetical protein-signal peptide prediction
  misc_feature (58)..(378): Homolog of NCBI NO: 28828184 NR Description: similar to Leishmania major. Ppg3 [Dictyostelium
  misc_feature (62)..(376): Homolog of NCBI NO: 28828184 NR Description: similar to Leishmania major. Ppg3 [Dictyostelium
  misc_feature (31)..(374): Homolog of NCBI NO: 28828184 NR Description: similar to Leishmania major. Ppg3 [Dictyostelium

SEQ ID NO: 99602 - protein, 384 aa, Arabidopsis thaliana; identical to SEQ ID NO: 40795
  peptide (1)..(384): Ceres Seq. ID no. 13603293
  misc_feature (1)..(384): Homolog of NCBI NO: 18422990 NR Description: expressed protein [Arabidopsis thaliana] gene_id:K20J1.7~unknown protein [Arabidopsis thaliana] unknown protein [Arabidopsis thaliana]
  misc_feature (1)..(384): Homolog of NCBI NO: 21536969 NR Description: unknown [Arabidopsis thaliana]
  misc_feature (66)..(353): Homolog of NCBI NO: 32490296 NR Description: OSJNBa0042I15.1 [Oryza sativa (japonica
  misc_feature (66)..(353): Homolog of NCBI NO: 32487915 NR Description: OJ000315_02.19 [Oryza sativa (japonica
  misc_feature (23)..(355): Homolog of NCBI NO: 28828184 NR Description: similar to Leishmania major. Ppg3 [Dictyostelium
  misc_feature (39)..(333): Homolog of NCBI NO: 28828184 NR Description: similar to Leishmania major. Ppg3 [Dictyostelium
  misc_feature (18)..(384): Homolog of NCBI NO: 32477034 NR Description: hypothetical protein-signal peptide prediction
  misc_feature (54)..(374): Homolog of NCBI NO: 28828184 NR Description: similar to Leishmania major. Ppg3 [Dictyostelium
  misc_feature (58)..(372): Homolog of NCBI NO: 28828184 NR Description: similar to Leishmania major. Ppg3 [Dictyostelium
  misc_feature (27)..(370): Homolog of NCBI NO: 28828184 NR Description: similar to Leishmania major. Ppg3 [Dictyostelium

SEQ ID NO: 99603 - DNA, 1736 bp, Arabidopsis thaliana
  misc_feature (1)..(1736): Ceres Seq. ID no. 13603302
  misc_feature: MA Experiment ID: 108561 Result: Down-regulated in Transcription
  misc_feature: MA Experiment 108561 PARAMETER Experiment Name: At_100uM_ABA_cDNA_P Parameter: Timepoint (hr) Value: 6
  misc_feature: MA Experiment 108561 PARAMETER Experiment Name: At_100uM_ABA_cDNA_P Parameter: Tissue Value: Aerial
  misc_feature: MA Experiment 108561 PARAMETER Experiment Name: At_100uM_ABA_cDNA_P Parameter: Treatment Value: 100uM ABA vs. No Treatment
  misc_feature: MA Experiment ID: 108576 Result: Down-regulated in Transcription
  misc_feature: MA Experiment 108576 PARAMETER Experiment Name: At_42deg_Heat_cDNA_P Parameter: Temperature (deg C) Value: 42 vs. 22
  misc_feature: MA Experiment 108576 PARAMETER Experiment Name: At_42deg_Heat_cDNA_P Parameter: Timepoint (hr) Value: 1
  misc_feature: MA Experiment 108576 PARAMETER Experiment Name: At_42deg_Heat_cDNA_P Parameter: Tissue Value: Aerial
  misc_feature: MA Experiment ID: 108577 Result: Down-regulated in Transcription
  misc_feature: MA Experiment 108577 PARAMETER Experiment Name: At_42deg_Heat_cDNA_P Parameter: Temperature (deg C) Value: 42 vs. 22
  misc_feature: MA Experiment 108577 PARAMETER Experiment Name: At_42deg_Heat_cDNA_P Parameter: Timepoint (hr) Value: 6
  misc_feature: MA Experiment 108577 PARAMETER Experiment Name: At_42deg_Heat_cDNA_P Parameter: Tissue Value: Aerial
  misc_feature: MA Experiment ID: 108595 Result: Down-regulated in Transcription
  misc_feature: MA Experiment 108595 PARAMETER Experiment Name: At_Ler-pi_Ovule_cDNA_P Parameter: Plant Line Value: null
  misc_feature: MA Experiment ID: 108605 Result: Down-regulated in Transcription
  misc_feature: MA Experiment 108605 PARAMETER Experiment Name: At_100uM_ABA_cDNA_P Parameter: Timepoint (hr) Value: 6
  misc_feature: MA Experiment 108605 PARAMETER Experiment Name: At_100uM_ABA_cDNA_P Parameter: Tissue Value: Aerial
  misc_feature: MA Experiment 108605 PARAMETER Experiment Name: At_100uM_ABA_cDNA_P Parameter: Treatment Value: 100uM ABA vs. No Treatment
  misc_feature: MA Experiment ID: 108668 Result: Down-regulated in Transcription
  misc_feature: MA Experiment 108668 PARAMETER Experiment Name: At_2mM_SA_cDNA_P Parameter: Plant Line Value: WS
  misc_feature: MA Experiment 108668 PARAMETER Experiment Name: At_2mM_SA_cDNA_P Parameter: Timepoint (hr) Value: 6
  misc_feature: MA Experiment 108668 PARAMETER Experiment Name: At_2mM_SA_cDNA_P Parameter: Treatment Value: 2mM SA vs. No Treatment
  misc_feature: MA Experiment ID: 20000070 Result: Down-regulated in Transcription
  misc_feature: MA Experiment 20000070 PARAMETER Experiment Name: At_100uM_ABA_Mutants_cDNA_P Parameter: Plant Line Value: CS24
  misc_feature: MA Experiment 20000070 PARAMETER Experiment Name: At_100uM_ABA_Mutants_cDNA_P Parameter: Timepoint (hr) Value: 6
  misc_feature: MA Experiment 20000070 PARAMETER Experiment Name: At_100uM_ABA_Mutants_cDNA_P Parameter: Tissue Value: Aerial
  misc_feature: MA Experiment 20000070 PARAMETER Experiment Name: At_100uM_ABA_Mutants_cDNA_P Parameter: Treatment Value: 100uM ABA vs. No Treatment
  misc_feature: MA Experiment ID: 20000071 Result: Down-regulated in Transcription
  misc_feature: MA Experiment 20000071 PARAMETER Experiment Name: At_100uM_ABA_Mutants_cDNA_P Parameter: Plant Line Value: CS8104
  misc_feature: MA Experiment 20000071 PARAMETER Experiment Name: At_100uM_ABA_Mutants_cDNA_P Parameter: Timepoint (hr) Value: 6
  misc_feature: MA Experiment 20000071 PARAMETER Experiment Name: At_100uM_ABA_Mutants_cDNA_P Parameter: Tissue Value: Aerial
  misc_feature: MA Experiment 20000071 PARAMETER Experiment Name: At_100uM_ABA_Mutants_cDNA_P Parameter: Treatment Value: 100uM ABA vs. No Treatment
  misc_feature: MA Experiment ID: 20000111 Result: Down-regulated in Transcription
  misc_feature: MA Experiment 20000111 PARAMETER Experiment Name: At_42deg_Heat_cDNA_P Parameter: Temperature (deg C) Value: 42 vs. 22
  misc_feature: MA Experiment 20000111 PARAMETER Experiment Name: At_42deg_Heat_cDNA_P Parameter: Timepoint (hr) Value: 6
  misc_feature: MA Experiment 20000111 PARAMETER Experiment Name: At_42deg_Heat_cDNA_P Parameter: Tissue Value: Aerial
  misc_feature: MA Experiment ID: 20000112 Result: Down-regulated in Transcription
  misc_feature: MA Experiment 20000112 PARAMETER Experiment Name: At_42deg_Heat_cDNA_P Parameter: Temperature (deg C) Value: 42 vs. 22
  misc_feature: MA Experiment 20000112 PARAMETER Experiment Name: At_42deg_Heat_cDNA_P Parameter: Timepoint (hr) Value: 2
  misc_feature: MA Experiment 20000112 PARAMETER Experiment Name: At_42deg_Heat_cDNA_P Parameter: Tissue Value: Aerial
  misc_feature: MA Experiment ID: 20000113 Result: Down-regulated in Transcription
  misc_feature: MA Experiment 20000113 PARAMETER Experiment Name: At_42deg_Heat_cDNA_P Parameter: Temperature (deg C) Value: 42 vs. 22
  misc_feature: MA Experiment 20000113 PARAMETER Experiment Name: At_42deg_Heat_cDNA_P Parameter: Timepoint (hr) Value: 8
  misc_feature: MA Experiment 20000113 PARAMETER Experiment Name: At_42deg_Heat_cDNA_P Parameter: Tissue Value: Aerial
  misc_feature: MA Experiment ID: 20000117 Result: Down-regulated in Transcription
  misc_feature: MA Experiment 20000117 PARAMETER Experiment Name: At_100uM_ABA_Mutants_cDNA_P Parameter: Plant Line Value: Columbia
  misc_feature: MA Experiment 20000117 PARAMETER Experiment Name: At_100uM_ABA_Mutants_cDNA_P Parameter: Timepoint (hr) Value: 6
  misc_feature: MA Experiment 20000117 PARAMETER Experiment Name: At_100uM_ABA_Mutants_cDNA_P Parameter: Tissue Value: Aerial
  misc_feature: MA Experiment 20000117 PARAMETER Experiment Name: At_100uM_ABA_Mutants_cDNA_P Parameter: Treatment Value: 100uM ABA vs. No Treatment
  misc_feature: MA Experiment ID: 20000184 Result: Up-regulated in Transcription
  misc_feature: MA Experiment 20000184 PARAMETER Experiment Name: At_Shoots__P Parameter: Age (day) Value: 7
  misc_feature: MA Experiment 20000184 PARAMETER Experiment Name: At_Shoots__P Parameter: Tissue Value: Shoots vs. Whole Plant
  misc_feature: MA Experiment ID: 20001555 Result: Down-regulated in Transcription
  misc_feature: MA Experiment 20001555 PARAMETER Experiment Name: At_Drought_Soil_Dry_P Parameter: Age (day) Value: 24
  misc_feature: MA Experiment 20001555 PARAMETER Experiment Name: At_Drought_Soil_Dry_P Parameter: Organism Value: A. thaliana
  misc_feature: MA Experiment 20001555 PARAMETER Experiment Name: At_Drought_Soil_Dry_P Parameter: Plant Line Value: WS
  misc_feature: MA Experiment 20001555 PARAMETER Experiment Name: At_Drought_Soil_Dry_P Parameter: Post Timepoint (hr) Value: None
  misc_feature: MA Experiment 20001555 PARAMETER Experiment Name: At_Drought_Soil_Dry_P Parameter: Post-Treatment Value: None
  misc_feature: MA Experiment 20001555 PARAMETER Experiment Name: At_Drought_Soil_Dry_P Parameter: Timepoint (day) Value: 10
  misc_feature: MA Experiment 20001555 PARAMETER Experiment Name: At_Drought_Soil_Dry_P Parameter: Treatment Value: Drought vs. No Drought
ggtcattcttctttcttttcacttcttcttcttcttcgctcttcttctcactgtcgggttccatttggcgcgaaaagttcttcactttttccagcttttttttgttctctgacagtttttttttttgtttggttacaaataaagatgccagtaagtgtggcactagttttgctgttgacattgagcagtgtgattctgattaatgggagaagttacggcgtcggaaacatatgcgatcgtggtcggagaccgagcgagagaccacacagtgtcaaaatcactgattttggtgctgtgggagatgggaaaacgttgaacacacttgcgtttcaaaatgctgtcttttatctaaagtctttcgctgataaaggtggtgctcagctttatgttcctccgggacggtggctcaccggaagtttcaacctcaccagtcatctcactctctttctcgagaaagacgccgtcatacttgcctcacaggatccatcgcattggcaagtcacggatgccttaccgtcatatgggcggggtattgatctaccagggaagagatacatgagtttgataaacggtgacatgctacatgatgtagtagtaacaggtgataacggtaccatagatgggcaaggccttgtttggtgggatcggtttaattctcattctttagagtacagtcgccctcaccttgtcgagtttgtctctgccgaaaatgtcattgtatcaaatcttacattcttgaacgctccggcttatactatccattcagtttattgtcgcaatttatacattcatagagtaacggctaatacttgtccagaatctccttataccatcggtattgtcccagattcttctgaaaatgtgtgtatccaagaatctagtatcaacatggggtatgatgccatttctcttaaaagtggttgtgatgaatacggtttatcgtatgcaagacctactgctaatgtccagataagaaatgtttaccttagagcagcttctggttcctccatttcctttggtagtgaaatgtctggtggtatatctgatgttgaggtcagtgatgctcacatacacaactcgttatccgggattgcctttagaacaacaaatggaagaggtggttatattaaggagattgatatttccaacatccatatggttaatgttggtactgcatttctagccaacggtagcttcggtactcatccggattctggtttcgatgaaaatgcttacccgcttgtgagtcacatcaggttacatgacattgttggagaaaacataagcactgctggatatttctttggaacgaaagagtctcctttcacttcgattttgttatcgaatatctctctgtcgattaaaaactcggcttcccctgctgattcttggcaatgctcatatgttgacgggtcttcggaattcgtagtccctgaaccgtgccttgagctgaagagttttgatagttactatggtagagctgaggccttatgaaaccaaacttcattaggaatgatgattcatatttgtttaagagagagcaaatggttctgattcttttcttttccccaaaaataaaccacagtgtgtagaattattacctgttccttgttggtgttgttgtccctgttatttgcagcttgtgagattaatatatcttgtacaggttcatttcttcattcatgtgtaaccaaagaaattttgtattagcccagtaaccagatattaattttttt

SEQ ID NO: 99604 - protein, 497 aa, Arabidopsis thaliana
  peptide (1)..(497): Ceres Seq. ID no. 13603303
  misc_feature (123)..(481): Pfam Name: Glycosyl hydrolases family 28 Pfam Description: Glycosyl hydrolases family 28
  misc_feature (49)..(497): Homolog of NCBI NO: 22327662 NR Description: expressed protein [Arabidopsis thaliana] unknown protein [Arabidopsis thaliana]
  misc_feature (51)..(494): Homolog of NCBI NO: 30679999 NR Description: polygalacturonase, putative [Arabidopsis >gi|20260262|gb|AAM13029.1| unknown protein [Arabidopsis >gi|22136514|gb|AAM91335.1| unknown protein [Arabidopsis
  misc_feature (119)..(494): Homolog of NCBI NO: 21593399 NR Description: polygalacturonase-like protein [Arabidopsis
  misc_feature (119)..(494): Homolog of NCBI NO: 18397713 NR Description: polygalacturonase, putative [Arabidopsis >gi|30680007|ref|NP_850526.1| polygalacturonase, putative thaliana] >gi|7549636|gb|AAF63821.1| unknown protein [Arabidopsis
  misc_feature (47)..(489): Homolog of NCBI NO: 15228881 NR Description: polygalacturonase, putative [Arabidopsis >gi|14334802|gb|AAK59579.1| putative polygalacturonase thaliana] >gi|21280835|gb|AAM44924.1| putative polygalacturonase
  misc_feature (51)..(489): Homolog of NCBI NO: 7939578 NR Description: polygalacturonase-like protein [Arabidopsis
  misc_feature (49)..(489): Homolog of NCBI NO: 21553827 NR Description: polygalacturonase, putative [Arabidopsis thaliana]
  misc_feature (87)..(486): Homolog of NCBI NO: 40714685 NR Description: putative polygalacturonase [Oryza sativa
  misc_feature (57)..(485): Homolog of NCBI NO: 18412253 NR Description: polygalacturonase, putative [Arabidopsis >gi|11762132|gb|AAG40344.1|AF324992_1 AT3g62110 [Arabidopsis >gi|23397166|gb|AAN31866.1| unknown protein [Arabidopsis
  misc_feature (57)..(485): Homolog of NCBI NO: 11263971 NR Description: hypothetical protein T17J13.70 - Arabidopsis >gi|6899921|emb|CAB71871.1| putative protein [Arabidopsis
GHSSFFSLLLLLRSSSHCRVPFGAKSSSLFPAFFCSLTVFFFVWLQIKMPVSVALVLLLTLSSVILINGRSYGVGNICDRGRRPSERPHSVKITDFGAVGDGKTLNTLAFQNAVFYLKSFADKGGAQLYVPPGRWLTGSFNLTSHLTLFLEKDAVILASQDPSHWQVTDALPSYGRGIDLPGKRYMSLINGDMLHDVVVTGDNGTIDGQGLVWWDRFNSHSLEYSRPHLVEFVSAENVIVSNLTFLNAPAYTIHSVYCRNLYIHRVTANTCPESPYTIGIVPDSSENVCIQESSINMGYDAISLKSGCDEYGLSYARPTANVQIRNVYLRAASGSSISFGSEMSGGISDVEVSDAHIHNSLSGIAFRTTNGRGGYIKEIDISNIHMVNVGTAFLANGSFGTHPDSGFDENAYPLVSHIRLHDIVGENISTAGYFFGTKESPFTSILLSNISLSIKNSASPADSWQCSYVDGSSEFVVPEPCLELKSFDSYYGRAEAL

SEQ ID NO: 99605 - protein, 449 aa, Arabidopsis thaliana; identical to SEQ ID NO: 39155
  peptide (1)..(449): Ceres Seq. ID no. 13603304
  misc_feature (75)..(433): Pfam Name: Glycosyl hydrolases family 28 Pfam Description: Glycosyl hydrolases family 28
  misc_feature (1)..(449): Homolog of NCBI NO: 22327662 NR Description: expressed protein [Arabidopsis thaliana] unknown protein [Arabidopsis thaliana]
  misc_feature (3)..(446): Homolog of NCBI NO: 30679999 NR Description: polygalacturonase, putative [Arabidopsis >gi|20260262|gb|AAM13029.1| unknown protein [Arabidopsis >gi|22136514|gb|AAM91335.1| unknown protein [Arabidopsis
  misc_feature (71)..(446): Homolog of NCBI NO: 21593399 NR Description: polygalacturonase-like protein [Arabidopsis
  misc_feature (71)..(446): Homolog of NCBI NO: 18397713 NR Description: polygalacturonase, putative [Arabidopsis >gi|30680007|ref|NP_850526.1| polygalacturonase, putative thaliana] >gi|7549636|gb|AAF63821.1| unknown protein [Arabidopsis
  misc_feature (1)..(441): Homolog of NCBI NO: 15228881 NR Description: polygalacturonase, putative [Arabidopsis >gi|14334802|gb|AAK59579.1| putative polygalacturonase thaliana] >gi|21280835|gb|AAM44924.1| putative polygalacturonase
  misc_feature (3)..(441): Homolog of NCBI NO: 7939578 NR Description: polygalacturonase-like protein [Arabidopsis
  misc_feature (1)..(441): Homolog of NCBI NO: 21553827 NR Description: polygalacturonase, putative [Arabidopsis thaliana]
  misc_feature (39)..(438): Homolog of NCBI NO: 40714685 NR Description: putative polygalacturonase [Oryza sativa
  misc_feature (9)..(437): Homolog of NCBI NO: 18412253 NR Description: polygalacturonase, putative [Arabidopsis >gi|11762132|gb|AAG40344.1|AF324992_1 AT3g62110 [Arabidopsis >gi|23397166|gb|AAN31866.1| unknown protein [Arabidopsis
  misc_feature (9)..(437): Homolog of NCBI NO: 11263971 NR Description: hypothetical protein T17J13.70 - Arabidopsis >gi|6899921|emb|CAB71871.1| putative protein [Arabidopsis

SEQ ID NO: 99606 - protein, 312 aa, Arabidopsis thaliana; identical to SEQ ID NO: 39156
  peptide (1)..(312): Ceres Seq. ID no. 13603305
  misc_feature (1)..(296): Pfam Name: Glycosyl hydrolases family 28 Pfam Description: Glycosyl hydrolases family 28
  misc_feature (1)..(312): Homolog of NCBI NO: 22327662 NR Description: expressed protein [Arabidopsis thaliana] unknown protein [Arabidopsis thaliana]
  misc_feature (1)..(309): Homolog of NCBI NO: 30679999 NR Description: polygalacturonase, putative [Arabidopsis >gi|20260262|gb|AAM13029.1| unknown protein [Arabidopsis >gi|22136514|gb|AAM91335.1| unknown protein [Arabidopsis
  misc_feature (1)..(309): Homolog of NCBI NO: 21593399 NR Description: polygalacturonase-like protein [Arabidopsis
  misc_feature (1)..(309): Homolog of NCBI NO: 18397713 NR Description: polygalacturonase, putative [Arabidopsis >gi|30680007|ref|NP_850526.1| polygalacturonase, putative thaliana] >gi|7549636|gb|AAF63821.1| unknown protein [Arabidopsis
  misc_feature (1)..(304): Homolog of NCBI NO: 15228881 NR Description: polygalacturonase, putative [Arabidopsis >gi|14334802|gb|AAK59579.1| putative polygalacturonase thaliana] >gi|21280835|gb|AAM44924.1| putative polygalacturonase
  misc_feature (1)..(304): Homolog of NCBI NO: 7939578 NR Description: polygalacturonase-like protein [Arabidopsis
  misc_feature (1)..(304): Homolog of NCBI NO: 21553827 NR Description: polygalacturonase, putative [Arabidopsis thaliana]
  misc_feature (1)..(301): Homolog of NCBI NO: 40714685 NR Description: putative polygalacturonase [Oryza sativa
  misc_feature (1)..(300): Homolog of NCBI NO: 18412253 NR Description: polygalacturonase, putative [Arabidopsis >gi|11762132|gb|AAG40344.1|AF324992_1 AT3g62110 [Arabidopsis >gi|23397166|gb|AAN31866.1| unknown protein [Arabidopsis
  misc_feature (1)..(300): Homolog of NCBI NO: 11263971 NR Description: hypothetical protein T17J13.70 - Arabidopsis >gi|6899921|emb|CAB71871.1| putative protein [Arabidopsis

SEQ ID NO: 99607 - DNA, 868 bp, Arabidopsis thaliana
  misc_feature (1)..(868): Ceres Seq. ID no. 13603306
  misc_feature: MA Experiment ID: 20001905 Result: Down-regulated in Transcription
  misc_feature: MA Experiment 20001905 PARAMETER Experiment Name: At_Drought_Reproduction_P Parameter: Age (day) Value: 40
  misc_feature: MA Experiment 20001905 PARAMETER Experiment Name: At_Drought_Reproduction_P Parameter: Organism Value: A. thaliana
  misc_feature: MA Experiment 20001905 PARAMETER Experiment Name: At_Drought_Reproduction_P Parameter: Plant Line Value: WS
  misc_feature: MA Experiment 20001905 PARAMETER Experiment Name: At_Drought_Reproduction_P Parameter: Timepoint (day) Value: 10
  misc_feature: MA Experiment 20001905 PARAMETER Experiment Name: At_Drought_Reproduction_P Parameter: Tissue Value: Rosettes
  misc_feature: MA Experiment 20001905 PARAMETER Experiment Name: At_Drought_Reproduction_P Parameter: Treatment Value: Drought vs. No Drought
atctcctttaaaattctctgttcttttgtattcctaatctttaacaatttaagaagaaatggattcgaattcatggatcaattgtccccctgtgttttcatcatcgccttcttcacgccgttaccaatctcgatcagatttgtatttgggagatgttgaaggagaagacgatttgaaagctgagtttatgtgtcctttttgtgcagatgagtttgatattgttggtctttgttgtcatattgatgtgaatcatcctgttgaagctaagaatggggtttgtcctgtctgcacaaagaaggtgggattggacattgttggccatataacaacgcaacacgggaacgtatttaaggtgcagcgaagaagaaggttgcgtaaaggtggatatagctctacctatcttactcttaaaaaagagcttcgagaagctaacttacagtctcttggagggtcttccactttcattccctcttccaatatagattctgatcctctactctcatcctttatgtttaaacccccttcggctatacctatcactgaaggagactcggtagcacaagtctcacctaaggacacctctaaaagcaaaatacaacaagaatcattctcaaacgaagatcaagagaaggcaaagaagagcaagtttgtgcggggcttgctttggtcaaccatgcttgaagacaagttctaatttatctagatatcttatattgtaatcaatgtatcaagaaatcatacattagtctcaatgtatgtagcagaggcttgtagcaagcataatggcatgctgagtatgttgtaatcggatgttcgtggggtatcttttatgtgcataatcagaagatatataagtactatttcactc

SEQ ID NO: 99608 - protein, 211 aa, Arabidopsis thaliana
  peptide (1)..(211): Ceres Seq. ID no. 13603307
  misc_feature (12)..(206): Pfam Name: Drought induced 19 protein (Di19) Pfam Description: Drought induced 19 protein (Di19)
  misc_feature (1)..(211): Homolog of NCBI NO: 13937216 NR Description: AT5g49230/K21P3_11 [Arabidopsis thaliana]
  misc_feature (1)..(211): Homolog of NCBI NO: 15239827 NR Description: drought-induced protein -related [Arabidopsis
  misc_feature (1)..(211): Homolog of NCBI NO: 18377875 NR Description: AT3g06760/F3E22_10 [Arabidopsis thaliana]
  misc_feature (1)..(211): Homolog of NCBI NO: 15230782 NR Description: drought-induced protein -related [Arabidopsis
  misc_feature (1)..(209): Homolog of NCBI NO: 25992529 NR Description: fiber protein Fb2 [Gossypium barbadense]
  misc_feature (1)..(209): Homolog of NCBI NO: 28393233 NR Description: unknown protein [Arabidopsis thaliana]
  misc_feature (1)..(209): Homolog of NCBI NO: 15240426 NR Description: drought-induced protein -related [Arabidopsis
  misc_feature (23)..(209): Homolog of NCBI NO: 15028023 NR Description: unknown protein [Arabidopsis thaliana]
  misc_feature (23)..(209): Homolog of NCBI NO: 1076316 NR Description: drought-induced protein Di19 - Arabidopsis
  misc_feature (23)..(209): Homolog of NCBI NO: 30696095 NR Description: drought-induced protein -related [Arabidopsis
MDSNSWINCPPVFSSSPSSRRYQSRSDLYLGDVEGEDDLKAEFMCPFCADEFDIVGLCCHIDVNHPVEAKNGVCPVCTKKVGLDIVGHITTQHGNVFKVQRRRRLRKGGYSSTYLTLKKELREANLQSLGGSSTFIPSSNIDSDPLLSSFMFKPPSAIPITEGDSVAQVSPKDTSKSKIQQESFSNEDQEKAKKSKFVRGLLWSTMLEDKF

SEQ ID NO: 99609 - protein, 168 aa, Arabidopsis thaliana
  peptide (1)..(168): Ceres Seq. ID no. 13603308
  misc_feature (1)..(163): Pfam Name: Drought induced 19 protein (Di19) Pfam Description: Drought induced 19 protein (Di19)
  misc_feature (1)..(168): Homolog of NCBI NO: 13937216 NR Description: AT5g49230/K21P3_11 [Arabidopsis thaliana]
  misc_feature (1)..(168): Homolog of NCBI NO: 15239827 NR Description: drought-induced protein -related [Arabidopsis
  misc_feature (1)..(168): Homolog of NCBI NO: 18377875 NR Description: AT3g06760/F3E22_10 [Arabidopsis thaliana]
  misc_feature (1)..(168): Homolog of NCBI NO: 15230782 NR Description: drought-induced protein -related [Arabidopsis
  misc_feature (1)..(166): Homolog of NCBI NO: 25992529 NR Description: fiber protein Fb2 [Gossypium barbadense]
  misc_feature (1)..(166): Homolog of NCBI NO: 28393233 NR Description: unknown protein [Arabidopsis thaliana]
  misc_feature (1)..(166): Homolog of NCBI NO: 15240426 NR Description: drought-induced protein -related [Arabidopsis
  misc_feature (1)..(166): Homolog of NCBI NO: 15028023 NR Description: unknown protein [Arabidopsis thaliana]
  misc_feature (1)..(166): Homolog of NCBI NO: 1076316 NR Description: drought-induced protein Di19 - Arabidopsis
  misc_feature (1)..(166): Homolog of NCBI NO: 30696095 NR Description: drought-induced protein -related [Arabidopsis
MCPFCADEFDIVGLCCHIDVNHPVEAKNGVCPVCTKKVGLDIVGHITTQHGNVFKVQRRRRLRKGGYSSTYLTLKKELREANLQSLGGSSTFIPSSNIDSDPLLSSFMFKPPSAIPITEGDSVAQVSPKDTSKSKIQQESFSNEDQEKAKKSKFVRGLLWSTMLEDKF

SEQ ID NO: 99610 - DNA, 1162 bp, Arabidopsis thaliana
  misc_feature (1)..(1162): Ceres Seq. ID no. 13603318
  misc_feature: MA Experiment ID: 108434 Result: Up-regulated in Transcription
  misc_feature: MA Experiment 108434 PARAMETER Experiment Name: At_Root_Tips_cDNA_P Parameter: Tissue Value: Root Tips
  misc_feature: MA Experiment ID: 20000111 Result: Down-regulated in Transcription
  misc_feature: MA Experiment 20000111 PARAMETER Experiment Name: At_42deg_Heat_cDNA_P Parameter: Temperature (deg C) Value: 42 vs. 22
  misc_feature: MA Experiment 20000111 PARAMETER Experiment Name: At_42deg_Heat_cDNA_P Parameter: Timepoint (hr) Value: 6
  misc_feature: MA Experiment 20000111 PARAMETER Experiment Name: At_42deg_Heat_cDNA_P Parameter: Tissue Value: Aerial
  misc_feature: MA Experiment ID: 20000113 Result: Down-regulated in Transcription
  misc_feature: MA Experiment 20000113 PARAMETER Experiment Name: At_42deg_Heat_cDNA_P Parameter: Temperature (deg C) Value: 42 vs. 22
  misc_feature: MA Experiment 20000113 PARAMETER Experiment Name: At_42deg_Heat_cDNA_P Parameter: Timepoint (hr) Value: 8
  misc_feature: MA Experiment 20000113 PARAMETER Experiment Name: At_42deg_Heat_cDNA_P Parameter: Tissue Value: Aerial
  misc_feature: MA Experiment ID: 20000179 Result: Up-regulated in Transcription
  misc_feature: MA Experiment 20000179 PARAMETER Experiment Name: At_Germinating_Seeds_P Parameter: Age (hr) Value: 6 vs. 0
  misc_feature: MA Experiment 20000179 PARAMETER Experiment Name: At_Germinating_Seeds_P Parameter: Tissue Value: Germinating Seeds
  misc_feature: MA Experiment ID: 20000184 Result: Down-regulated in Transcription
  misc_feature: MA Experiment 20000184 PARAMETER Experiment Name: At_Shoots__P Parameter: Age (day) Value: 7
  misc_feature: MA Experiment 20000184 PARAMETER Experiment Name: At_Shoots__P Parameter: Tissue Value: Shoots vs. Whole Plant
  misc_feature: MA Experiment ID: 20000224 Result: Up-regulated in Transcription
  misc_feature: MA Experiment ID: 20000264 Result: Up-regulated in Transcription
  misc_feature: MA Experiment 20000264 PARAMETER Experiment Name: At_Open_Flower_P Parameter: Age (day) Value: 21
  misc_feature: MA Experiment 20000264 PARAMETER Experiment Name: At_Open_Flower_P Parameter: Plant Line Value: WS
  misc_feature: MA Experiment 20000264 PARAMETER Experiment Name: At_Open_Flower_P Parameter: Tissue Value: Open Flower vs. Whole Plant
  misc_feature: MA Experiment ID: 20000265 Result: Up-regulated in Transcription
  misc_feature: MA Experiment 20000265 PARAMETER Experiment Name: At_Open_Flower_P Parameter: Age (day) Value: 21
  misc_feature: MA Experiment 20000265 PARAMETER Experiment Name: At_Open_Flower_P Parameter: Plant Line Value: WS
  misc_feature: MA Experiment 20000265 PARAMETER Experiment Name: At_Open_Flower_P Parameter: Tissue Value: Closed Flower vs. Whole Plant
  misc_feature: MA Experiment ID: 20000286 Result: Up-regulated in Transcription
  misc_feature: MA Experiment 20000286 PARAMETER Experiment Name: At_Open_Flower_P Parameter: Age (day) Value: 21
  misc_feature: MA Experiment 20000286 PARAMETER Experiment Name: At_Open_Flower_P Parameter: Plant Line Value: WS
  misc_feature: MA Experiment 20000286 PARAMETER Experiment Name: At_Open_Flower_P Parameter: Tissue Value: Half Open vs. Whole Plant
  misc_feature: MA Experiment ID: 20000794 Result: Up-regulated in Transcription
  misc_feature: MA Experiment 20000794 PARAMETER Experiment Name: At_Petals_P Parameter: Age (day) Value: 23-25 days
  misc_feature: MA Experiment 20000794 PARAMETER Experiment Name: At_Petals_P Parameter: Plant Line Value: WS
  misc_feature: MA Experiment 20000794 PARAMETER Experiment Name: At_Petals_P Parameter: Tissue Value: Petals vs. Whole plant
aatgctcgtaagttcaagcaaaatcacaagagcgagagagatggtgacgaaaacagaggagaagcaattgaaccagctagagattcaagtcgataatggcggaggcggaacatgggagtatctttgcctcgttcgtaatctcaaagttcgccggtcggagaaagtgttaaaacacggttcctcgattttgaatgatcagaagaaacgatctgctcttggtccagatgaatggacactaaatgagcaggtggcaattgcagctatggactgtcaatgtctcggtgtcgcacagagttgcattaaggctttgcagacaaaatttcctgggagcaaaagagttgggaggcttgaggcattgcttcttgaagcgaagggattatggggagaggctgaggaagcatatgcgagtcttttggaggataatccactcgaccaagcgatacacaaacgaagagtggctatatccaaggcactaggcaaaccttccatagccattgagcttcttaacaaatatcttgaactattcatggctgatcatgatgcatggagagaactcgcagagctttacctttccttgcaaatgtataagcaagcagctttctgctatgaagagctcatactatctcagcctactgttccattgtaccacctcgcatatgctgaggttctctatacaatcggtggagtagaaaacattatctcagcaagaaaatactatgcagcgaccgtagatttaacaggcggcaaaaacactagagctcttctcggaatctgcttgtgtgcatcggccattgcacagctctcaaaaggcaggaacaaagaggacaaagacgctacggcagccccagagcttcattccctggctgcagctgcagtagagaaagaatacaagcaaaaagccccggacaaacttcaactcatctcttccgcgttaagaatcttgaagacttgatcgcaagtaaacgatgttctggcccacaagacgcaaacgatttagcagtagtagatagtcggaaaatatcgaactctaaattcaaataactttctttaaagtttaaaccaaagagaattttgattactgttagataccaaaaccaaataactgtatcactccttagcctttacggtttccatgcttgcgacgtgcagcttcttttgtatc

SEQ ID NO: 99611 - protein, 316 aa, Arabidopsis thaliana; identical to SEQ ID NO: 29609
  peptide (1)..(316): Ceres Seq. ID no. 13603319
  misc_feature (1)..(316): Homolog of NCBI NO: 30690960 NR Description: expressed protein [Arabidopsis thaliana]
  misc_feature (14)..(316): Homolog of NCBI NO: 5732436 NR Description: contains similarity to O-linked GlcNAc [Arabidopsis thaliana] >gi|28393702|gb|AAO42263.1| unknown
  misc_feature (14)..(315): Homolog of NCBI NO: 30679284 NR Description: expressed protein [Arabidopsis thaliana]
  misc_feature (14)..(315): Homolog of NCBI NO: 22330847 NR Description: expressed protein [Arabidopsis thaliana] unknown protein [Arabidopsis thaliana]
  misc_feature (101)..(315): Homolog of NCBI NO: 10799830 NR Description: O-linked GlcNAc transferase like [Nicotiana
  misc_feature (50)..(297): Homolog of NCBI NO: 27370885 NR Description: Similar to KIAA0103 gene product [Xenopus laevis]
  misc_feature (50)..(297): Homolog of NCBI NO: 13385196 NR Description: RIKEN cDNA 4921531G14 [Mus musculus] unnamed protein product [Mus musculus] unnamed protein product [Mus musculus]
  misc_feature (50)..(297): Homolog of NCBI NO: 14193698 NR Description: KIAA0103 protein [Mus musculus]
  misc_feature (50)..(297): Homolog of NCBI NO: 7661910 NR Description: KIAA0103 gene product [Homo sapiens] Hypothetical protein KIAA0103 >gi|285943|dbj|BAA03493.1| KIAA0103 sapiens] >gi|18204942|gb|AAH21667.1|AAH21667 KIAA0103 gene
  misc_feature (50)..(277): Homolog of NCBI NO: 34866113 NR Description: similar to RIKEN cDNA 4921531G14 [Rattus

SEQ ID NO: 99612 - protein, 303 aa, Arabidopsis thaliana; identical to SEQ ID NO: 29610
  peptide (1)..(303): Ceres Seq. ID no. 13603320
  misc_feature (1)..(303): Homolog of NCBI NO: 30690960 NR Description: expressed protein [Arabidopsis thaliana]
  misc_feature (1)..(303): Homolog of NCBI NO: 5732436 NR Description: contains similarity to O-linked GlcNAc [Arabidopsis thaliana] >gi|28393702|gb|AAO42263.1| unknown
  misc_feature (1)..(302): Homolog of NCBI NO: 30679284 NR Description: expressed protein [Arabidopsis thaliana]
  misc_feature (1)..(302): Homolog of NCBI NO: 22330847 NR Description: expressed protein [Arabidopsis thaliana] unknown protein [Arabidopsis thaliana]
  misc_feature (88)..(302): Homolog of NCBI NO: 10799830 NR Description: O-linked GlcNAc transferase like [Nicotiana
  misc_feature (37)..(284): Homolog of NCBI NO: 27370885 NR Description: Similar to KIAA0103 gene product [Xenopus laevis]
  misc_feature (37)..(284): Homolog of NCBI NO: 13385196 NR Description: RIKEN cDNA 4921531G14 [Mus musculus] unnamed protein product [Mus musculus] unnamed protein product [Mus musculus]
  misc_feature (37)..(284): Homolog of NCBI NO: 14193698 NR Description: KIAA0103 protein [Mus musculus]
  misc_feature (37)..(284): Homolog of NCBI NO: 7661910 NR Description: KIAA0103 gene product [Homo sapiens] Hypothetical protein KIAA0103 >gi|285943|dbj|BAA03493.1| KIAA0103 sapiens] >gi|18204942|gb|AAH21667.1|AAH21667 KIAA0103 gene
  misc_feature (37)..(264): Homolog of NCBI NO: 34866113 NR Description: similar to RIKEN cDNA 4921531G14 [Rattus

SEQ ID NO: 99613 - protein, 229 aa, Arabidopsis thaliana; identical to SEQ ID NO: 29611
  peptide (1)..(229): Ceres Seq. ID no. 13603321
  misc_feature (1)..(229): Homolog of NCBI NO: 30690960 NR Description: expressed protein [Arabidopsis thaliana]
  misc_feature (1)..(229): Homolog of NCBI NO: 5732436 NR Description: contains similarity to O-linked GlcNAc [Arabidopsis thaliana] >gi|28393702|gb|AAO42263.1| unknown
  misc_feature (1)..(228): Homolog of NCBI NO: 30679284 NR Description: expressed protein [Arabidopsis thaliana]
  misc_feature (1)..(228): Homolog of NCBI NO: 22330847 NR Description: expressed protein [Arabidopsis thaliana] unknown protein [Arabidopsis thaliana]
  misc_feature (14)..(228): Homolog of NCBI NO: 10799830 NR Description: O-linked GlcNAc transferase like [Nicotiana
  misc_feature (1)..(210): Homolog of NCBI NO: 27370885 NR Description: Similar to KIAA0103 gene product [Xenopus laevis]
  misc_feature (1)..(210): Homolog of NCBI NO: 13385196 NR Description: RIKEN cDNA 4921531G14 [Mus musculus] unnamed protein product [Mus musculus] unnamed protein product [Mus musculus]
  misc_feature (1)..(210): Homolog of NCBI NO: 14193698 NR Description: KIAA0103 protein [Mus musculus]
  misc_feature (1)..(210): Homolog of NCBI NO: 7661910 NR Description: KIAA0103 gene product [Homo sapiens] Hypothetical protein KIAA0103 >gi|285943|dbj|BAA03493.1| KIAA0103 sapiens] >gi|18204942|gb|AAH21667.1|AAH21667 KIAA0103 gene
  misc_feature (1)..(190): Homolog of NCBI NO: 34866113 NR Description: similar to RIKEN cDNA 4921531G14 [Rattus

SEQ ID NO: 99614 - DNA, 1566 bp, Arabidopsis thaliana
  misc_feature (1)..(1566): Ceres Seq. ID no. 13603322
  misc_feature: MA Experiment ID: 20000182 Result: Up-regulated in Transcription
  misc_feature: MA Experiment 20000182 PARAMETER Experiment Name: At_2mM_SA_P Parameter: Age (day) Value: 14
  misc_feature: MA Experiment 20000182 PARAMETER Experiment Name: At_2mM_SA_P Parameter: Organism Value: A. thaliana
  misc_feature: MA Experiment 20000182 PARAMETER Experiment Name: At_2mM_SA_P Parameter: Plant Line Value: WS
  misc_feature: MA Experiment 20000182 PARAMETER Experiment Name: At_2mM_SA_P Parameter: Timepoint (hr) Value: 6
  misc_feature: MA Experiment 20000182 PARAMETER Experiment Name: At_2mM_SA_P Parameter: Tissue Value: Aerial
  misc_feature: MA Experiment 20000182 PARAMETER Experiment Name: At_2mM_SA_P Parameter: Treatment Value: 2mM SA vs. No Treatment
  misc_feature: MA Experiment ID: 20000235 Result: Down-regulated in Transcription
  misc_feature: MA Experiment 20000235 PARAMETER Experiment Name: At_Siliques_P Parameter: Age (day) Value: 21
  misc_feature: MA Experiment 20000235 PARAMETER Experiment Name: At_Siliques_P Parameter: Organism Value: A. thaliana
  misc_feature: MA Experiment 20000235 PARAMETER Experiment Name: At_Siliques_P Parameter: Plant Line Value: WS
  misc_feature: MA Experiment 20000235 PARAMETER Experiment Name: At_Siliques_P Parameter: Tissue Value: 5-10mm Siliques vs. Whole Plant
  misc_feature: MA Experiment ID: 20000264 Result: Up-regulated in Transcription
  misc_feature: MA Experiment 20000264 PARAMETER Experiment Name: At_Open_Flower_P Parameter: Age (day) Value: 21
  misc_feature: MA Experiment 20000264 PARAMETER Experiment Name: At_Open_Flower_P Parameter: Plant Line Value: WS
  misc_feature: MA Experiment 20000264 PARAMETER Experiment Name: At_Open_Flower_P Parameter: Tissue Value: Open Flower vs. Whole Plant
  misc_feature: MA Experiment ID: 20000265 Result: Up-regulated in Transcription
  misc_feature: MA Experiment 20000265 PARAMETER Experiment Name: At_Open_Flower_P Parameter: Age (day) Value: 21
  misc_feature: MA Experiment 20000265 PARAMETER Experiment Name: At_Open_Flower_P Parameter: Plant Line Value: WS
  misc_feature: MA Experiment 20000265 PARAMETER Experiment Name: At_Open_Flower_P Parameter: Tissue Value: Closed Flower vs. Whole Plant
  misc_feature: MA Experiment ID: 20000286 Result: Up-regulated in Transcription
  misc_feature: MA Experiment 20000286 PARAMETER Experiment Name: At_Open_Flower_P Parameter: Age (day) Value: 21
  misc_feature: MA Experiment 20000286 PARAMETER Experiment Name: At_Open_Flower_P Parameter: Plant Line Value: WS
  misc_feature: MA Experiment 20000286 PARAMETER Experiment Name: At_Open_Flower_P Parameter: Tissue Value: Half Open vs. Whole Plant
  misc_feature: MA Experiment ID: 20000496 Result: Down-regulated in Transcription
  misc_feature: MA Experiment 20000496 PARAMETER Experiment Name: At_Guard_Cells_P Parameter: Harvest Date Value: 7/19/2002
  misc_feature: MA Experiment 20000496 PARAMETER Experiment Name: At_Guard_Cells_P Parameter: Organism Value: Canola
  misc_feature: MA Experiment 20000496 PARAMETER Experiment Name: At_Guard_Cells_P Parameter: Tissue Value: Guard Cells vs. Leaves
  misc_feature: MA Experiment ID: 20000794 Result: Up-regulated in Transcription
  misc_feature: MA Experiment 20000794 PARAMETER Experiment Name: At_Petals_P Parameter: Age (day) Value: 23-25 days
  misc_feature: MA Experiment 20000794 PARAMETER Experiment Name: At_Petals_P Parameter: Plant Line Value: WS
  misc_feature: MA Experiment 20000794 PARAMETER Experiment Name: At_Petals_P Parameter: Tissue Value: Petals vs. Whole plant
  misc_feature: MA Experiment ID: 20001904 Result: Up-regulated in Transcription
  misc_feature: MA Experiment 20001904 PARAMETER Experiment Name: At_Drought_Reproduction_P Parameter: Age (day) Value: 37
  misc_feature: MA Experiment 20001904 PARAMETER Experiment Name: At_Drought_Reproduction_P Parameter: Organism Value: A. thaliana
  misc_feature: MA Experiment 20001904 PARAMETER Experiment Name: At_Drought_Reproduction_P Parameter: Plant Line Value: WS
  misc_feature: MA Experiment 20001904 PARAMETER Experiment Name: At_Drought_Reproduction_P Parameter: Timepoint (day) Value: 7
  misc_feature: MA Experiment 20001904 PARAMETER Experiment Name: At_Drought_Reproduction_P Parameter: Tissue Value: Rosettes
  misc_feature: MA Experiment 20001904 PARAMETER Experiment Name: At_Drought_Reproduction_P Parameter: Treatment Value: Drought vs. No Drought
  misc_feature: MA Experiment ID: 20001911 Result: Down-regulated in Transcription
  misc_feature: MA Experiment 20001911 PARAMETER Experiment Name: At_Drought_Reproduction_P Parameter: Age (day) Value: 40
  misc_feature: MA Experiment 20001911 PARAMETER Experiment Name: At_Drought_Reproduction_P Parameter: Organism Value: A. thaliana
  misc_feature: MA Experiment 20001911 PARAMETER Experiment Name: At_Drought_Reproduction_P Parameter: Plant Line Value: WS
  misc_feature: MA Experiment 20001911 PARAMETER Experiment Name: At_Drought_Reproduction_P Parameter: Timepoint (day) Value: 10
  misc_feature: MA Experiment 20001911 PARAMETER Experiment Name: At_Drought_Reproduction_P Parameter: Tissue Value: Flowers
  misc_feature: MA Experiment 20001911 PARAMETER Experiment Name: At_Drought_Reproduction_P Parameter: Treatment Value: Drought vs. No Drought
aagaaaatctcaaatagatataacaagtattctggaagaaagaaaagagagagaaaatgtcgtccagtaaaatccaggtacgagggcagccacttcttagggttccggcaagaaaccaccgtatgacacacttggttgtttgcggcgtttccacaaaacgccaccaccgtgaaatcaatgcactcagcagtaatagtggtccatcgttggattcggtcccaacaagaaccgacaagaggcagtttcttcgtggtgacggtaacggtaaattcgggaggttcggtgggaagtttgtaccggagacattgatgtctcgcctgatagaacttgaagacgaatttaactttgttaggtgcgatcacgaatttcaggaggagcttaccacagcgttaagagactacgtaggaagagaaacgcctctctacttcgccgaacgtctaaccgaacactacaagaacatagttccaaccatcgaaggtggaccagagatatacttgaaacgggaagatcttagccactgtgggtctcacaaaatcaataatgctctcgctcaggccatgatttcccggcggcttggttgcagccgtgtggtggcggccactggagccggacaacatggagtcgccacagcggctgcatgtgcaaagctctccttggagtgtactgttttcatgggagctgctgatatagagaaacaatcctttaatgtactttccatgaaactccttggtgctcaggttatatcagtggaaggaacattcaaagatgcaagttcagaagctatacgaaactgggtcgaaaacctatataccacatactacttatcgggtacggtcgtaggaccgcatccgtgtccgataatagtacgtgagtttcaatctgtgatcgggaaagagacaagaaggcaagccaagcaactatggggtggtaagcctgatgtgttggtggcctgtgtgggaagtggctcaaacgcattgggtttgttccatgagtttgttggggatgaggatgtgcggttagtcggtgtcgaggctgcggggcttggtctggattcggggaaacattcagctactttggcctttggagatgttggtgtataccatggttccatgagctatttattgcaagatgatcaaggacagatacttaaaccacactccgtaggtgttgggttagagtatcccggagttggaccggagattagtttcatgaaagaaactggcagagcggagttctatacagcaacagacgaagaagcaattcaagcgtgcatgcgattaagcagattggagggaataataccggcattagaagcgtctcacgcgctcgcgttcctcgacaaactcgtgcctactcttcgtgatggagccaaggtggtagtgaactgcagtggccgtggtgacaaagatttagatactctcatccaacgaggcatgccttcttctttttgttgactcaccaagatgccacattacacttaactcttttagaaaacgtatggtccaatcacaaccatcattatagatgaaatactaatatatcaatcattatttaatttttcgattt

SEQ ID NO: 99615 - protein, 465 aa, Arabidopsis thaliana
  peptide (1)..(465): Ceres Seq. ID no. 13603323
  misc_feature (113)..(447): Pfam Name: Pyridoxal-phosphate dependent enzyme Pfam Description: Pyridoxal-phosphate dependent enzyme
  misc_feature (1)..(465): Homolog of NCBI NO: 26452400 NR Description: unknown protein [Arabidopsis thaliana]
  misc_feature (65)..(457): Homolog of NCBI NO: 3915165 NR Description: Tryptophan synthase beta chain 2, chloroplast >gi|2792520|gb|AAB97087.1| tryptophan synthase beta subunit acuminata] >gi|2801771|gb|AAB97526.1| tryptophan synthase beta
  misc_feature (65)..(454): Homolog of NCBI NO: 18481702 NR Description: tryptophan synthase beta-subunit [Sorghum bicolor]
  misc_feature (58)..(457): Homolog of NCBI NO: 15236977 NR Description: tryptophan synthase, beta subunit 2 (TSB2) thaliana] >gi|1174779|sp|P25269|TRP2_ARATH Tryptophan synthase
  misc_feature (58)..(455): Homolog of NCBI NO: 15239755 NR Description: tryptophan synthase, beta subunit 1 (TSB1) thaliana] >gi|136251|sp|P14671|TRP1_ARATH Tryptophan synthase chain 1, chloroplast precursor >gi|99767|pir||A31393 tryptophan
  misc_feature (65)..(454): Homolog of NCBI NO: 1174780 NR Description: Tryptophan synthase beta chain 2, chloroplast (Orange pericarp 2) >gi|320135|pir||PQ0450 tryptophan synthase
  misc_feature (63)..(454): Homolog of NCBI NO: 38636821 NR Description: putative tryptophan synthase beta-subunit [Oryza
  misc_feature (58)..(457): Homolog of NCBI NO: 81661 NR Description: tryptophan synthase (EC 4.2.1.20) beta-2 chain
  misc_feature (73)..(454): Homolog of NCBI NO: 1174778 NR Description: Tryptophan synthase beta chain 1 (Orange pericarp
  misc_feature (67)..(455): Homolog of NCBI NO: 7437014 NR Description: probable tryptophan synthase (EC 4.2.1.20) beta - rice >gi|2081609|dbj|BAA19928.1| tryptophan synthase B [Oryza
MSSSKIQVRGQPLLRVPARNHRMTHLVVCGVSTKRHHREINALSSNSGPSLDSVPTRTDKRQFLRGDGNGKFGRFGGKFVPETLMSRLIELEDEFNFVRCDHEFQEELTTALRDYVGRETPLYFAERLTEHYKNIVPTIEGGPEIYLKREDLSHCGSHKINNALAQAMISRRLGCSRVVAATGAGQHGVATAAACAKLSLECTVFMGAADIEKQSFNVLSMKLLGAQVISVEGTFKDASSEAIRNWVENLYTTYYLSGTVVGPHPCPIIVREFQSVIGKETRRQAKQLWGGKPDVLVACVGSGSNALGLFHEFVGDEDVRLVGVEAAGLGLDSGKHSATLAFGDVGVYHGSMSYLLQDDQGQILKPHSVGVGLEYPGVGPEISFMKETGRAEFYTATDEEAIQACMRLSRLEGIIPALEASHALAFLDKLVPTLRDGAKVVVNCSGRGDKDLDTLIQRGMPSSFC

SEQ ID NO: 99616 - protein, 443 aa, Arabidopsis thaliana
  peptide (1)..(443): Ceres Seq. ID no. 13603324
  misc_feature (91)..(425): Pfam Name: Pyridoxal-phosphate dependent enzyme Pfam Description: Pyridoxal-phosphate dependent enzyme
  misc_feature (1)..(443): Homolog of NCBI NO: 26452400 NR Description: unknown protein [Arabidopsis thaliana]
  misc_feature (43)..(435): Homolog of NCBI NO: 3915165 NR Description: Tryptophan synthase beta chain 2, chloroplast >gi|2792520|gb|AAB97087.1| tryptophan synthase beta subunit acuminata] >gi|2801771|gb|AAB97526.1| tryptophan synthase beta
  misc_feature (43)..(432): Homolog of NCBI NO: 18481702 NR Description: tryptophan synthase beta-subunit [Sorghum bicolor]
  misc_feature (36)..(435): Homolog of NCBI NO: 15236977 NR Description: tryptophan synthase, beta subunit 2 (TSB2) thaliana] >gi|1174779|sp|P25269|TRP2_ARATH Tryptophan synthase
  misc_feature (36)..(433): Homolog of NCBI NO: 15239755 NR Description: tryptophan synthase, beta subunit 1 (TSB1) thaliana] >gi|136251|sp|P14671|TRP1_ARATH Tryptophan synthase chain 1, chloroplast precursor >gi|99767|pir||A31393 tryptophan
  misc_feature (43)..(432): Homolog of NCBI NO: 1174780 NR Description: Tryptophan synthase beta chain 2, chloroplast (Orange pericarp 2) >gi|320135|pir||PQ0450 tryptophan synthase
  misc_feature (41)..(432): Homolog of NCBI NO: 38636821 NR Description: putative tryptophan synthase beta-subunit [Oryza
  misc_feature (36)..(435): Homolog of NCBI NO: 81661 NR Description: tryptophan synthase (EC 4.2.1.20) beta-2 chain
  misc_feature (51)..(432): Homolog of NCBI NO: 1174778 NR Description: Tryptophan synthase beta chain 1 (Orange pericarp
  misc_feature (45)..(433): Homolog of NCBI NO: 7437014 NR Description: probable tryptophan synthase (EC 4.2.1.20) beta - rice >gi|2081609|dbj|BAA19928.1| tryptophan synthase B [Oryza
MTHLVVCGVSTKRHHREINALSSNSGPSLDSVPTRTDKRQFLRGDGNGKFGRFGGKFVPETLMSRLIELEDEFNFVRCDHEFQEELTTALRDYVGRETPLYFAERLTEHYKNIVPTIEGGPEIYLKREDLSHCGSHKINNALAQAMISRRLGCSRVVAATGAGQHGVATAAACAKLSLECTVFMGAADIEKQSFNVLSMKLLGAQVISVEGTFKDASSEAIRNWVENLYTTYYLSGTVVGPHPCPIIVREFQSVIGKETRRQAKQLWGGKPDVLVACVGSGSNALGLFHEFVGDEDVRLVGVEAAGLGLDSGKHSATLAFGDVGVYHGSMSYLLQDDQGQILKPHSVGVGLEYPGVGPEISFMKETGRAEFYTATDEEAIQACMRLSRLEGIIPALEASHALAFLDKLVPTLRDGAKVVVNCSGRGDKDLDTLIQRGMPSSFC

SEQ ID NO: 99617 - protein, 381 aa, Arabidopsis thaliana
  peptide (1)..(381): Ceres Seq. ID no. 13603325
  misc_feature (29)..(363): Pfam Name: Pyridoxal-phosphate dependent enzyme Pfam Description: Pyridoxal-phosphate dependent enzyme
  misc_feature (1)..(381): Homolog of NCBI NO: 26452400 NR Description: unknown protein [Arabidopsis thaliana]
  misc_feature (1)..(373): Homolog of NCBI NO: 3915165 NR Description: Tryptophan synthase beta chain 2, chloroplast >gi|2792520|gb|AAB97087.1| tryptophan synthase beta subunit acuminata] >gi|2801771|gb|AAB97526.1| tryptophan synthase beta
  misc_feature (1)..(370): Homolog of NCBI NO: 18481702 NR Description: tryptophan synthase beta-subunit [Sorghum bicolor]
  misc_feature (1)..(373): Homolog of NCBI NO: 15236977 NR Description: tryptophan synthase, beta subunit 2 (TSB2) thaliana] >gi|1174779|sp|P25269|TRP2_ARATH Tryptophan synthase
  misc_feature (1)..(371): Homolog of NCBI NO: 15239755 NR Description: tryptophan synthase, beta subunit 1 (TSB1) thaliana] >gi|136251|sp|P14671|TRP1_ARATH Tryptophan synthase chain 1, chloroplast precursor >gi|99767|pir||A31393 tryptophan
  misc_feature (1)..(370): Homolog of NCBI NO: 1174780 NR Description: Tryptophan synthase beta chain 2, chloroplast (Orange pericarp 2) >gi|320135|pir||PQ0450 tryptophan synthase
  misc_feature (1)..(370): Homolog of NCBI NO: 38636821 NR Description: putative tryptophan synthase beta-subunit [Oryza
  misc_feature (1)..(373): Homolog of NCBI NO: 81661 NR Description: tryptophan synthase (EC 4.2.1.20) beta-2 chain
  misc_feature (1)..(370): Homolog of NCBI NO: 1174778 NR Description: Tryptophan synthase beta chain 1 (Orange pericarp
  misc_feature (1)..(371): Homolog of NCBI NO: 7437014 NR Description: probable tryptophan synthase (EC 4.2.1.20) beta - rice >gi|2081609|dbj|BAA19928.1| tryptophan synthase B [Oryza
MSRLIELEDEFNFVRCDHEFQEELTTALRDYVGRETPLYFAERLTEHYKNIVPTIEGGPEIYLKREDLSHCGSHKINNALAQAMISRRLGCSRVVAATGAGQHGVATAAACAKLSLECTVFMGAADIEKQSFNVLSMKLLGAQVISVEGTFKDASSEAIRNWVENLYTTYYLSGTVVGPHPCPIIVREFQSVIGKETRRQAKQLWGGKPDVLVACVGSGSNALGLFHEFVGDEDVRLVGVEAAGLGLDSGKHSATLAFGDVGVYHGSMSYLLQDDQGQILKPHSVGVGLEYPGVGPEISFMKETGRAEFYTATDEEAIQACMRLSRLEGIIPALEASHALAFLDKLVPTLRDGAKVVVNCSGRGDKDLDTLIQRGMPSSFC

SEQ ID NO: 99618 - DNA, 2402 bp, Arabidopsis thaliana
  misc_feature (1)..(2402): Ceres Seq. ID no. 13603329
  misc_feature: MA Experiment ID: 108433 Result: Down-regulated in Transcription
  misc_feature: MA Experiment 108433 PARAMETER Experiment Name: At_rhl_Mutant2_cDNA_P Parameter: Age (day) Value: 7
  misc_feature: MA Experiment 108433 PARAMETER Experiment Name: At_rhl_Mutant2_cDNA_P Parameter: Organism Value: A. thaliana
  misc_feature: MA Experiment 108433 PARAMETER Experiment Name: At_rhl_Mutant2_cDNA_P Parameter: Plant Line Value: rhl Mutant vs. wt landsburg
  misc_feature: MA Experiment 108433 PARAMETER Experiment Name: At_rhl_Mutant2_cDNA_P Parameter: Tissue Value: Roots
  misc_feature: MA Experiment ID: 108434 Result: Up-regulated in Transcription
  misc_feature: MA Experiment 108434 PARAMETER Experiment Name: At_Root_Tips_cDNA_P Parameter: Tissue Value: Root Tips
  misc_feature: MA Experiment ID: 108461 Result: Down-regulated in Transcription
  misc_feature: MA Experiment 108461 PARAMETER Experiment Name: At_Germinating_Seeds_cDNA_P Parameter: Age (day) Value: 1 vs. 0
  misc_feature: MA Experiment 108461 PARAMETER Experiment Name: At_Germinating_Seeds_cDNA_P Parameter: Tissue Value: Germinating Seeds
  misc_feature: MA Experiment ID: 108462 Result: Down-regulated in Transcription
  misc_feature: MA Experiment 108462 PARAMETER Experiment Name: At_Germinating_Seeds_cDNA_P Parameter: Age (day) Value: 2 vs. 0
  misc_feature: MA Experiment 108462 PARAMETER Experiment Name: At_Germinating_Seeds_cDNA_P Parameter: Tissue Value: Germinating Seeds
  misc_feature: MA Experiment ID: 108463 Result: Down-regulated in Transcription
  misc_feature: MA Experiment 108463 PARAMETER Experiment Name: At_Germinating_Seeds_cDNA_P Parameter: Age (day) Value: 3 vs. 0
  misc_feature: MA Experiment 108463 PARAMETER Experiment Name: At_Germinating_Seeds_cDNA_P Parameter: Tissue Value: Germinating Seeds
  misc_feature: MA Experiment ID: 108464 Result: Down-regulated in Transcription
  misc_feature: MA Experiment 108464 PARAMETER Experiment Name: At_Germinating_Seeds_cDNA_P Parameter: Age (day) Value: 4 vs. 0
  misc_feature: MA Experiment 108464 PARAMETER Experiment Name: At_Germinating_Seeds_cDNA_P Parameter: Tissue Value: Germinating Seeds
  misc_feature: MA Experiment ID: 20000089 Result: Up-regulated in Transcription
  misc_feature: MA Experiment ID: 20000090 Result: Up-regulated in Transcription
  misc_feature: MA Experiment ID: 20000111 Result: Down-regulated in Transcription
  misc_feature: MA Experiment 20000111 PARAMETER Experiment Name: At_42deg_Heat_cDNA_P Parameter: Temperature (deg C) Value: 42 vs. 22
  misc_feature: MA Experiment 20000111 PARAMETER Experiment Name: At_42deg_Heat_cDNA_P Parameter: Timepoint (hr) Value: 6
  misc_feature: MA Experiment 20000111 PARAMETER Experiment Name: At_42deg_Heat_cDNA_P Parameter: Tissue Value: Aerial
  misc_feature: MA Experiment ID: 20000113 Result: Down-regulated in Transcription
  misc_feature: MA Experiment 20000113 PARAMETER Experiment Name: At_42deg_Heat_cDNA_P Parameter: Temperature (deg C) Value: 42 vs. 22
  misc_feature: MA Experiment 20000113 PARAMETER Experiment Name: At_42deg_Heat_cDNA_P Parameter: Timepoint (hr) Value: 8
  misc_feature: MA Experiment 20000113 PARAMETER Experiment Name: At_42deg_Heat_cDNA_P Parameter: Tissue Value: Aerial
  misc_feature: MA Experiment ID: 20000224 Result: Up-regulated in Transcription
  misc_feature: MA Experiment ID: 20000307 Result: Down-regulated in Transcription
  misc_feature: MA Experiment 20000307 PARAMETER Experiment Name: At_Germinating_Seeds_Sub_P Parameter: Age (hr) Value: 24 vs. 0
  misc_feature: MA Experiment 20000307 PARAMETER Experiment Name: At_Germinating_Seeds_Sub_P Parameter: Organism Value: A. thaliana
  misc_feature: MA Experiment 20000307 PARAMETER Experiment Name: At_Germinating_Seeds_Sub_P Parameter: Plant Line Value: WS
  misc_feature: MA Experiment 20000307 PARAMETER Experiment Name: At_Germinating_Seeds_Sub_P Parameter: Tissue Value: Germinating Seeds
  misc_feature: MA Experiment ID: 20000327 Result: Down-regulated in Transcription
  misc_feature: MA Experiment 20000327 PARAMETER Experiment Name: At_42deg_Heat_Sub_P Parameter: Age (day) Value: 14
  misc_feature: MA Experiment 20000327 PARAMETER Experiment Name: At_42deg_Heat_Sub_P Parameter: Organism Value: A. thaliana
  misc_feature: MA Experiment 20000327 PARAMETER Experiment Name: At_42deg_Heat_Sub_P Parameter: Plant Line Value: WS
  misc_feature: MA Experiment 20000327 PARAMETER Experiment Name: At_42deg_Heat_Sub_P Parameter: Temperature (deg C) Value: 42 vs. 22
  misc_feature: MA Experiment 20000327 PARAMETER Experiment Name: At_42deg_Heat_Sub_P Parameter: Timepoint (hr) Value: 1
  misc_feature: MA Experiment 20000327 PARAMETER Experiment Name: At_42deg_Heat_Sub_P Parameter: Tissue Value: Aerial
  misc_feature: MA Experiment ID: 20000328 Result: Down-regulated in Transcription
  misc_feature: MA Experiment 20000328 PARAMETER Experiment Name: At_42deg_Heat_Sub_P Parameter: Age (day) Value: 14
  misc_feature: MA Experiment 20000328 PARAMETER Experiment Name: At_42deg_Heat_Sub_P Parameter: Organism Value: A. thaliana
  misc_feature: MA Experiment 20000328 PARAMETER Experiment Name: At_42deg_Heat_Sub_P Parameter: Plant Line Value: WS
  misc_feature: MA Experiment 20000328 PARAMETER Experiment Name: At_42deg_Heat_Sub_P Parameter: Temperature (deg C) Value: 42 vs. 22
  misc_feature: MA Experiment 20000328 PARAMETER Experiment Name: At_42deg_Heat_Sub_P Parameter: Timepoint (hr) Value: 6
  misc_feature: MA Experiment 20000328 PARAMETER Experiment Name: At_42deg_Heat_Sub_P Parameter: Tissue Value: Aerial
gtggccgtctttttcaaaaccttagacaatgagtatcatgctatcaatttcccggcgccagaactcttatattctgctcaaccattctcgattcctccggcgtttttcttatgatgttgacccacggccggaaatcaaatcggagagccaggaatttgtagtagtcaaatttgtgaaaactcttcaaaataccccgcaacatgattgggcgtcgagcgagtcgctaagtgcgcttgtcgtatcttcttcttctgcttctcctttagtattctcgcaaatcacgcggcggctaggatcgtattctctagcaatctcgttcttcgagtacctggatgcgaagtctcagtctctgaaacgccgtgaagaatctctctccttggcgcttcagtcggtcattgaattcgccggtagtgaaccggacccgcgtgataaacttctccgtctctacgagatcgccaaagagaagaacattcctcttactatcgttgccactaagcttctgatccgatggtttgggcgtatgggtatggtgaatcagtcggttcttgtatacgaaagactcgattcgaatatgaaaaactcgcaggttcgtaatgttgtggtagacgtcttgctaagaaatggacttgtggatgatgccttcaaggtgctcgacgaaatgcttcagaaagaatctgtttttcctcctaatagaatcacagcggatattgtgttacacgaggtttggaaggaaaggcttttgacagaagaaaagataattgctttgatttcaagatttagctctcatggtgtctccccaaactctgtttggttgactcggtttatatcaagtctatgcaaaaatgctcgcgccaatactgcttgggatattttgagcgacctgatgaagaacaaaaccccacttgaagctcctcccttcaatgcgcttttgtcttgcttaggaaggaatatggacattagtagaatgaatgatttagtcttgaagatggatgaggtgaaaatccggcctgatgttgtgactttagggattcttattaacactttatgcaaatcaagaagggtagatgaagctctcgaagtttttgaacaaatgcgtggaaagagaactgatgatggaaatgtgattaaagctgattcgattcattttaatactctcattgacgggctctgcaaggtggggaggttgaaagaagcagaggagttattggtaaggatgaaactggaagagagatgtgtgcccaatgcagttacttacaattgcttgattgatgggtattgcagagctggaaagcttgagacggctaaagaagtcgtttctcggatgaaagaggacgagattaaacctaatgtggtaactgttaatacaatcgttggtgggatgtgcaggcaccatggattgaacatggcggttgttttctttatggatatggaaaaggaaggcgtgaaagggaatgtggttacttatatgacattgattcatgcttgttgcagcgtcagtaatgtagagaaggctatgtattggtatgaaaaaatgttggaagctggttgttctcctgatgcaaagatctattatgctttgatctctggattgtgccaagttagacgggatcatgacgccattagagtggtggagaaactgaaagaaggagggttttctcttgacttattggcttacaacatgcttattgggttgttttgtgataagaataatgcagagaaagtctatgagatgctaaccgatatggaaaaagaagggaagaaacctgattccatcacttacaacactctgatttcgtttttcggtaaacacaaggacttcgagagtgttgagagaatgatggagcagatgagagaagacgggttagacccgactgtcacgacatatggagcggtgattgacgcttattgctcagtcggcgaattagacgaagcattgaagctctttaaggacatgggtttgcactcaaaggtcaatccgaacactgtaatatacaacattctcataaacgcattttctaagctggggaatttcgggcaagcgctctctctgaaagaggaaatgaagatgaagatggtgagacctaatgttgaaacttacaatgccttgtttaagtgtcttaacgagaaaacccaaggagagacattacttaaactgatggatgagatggtcgaacagtcttgtgaaccaaatcagatcacaatggagattctaatggagcgtctctcaggttctgatgagttagttaagctgaggaagtttatgcaaggctactctgttgcttcgccgaccgagaaagcttcacctttcgatgtctttagcttgggataatgttcttttagatacagtaaccattactataatgtttttaataatttcttgattatgcattttatataattac

SEQ ID NO: 99619 - protein, 766 aa, Arabidopsis thaliana; identical to SEQ ID NO: 41448
  peptide (1)..(766): Ceres Seq. ID no. 13603330
  misc_feature (477)..(511): Pfam Name: PPR repeat Pfam Description: PPR repeat
  misc_feature (297)..(761): Homolog of NCBI NO: 15242446 NR Description: pentatricopeptide (PPR) repeat-containing protein
  misc_feature (189)..(744): Homolog of NCBI NO: 15237662 NR Description: pentatricopeptide (PPR) repeat-containing protein
  misc_feature (162)..(730): Homolog of NCBI NO: 15221300 NR Description: pentatricopeptide (PPR) repeat-containing protein
  misc_feature (179)..(766): Homolog of NCBI NO: 34394343 NR Description: putative fertility restorer homologue [Oryza
  misc_feature (136)..(756): Homolog of NCBI NO: 11994279 NR Description: gb|AAD43616.1~gene_id:F16J14.3~strong similarity
  misc_feature (196)..(756): Homolog of NCBI NO: 15228763 NR Description: pentatricopeptide (PPR) repeat-containing protein
  misc_feature (327)..(733): Homolog of NCBI NO: 15218325 NR Description: pentatricopeptide (PPR) repeat-containing protein
  misc_feature (189)..(681): Homolog of NCBI NO: 37572999 NR Description: putative fertility restorer homologue [Oryza
  misc_feature (188)..(737): Homolog of NCBI NO: 25518293 NR Description: hypothetical protein F13K23.2 - Arabidopsis >gi|8698724|gb|AAF78482.1|AC012187_2 Contains similarity to an protein F16M19.7 gi|6598837 from Arabidopsis thaliana BAC
  misc_feature (266)..(728): Homolog of NCBI NO: 15234269 NR Description: hypothetical protein [Arabidopsis thaliana]

SEQ ID NO: 99620 - protein, 763 aa, Arabidopsis thaliana; identical to SEQ ID NO: 41449
  peptide (1)..(763): Ceres Seq. ID no. 13603331
  misc_feature (474)..(508): Pfam Name: PPR repeat Pfam Description: PPR repeat
  misc_feature (294)..(758): Homolog of NCBI NO: 15242446 NR Description: pentatricopeptide (PPR) repeat-containing protein
  misc_feature (186)..(741): Homolog of NCBI NO: 15237662 NR Description: pentatricopeptide (PPR) repeat-containing protein
  misc_feature (159)..(727): Homolog of NCBI NO: 15221300 NR Description: pentatricopeptide (PPR) repeat-containing protein
  misc_feature (176)..(763): Homolog of NCBI NO: 34394343 NR Description: putative fertility restorer homologue [Oryza
  misc_feature (133)..(753): Homolog of NCBI NO: 11994279 NR Description: gb|AAD43616.1~gene_id:F16J14.3~strong similarity
  misc_feature (193)..(753): Homolog of NCBI NO: 15228763 NR Description: pentatricopeptide (PPR) repeat-containing protein
  misc_feature (324)..(730): Homolog of NCBI NO: 15218325 NR Description: pentatricopeptide (PPR) repeat-containing protein
  misc_feature (186)..(678): Homolog of NCBI NO: 37572999 NR Description: putative fertility restorer homologue [Oryza
  misc_feature (185)..(734): Homolog of NCBI NO: 25518293 NR Description: hypothetical protein F13K23.2 - Arabidopsis >gi|8698724|gb|AAF78482.1|AC012187_2 Contains similarity to an protein F16M19.7 gi|6598837 from Arabidopsis thaliana BAC
  misc_feature (263)..(725): Homolog of NCBI NO: 15234269 NR Description: hypothetical protein [Arabidopsis thaliana]

SEQ ID NO: 99621 - protein, 602 aa, Arabidopsis thaliana; identical to SEQ ID NO: 41450
  peptide (1)..(602): Ceres Seq. ID no. 13603332
  misc_feature (313)..(347): Pfam Name: PPR repeat Pfam Description: PPR repeat
  misc_feature (133)..(597): Homolog of NCBI NO: 15242446 NR Description: pentatricopeptide (PPR) repeat-containing protein
  misc_feature (25)..(580): Homolog of NCBI NO: 15237662 NR Description: pentatricopeptide (PPR) repeat-containing protein
  misc_feature (1)..(566): Homolog of NCBI NO: 15221300 NR Description: pentatricopeptide (PPR) repeat-containing protein
  misc_feature (15)..(602): Homolog of NCBI NO: 34394343 NR Description: putative fertility restorer homologue [Oryza
  misc_feature (1)..(592): Homolog of NCBI NO: 11994279 NR Description: gb|AAD43616.1~gene_id:F16J14.3~strong similarity
  misc_feature (32)..(592): Homolog of NCBI NO: 15228763 NR Description: pentatricopeptide (PPR) repeat-containing protein
  misc_feature (163)..(569): Homolog of NCBI NO: 15218325 NR Description: pentatricopeptide (PPR) repeat-containing protein
  misc_feature (25)..(517): Homolog of NCBI NO: 37572999 NR Description: putative fertility restorer homologue [Oryza
  misc_feature (24)..(573): Homolog of NCBI NO: 25518293 NR Description: hypothetical protein F13K23.2 - Arabidopsis >gi|8698724|gb|AAF78482.1|AC012187_2 Contains similarity to an protein F16M19.7 gi|6598837 from Arabidopsis thaliana BAC
  misc_feature (102)..(564): Homolog of NCBI NO: 15234269 NR Description: hypothetical protein [Arabidopsis thaliana]

SEQ ID NO: 99622 - DNA, 836 bp, Arabidopsis thaliana
  misc_feature (1)..(836): Ceres Seq. ID no. 13603344
  misc_feature: MA Experiment ID: 108435 Result: Up-regulated in Transcription
  misc_feature: MA Experiment 108435 PARAMETER Experiment Name: At_stm_Mutants_cDNA_P Parameter: Plant Line Value: wt Landsburg vs stm
  misc_feature: MA Experiment 108435 PARAMETER Experiment Name: At_stm_Mutants_cDNA_P Parameter: Tissue Value: Shoot Apical Meristem Region
  misc_feature: MA Experiment ID: 20000069 Result: Down-regulated in Transcription
  misc_feature: MA Experiment 20000069 PARAMETER Experiment Name: At_100uM_ABA_Mutants_cDNA_P Parameter: Plant Line Value: CS23
  misc_feature: MA Experiment 20000069 PARAMETER Experiment Name: At_100uM_ABA_Mutants_cDNA_P Parameter: Timepoint (hr) Value: 6
  misc_feature: MA Experiment 20000069 PARAMETER Experiment Name: At_100uM_ABA_Mutants_cDNA_P Parameter: Tissue Value: Aerial
  misc_feature: MA Experiment 20000069 PARAMETER Experiment Name: At_100uM_ABA_Mutants_cDNA_P Parameter: Treatment Value: 100uM ABA vs. No Treatment
  misc_feature: MA Experiment ID: 20000071 Result: Down-regulated in Transcription
  misc_feature: MA Experiment 20000071 PARAMETER Experiment Name: At_100uM_ABA_Mutants_cDNA_P Parameter: Plant Line Value: CS8104
  misc_feature: MA Experiment 20000071 PARAMETER Experiment Name: At_100uM_ABA_Mutants_cDNA_P Parameter: Timepoint (hr) Value: 6
  misc_feature: MA Experiment 20000071 PARAMETER Experiment Name: At_100uM_ABA_Mutants_cDNA_P Parameter: Tissue Value: Aerial
  misc_feature: MA Experiment 20000071 PARAMETER Experiment Name: At_100uM_ABA_Mutants_cDNA_P Parameter: Treatment Value: 100uM ABA vs. No Treatment
  misc_feature: MA Experiment ID: 20000117 Result: Down-regulated in Transcription
  misc_feature: MA Experiment 20000117 PARAMETER Experiment Name: At_100uM_ABA_Mutants_cDNA_P Parameter: Plant Line Value: Columbia
  misc_feature: MA Experiment 20000117 PARAMETER Experiment Name: At_100uM_ABA_Mutants_cDNA_P Parameter: Timepoint (hr) Value: 6
  misc_feature: MA Experiment 20000117 PARAMETER Experiment Name: At_100uM_ABA_Mutants_cDNA_P Parameter: Tissue Value: Aerial
  misc_feature: MA Experiment 20000117 PARAMETER Experiment Name: At_100uM_ABA_Mutants_cDNA_P Parameter: Treatment Value: 100uM ABA vs. No Treatment
  misc_feature: MA Experiment ID: 20000437 Result: Down-regulated in Transcription
  misc_feature: MA Experiment 20000437 PARAMETER Experiment Name: At_Drought_P Parameter: Age (day) Value: 8
  misc_feature: MA Experiment 20000437 PARAMETER Experiment Name: At_Drought_P Parameter: Organism Value: A. thaliana
  misc_feature: MA Experiment 20000437 PARAMETER Experiment Name: At_Drought_P Parameter: Plant Line Value: WS
  misc_feature: MA Experiment 20000437 PARAMETER Experiment Name: At_Drought_P Parameter: Timepoint (hr) Value: 24
  misc_feature: MA Experiment 20000437 PARAMETER Experiment Name: At_Drought_P Parameter: Tissue Value: Whole Plant
  misc_feature: MA Experiment 20000437 PARAMETER Experiment Name: At_Drought_P Parameter: Treatment Value: Drought vs. No Drought
  misc_feature: MA Experiment ID: 20000439 Result: Down-regulated in Transcription
  misc_feature: MA Experiment 20000439 PARAMETER Experiment Name: At_Roots__P Parameter: Age (day) Value: 14 vs. 21
  misc_feature: MA Experiment 20000439 PARAMETER Experiment Name: At_Roots__P Parameter: Organism Value: A. thaliana
  misc_feature: MA Experiment 20000439 PARAMETER Experiment Name: At_Roots__P Parameter: Tissue Value: Roots vs. Whole Plant
  misc_feature: MA Experiment ID: 20000451 Result: Up-regulated in Transcription
  misc_feature: MA Experiment 20000451 PARAMETER Experiment Name: At_CS6879_Shoots-Roots_P Parameter: Age (day) Value: 14
  misc_feature: MA Experiment 20000451 PARAMETER Experiment Name: At_CS6879_Shoots-Roots_P Parameter: Organism Value: A. thaliana
  misc_feature: MA Experiment 20000451 PARAMETER Experiment Name: At_CS6879_Shoots-Roots_P Parameter: Plant Line Value: CS6879 vs. WS
  misc_feature: MA Experiment 20000451 PARAMETER Experiment Name: At_CS6879_Shoots-Roots_P Parameter: Tissue Value: Roots
  misc_feature: MA Experiment ID: 20001248 Result: Down-regulated in Transcription
  misc_feature: MA Experiment 20001248 PARAMETER Experiment Name: At_Far-red-induction_P Parameter: Age (day) Value: 7
  misc_feature: MA Experiment 20001248 PARAMETER Experiment Name: At_Far-red-induction_P Parameter: Light Value: Far-red vs. White
  misc_feature: MA Experiment 20001248 PARAMETER Experiment Name: At_Far-red-induction_P Parameter: Organism Value: A. thaliana
  misc_feature: MA Experiment 20001248 PARAMETER Experiment Name: At_Far-red-induction_P Parameter: Plant Line Value: Columbia
  misc_feature: MA Experiment 20001248 PARAMETER Experiment Name: At_Far-red-induction_P Parameter: Timepoint (hr) Value: 4
  misc_feature: MA Experiment 20001248 PARAMETER Experiment Name: At_Far-red-induction_P Parameter: Tissue Value: Whole Plant
acgatagcctctcatcttcttttttcctctccatcatcttctcttatcaactttagactcacaagcctcctctcatcttcaccataaccgaaaaaccaaacaaaaaatccttagataatcagatcttgatattatggatcatatcatcggctttatgggcacaacaaacatgtcacataacacaaaccttatgatcgctgccgcagccactaccactacgacctcttcgtcttcctcttcgtcctccggaggctcggggactaaccagctaagcaggtacgagaatcagaagagaagagattggaacactttcggacagtatctacgcaatcaccgtccaccactttctctctcccgttgcagtggtgctcatgttcttgaattcctcaggtacctcgaccaattcggcaagactaaggttcacacacacctatgtccgttcttcggacacccaaacccaccagcaccatgtgcctgtccactccgacaagcgtggggtagtctggacgcactcattggccgtcttagagctgcttttgaagagaacggtggttcaccagagacgaacccttttggtgcacgagccgttcgactctacctaagggaagtacgtgactcgcaggctaaagcacgtgggatcagctatgaaaaaaagaagcgcaagcgacctcctccgccactaccaccggctcagccggcgatttcaagtagccctaattaacattaagtcatgagtaagatgtttcaatgaactacgtttgtttacaaatttttatcaatgacgaacatgcacgagttcttttaaagtcacatgccctttcctaaacttttatttg

SEQ ID NO: 99623 - protein, 195 aa, Arabidopsis thaliana; identical to SEQ ID NO: 22865
  peptide (1)..(195): Ceres Seq. ID no. 13603345
  misc_feature (30)..(162): Pfam Name: Protein of unknown function (DUF640) Pfam Description: Protein of unknown function (DUF640)
  misc_feature (1)..(193): Homolog of NCBI NO: 18402578 NR Description: expressed protein [Arabidopsis thaliana]
  misc_feature (30)..(179): Homolog of NCBI NO: 38344650 NR Description: OSJNBb0072M01.12 [Oryza sativa (japonica
  misc_feature (30)..(182): Homolog of NCBI NO: 37535384 NR Description: hypothetical protein [Oryza sativa (japonica group)] >gi|10140752|gb|AAG13584.1| hypothetical protein [Oryza >gi|31432676|gb|AAP54281.1| hypothetical protein [Oryza sativa
  misc_feature (45)..(193): Homolog of NCBI NO: 34907938 NR Description: B1088C09.17 [Oryza sativa (japonica
  misc_feature (47)..(180): Homolog of NCBI NO: 18390725 NR Description: expressed protein [Arabidopsis thaliana]
  misc_feature (47)..(190): Homolog of NCBI NO: 15241821 NR Description: expressed protein [Arabidopsis thaliana]
  misc_feature (8)..(194): Homolog of NCBI NO: 15229310 NR Description: hypothetical protein [Arabidopsis thaliana]
  misc_feature (34)..(179): Homolog of NCBI NO: 15237680 NR Description: hypothetical protein [Arabidopsis thaliana] gb|AAC63835.1~gene_id:MQJ2.11~similar to unknown protein
  misc_feature (33)..(193): Homolog of NCBI NO: 18406012 NR Description: expressed protein [Arabidopsis thaliana]
  misc_feature (46)..(183): Homolog of NCBI NO: 18412120 NR Description: expressed protein [Arabidopsis thaliana]

SEQ ID NO: 99624 - protein, 188 aa, Arabidopsis thaliana; identical to SEQ ID NO: 22866
  peptide (1)..(188): Ceres Seq. ID no. 13603346
  misc_feature (23)..(155): Pfam Name: Protein of unknown function (DUF640) Pfam Description: Protein of unknown function (DUF640)
  misc_feature (1)..(186): Homolog of NCBI NO: 18402578 NR Description: expressed protein [Arabidopsis thaliana]
  misc_feature (23)..(172): Homolog of NCBI NO: 38344650 NR Description: OSJNBb0072M01.12 [Oryza sativa (japonica
  misc_feature (23)..(175): Homolog of NCBI NO: 37535384 NR Description: hypothetical protein [Oryza sativa (japonica group)] >gi|10140752|gb|AAG13584.1| hypothetical protein [Oryza >gi|31432676|gb|AAP54281.1| hypothetical protein [Oryza sativa
  misc_feature (38)..(186): Homolog of NCBI NO: 34907938 NR Description: B1088C09.17 [Oryza sativa (japonica
  misc_feature (40)..(173): Homolog of NCBI NO: 18390725 NR Description: expressed protein [Arabidopsis thaliana]
  misc_feature (40)..(183): Homolog of NCBI NO: 15241821 NR Description: expressed protein [Arabidopsis thaliana]
  misc_feature (1)..(187): Homolog of NCBI NO: 15229310 NR Description: hypothetical protein [Arabidopsis thaliana]
  misc_feature (27)..(172): Homolog of NCBI NO: 15237680 NR Description: hypothetical protein [Arabidopsis thaliana] gb|AAC63835.1~gene_id:MQJ2.11~similar to unknown protein
  misc_feature (26)..(186): Homolog of NCBI NO: 18406012 NR Description: expressed protein [Arabidopsis thaliana]
  misc_feature (39)..(176): Homolog of NCBI NO: 18412120 NR Description: expressed protein [Arabidopsis thaliana]

SEQ ID NO: 99625 - protein, 183 aa, Arabidopsis thaliana; identical to SEQ ID NO: 22867
  peptide (1)..(183): Ceres Seq. ID no. 13603347
  misc_feature (18)..(150): Pfam Name: Protein of unknown function (DUF640) Pfam Description: Protein of unknown function (DUF640)
  misc_feature (1)..(181): Homolog of NCBI NO: 18402578 NR Description: expressed protein [Arabidopsis thaliana]
  misc_feature (18)..(167): Homolog of NCBI NO: 38344650 NR Description: OSJNBb0072M01.12 [Oryza sativa (japonica
  misc_feature (18)..(170): Homolog of NCBI NO: 37535384 NR Description: hypothetical protein [Oryza sativa (japonica group)] >gi|10140752|gb|AAG13584.1| hypothetical protein [Oryza >gi|31432676|gb|AAP54281.1| hypothetical protein [Oryza sativa
  misc_feature (33)..(181): Homolog of NCBI NO: 34907938 NR Description: B1088C09.17 [Oryza sativa (japonica
  misc_feature (35)..(168): Homolog of NCBI NO: 18390725 NR Description: expressed protein [Arabidopsis thaliana]
  misc_feature (35)..(178): Homolog of NCBI NO: 15241821 NR Description: expressed protein [Arabidopsis thaliana]
  misc_feature (1)..(182): Homolog of NCBI NO: 15229310 NR Description: hypothetical protein [Arabidopsis thaliana]
  misc_feature (22)..(167): Homolog of NCBI NO: 15237680 NR Description: hypothetical protein [Arabidopsis thaliana] gb|AAC63835.1~gene_id:MQJ2.11~similar to unknown protein
  misc_feature (21)..(181): Homolog of NCBI NO: 18406012 NR Description: expressed protein [Arabidopsis thaliana]
  misc_feature (34)..(171): Homolog of NCBI NO: 18412120 NR Description: expressed protein [Arabidopsis thaliana]

SEQ ID NO: 99626 - DNA, 1110 bp, Arabidopsis thaliana
  misc_feature (1)..(1110): Ceres Seq. ID no. 13603350
  misc_feature: MA Experiment ID: 108435 Result: Down-regulated in Transcription
  misc_feature: MA Experiment 108435 PARAMETER Experiment Name: At_stm_Mutants_cDNA_P Parameter: Plant Line Value: wt Landsburg vs stm
  misc_feature: MA Experiment 108435 PARAMETER Experiment Name: At_stm_Mutants_cDNA_P Parameter: Tissue Value: Shoot Apical Meristem Region
  misc_feature: MA Experiment ID: 108461 Result: Up-regulated in Transcription
  misc_feature: MA Experiment 108461 PARAMETER Experiment Name: At_Germinating_Seeds_cDNA_P Parameter: Age (day) Value: 1 vs. 0
  misc_feature: MA Experiment 108461 PARAMETER Experiment Name: At_Germinating_Seeds_cDNA_P Parameter: Tissue Value: Germinating Seeds
  misc_feature: MA Experiment ID: 108462 Result: Up-regulated in Transcription
  misc_feature: MA Experiment 108462 PARAMETER Experiment Name: At_Germinating_Seeds_cDNA_P Parameter: Age (day) Value: 2 vs. 0
  misc_feature: MA Experiment 108462 PARAMETER Experiment Name: At_Germinating_Seeds_cDNA_P Parameter: Tissue Value: Germinating Seeds
  misc_feature: MA Experiment ID: 108463 Result: Up-regulated in Transcription
  misc_feature: MA Experiment 108463 PARAMETER Experiment Name: At_Germinating_Seeds_cDNA_P Parameter: Age (day) Value: 3 vs. 0
  misc_feature: MA Experiment 108463 PARAMETER Experiment Name: At_Germinating_Seeds_cDNA_P Parameter: Tissue Value: Germinating Seeds
  misc_feature: MA Experiment ID: 108464 Result: Up-regulated in Transcription
  misc_feature: MA Experiment 108464 PARAMETER Experiment Name: At_Germinating_Seeds_cDNA_P Parameter: Age (day) Value: 4 vs. 0
  misc_feature: MA Experiment 108464 PARAMETER Experiment Name: At_Germinating_Seeds_cDNA_P Parameter: Tissue Value: Germinating Seeds
  misc_feature: MA Experiment ID: 108573 Result: Up-regulated in Transcription
  misc_feature: MA Experiment 108573 PARAMETER Experiment Name: At_Drought_cDNA_P Parameter: Timepoint (hr) Value: 6
  misc_feature: MA Experiment 108573 PARAMETER Experiment Name: At_Drought_cDNA_P Parameter: Tissue Value: Aerial
  misc_feature: MA Experiment 108573 PARAMETER Experiment Name: At_Drought_cDNA_P Parameter: Treatment Value: Drought vs. No Drought
  misc_feature: MA Experiment ID: 108579 Result: Up-regulated in Transcription
  misc_feature: MA Experiment 108579 PARAMETER Experiment Name: At_4deg_Cold_cDNA_P Parameter: Temperature (deg C) Value: 4 vs. 22
  misc_feature: MA Experiment 108579 PARAMETER Experiment Name: At_4deg_Cold_cDNA_P Parameter: Timepoint (hr) Value: 6
  misc_feature: MA Experiment 108579 PARAMETER Experiment Name: At_4deg_Cold_cDNA_P Parameter: Tissue Value: Aerial
  misc_feature: MA Experiment ID: 108595 Result: Down-regulated in Transcription
  misc_feature: MA Experiment 108595 PARAMETER Experiment Name: At_Ler-pi_Ovule_cDNA_P Parameter: Plant Line Value: null
  misc_feature: MA Experiment ID: 20000113 Result: Up-regulated in Transcription
  misc_feature: MA Experiment 20000113 PARAMETER Experiment Name: At_42deg_Heat_cDNA_P Parameter: Temperature (deg C) Value: 42 vs. 22
  misc_feature: MA Experiment 20000113 PARAMETER Experiment Name: At_42deg_Heat_cDNA_P Parameter: Timepoint (hr) Value: 8
  misc_feature: MA Experiment 20000113 PARAMETER Experiment Name: At_42deg_Heat_cDNA_P Parameter: Tissue Value: Aerial
  misc_feature: MA Experiment ID: 20000180 Result: Up-regulated in Transcription
  misc_feature: MA Experiment 20000180 PARAMETER Experiment Name: At_Germinating_Seeds_P Parameter: Age (hr) Value: 24 vs. 0
  misc_feature: MA Experiment 20000180 PARAMETER Experiment Name: At_Germinating_Seeds_P Parameter: Tissue Value: Germinating Seeds
  misc_feature: MA Experiment ID: 20000265 Result: Down-regulated in Transcription
  misc_feature: MA Experiment 20000265 PARAMETER Experiment Name: At_Open_Flower_P Parameter: Age (day) Value: 21
  misc_feature: MA Experiment 20000265 PARAMETER Experiment Name: At_Open_Flower_P Parameter: Plant Line Value: WS
  misc_feature: MA Experiment 20000265 PARAMETER Experiment Name: At_Open_Flower_P Parameter: Tissue Value: Closed Flower vs. Whole Plant
  misc_feature: MA Experiment ID: 20000286 Result: Down-regulated in Transcription
  misc_feature: MA Experiment 20000286 PARAMETER Experiment Name: At_Open_Flower_P Parameter: Age (day) Value: 21
  misc_feature: MA Experiment 20000286 PARAMETER Experiment Name: At_Open_Flower_P Parameter: Plant Line Value: WS
  misc_feature: MA Experiment 20000286 PARAMETER Experiment Name: At_Open_Flower_P Parameter: Tissue Value: Half Open vs. Whole Plant
  misc_feature: MA Experiment ID: 20000439 Result: Down-regulated in Transcription
  misc_feature: MA Experiment 20000439 PARAMETER Experiment Name: At_Roots__P Parameter: Age (day) Value: 14 vs. 21
  misc_feature: MA Experiment 20000439 PARAMETER Experiment Name: At_Roots__P Parameter: Organism Value: A. thaliana
  misc_feature: MA Experiment 20000439 PARAMETER Experiment Name: At_Roots__P Parameter: Tissue Value: Roots vs. Whole Plant
  misc_feature: MA Experiment ID: 20000495 Result: Down-regulated in Transcription
  misc_feature: MA Experiment 20000495 PARAMETER Experiment Name: At_Guard_Cells_P Parameter: Harvest Date Value: 8/2/2002
  misc_feature: MA Experiment 20000495 PARAMETER Experiment Name: At_Guard_Cells_P Parameter: Organism Value: A. thaliana
  misc_feature: MA Experiment 20000495 PARAMETER Experiment Name: At_Guard_Cells_P Parameter: Tissue Value: Guard Cells vs. Leaves
  misc_feature: MA Experiment ID: 20001248 Result: Down-regulated in Transcription
  misc_feature: MA Experiment 20001248 PARAMETER Experiment Name: At_Far-red-induction_P Parameter: Age (day) Value: 7
  misc_feature: MA Experiment 20001248 PARAMETER Experiment Name: At_Far-red-induction_P Parameter: Light Value: Far-red vs. White
  misc_feature: MA Experiment 20001248 PARAMETER Experiment Name: At_Far-red-induction_P Parameter: Organism Value: A. thaliana
  misc_feature: MA Experiment 20001248 PARAMETER Experiment Name: At_Far-red-induction_P Parameter: Plant Line Value: Columbia
  misc_feature: MA Experiment 20001248 PARAMETER Experiment Name: At_Far-red-induction_P Parameter: Timepoint (hr) Value: 4
  misc_feature: MA Experiment 20001248 PARAMETER Experiment Name: At_Far-red-induction_P Parameter: Tissue Value: Whole Plant
  misc_feature: MA Experiment ID: 20001450 Result: Down-regulated in Transcription
  misc_feature: MA Experiment 20001450 PARAMETER Experiment Name: At_Far-red-induction_P Parameter: Age (day) Value: 7
  misc_feature: MA Experiment 20001450 PARAMETER Experiment Name: At_Far-red-induction_P Parameter: Light Value: Far-red vs. White
  misc_feature: MA Experiment 20001450 PARAMETER Experiment Name: At_Far-red-induction_P Parameter: Organism Value: A. thaliana
  misc_feature: MA Experiment 20001450 PARAMETER Experiment Name: At_Far-red-induction_P Parameter: Plant Line Value: Columbia
  misc_feature: MA Experiment 20001450 PARAMETER Experiment Name: At_Far-red-induction_P Parameter: Timepoint (hr) Value: 8
  misc_feature: MA Experiment 20001450 PARAMETER Experiment Name: At_Far-red-induction_P Parameter: Tissue Value: Whole Plant
  misc_feature: MA Experiment ID: 20001451 Result: Down-regulated in Transcription
  misc_feature: MA Experiment 20001451 PARAMETER Experiment Name: At_Far-red-induction_P Parameter: Age (day) Value: 7
  misc_feature: MA Experiment 20001451 PARAMETER Experiment Name: At_Far-red-induction_P Parameter: Light Value: Far-red vs. White
  misc_feature: MA Experiment 20001451 PARAMETER Experiment Name: At_Far-red-induction_P Parameter: Organism Value: A. thaliana
  misc_feature: MA Experiment 20001451 PARAMETER Experiment Name: At_Far-red-induction_P Parameter: Plant Line Value: Columbia
  misc_feature: MA Experiment 20001451 PARAMETER Experiment Name: At_Far-red-induction_P Parameter: Timepoint (hr) Value: 24
  misc_feature: MA Experiment 20001451 PARAMETER Experiment Name: At_Far-red-induction_P Parameter: Tissue Value: Whole Plant
  misc_feature: MA Experiment ID: 20001557 Result: Down-regulated in Transcription
  misc_feature: MA Experiment 20001557 PARAMETER Experiment Name: At_Drought_Soil_Dry_P Parameter: Age (day) Value: 27
  misc_feature: MA Experiment 20001557 PARAMETER Experiment Name: At_Drought_Soil_Dry_P Parameter: Organism Value: A. thaliana
  misc_feature: MA Experiment 20001557 PARAMETER Experiment Name: At_Drought_Soil_Dry_P Parameter: Plant Line Value: WS
  misc_feature: MA Experiment 20001557 PARAMETER Experiment Name: At_Drought_Soil_Dry_P Parameter: Post Timepoint (hr) Value: 3
  misc_feature: MA Experiment 20001557 PARAMETER Experiment Name: At_Drought_Soil_Dry_P Parameter: Post-Treatment Value: Re-Water vs. No Drought
  misc_feature: MA Experiment 20001557 PARAMETER Experiment Name: At_Drought_Soil_Dry_P Parameter: Timepoint (day) Value: 13
  misc_feature: MA Experiment 20001557 PARAMETER Experiment Name: At_Drought_Soil_Dry_P Parameter: Treatment Value: Drought vs. No Drought
  misc_feature: MA Experiment ID: 20001558 Result: Down-regulated in Transcription
  misc_feature: MA Experiment 20001558 PARAMETER Experiment Name: At_Drought_Soil_Dry_P Parameter: Age (day) Value: 27
  misc_feature: MA Experiment 20001558 PARAMETER Experiment Name: At_Drought_Soil_Dry_P Parameter: Organism Value: A. thaliana
  misc_feature: MA Experiment 20001558 PARAMETER Experiment Name: At_Drought_Soil_Dry_P Parameter: Plant Line Value: WS
  misc_feature: MA Experiment 20001558 PARAMETER Experiment Name: At_Drought_Soil_Dry_P Parameter: Post Timepoint (hr) Value: 6
  misc_feature: MA Experiment 20001558 PARAMETER Experiment Name: At_Drought_Soil_Dry_P Parameter: Post-Treatment Value: Re-Water vs. No Drought
  misc_feature: MA Experiment 20001558 PARAMETER Experiment Name: At_Drought_Soil_Dry_P Parameter: Timepoint (day) Value: 13
  misc_feature: MA Experiment 20001558 PARAMETER Experiment Name: At_Drought_Soil_Dry_P Parameter: Treatment Value: Drought vs. No Drought
  misc_feature: MA Experiment ID: 20001560 Result: Down-regulated in Transcription
  misc_feature: MA Experiment 20001560 PARAMETER Experiment Name: At_Drought_Soil_Dry_P Parameter: Age (day) Value: 28
  misc_feature: MA Experiment 20001560 PARAMETER Experiment Name: At_Drought_Soil_Dry_P Parameter: Organism Value: A. thaliana
  misc_feature: MA Experiment 20001560 PARAMETER Experiment Name: At_Drought_Soil_Dry_P Parameter: Plant Line Value: WS
  misc_feature: MA Experiment 20001560 PARAMETER Experiment Name: At_Drought_Soil_Dry_P Parameter: Post Timepoint (hr) Value: None
  misc_feature: MA Experiment 20001560 PARAMETER Experiment Name: At_Drought_Soil_Dry_P Parameter: Post-Treatment Value: None
  misc_feature: MA Experiment 20001560 PARAMETER Experiment Name: At_Drought_Soil_Dry_P Parameter: Timepoint (day) Value: 14
  misc_feature: MA Experiment 20001560 PARAMETER Experiment Name: At_Drought_Soil_Dry_P Parameter: Treatment Value: Drought vs. No Drought
ataattaaagtcttcttcttcttcttcttctctacaaattatctcactctcttcgtttttttttccttctcaacaatggcgacttcttctactttctcgtcactactaccttcaccaccagctcttctttccgaccaccgttctcctccaccatccatcagatactccttttctcccttaactactccaaaatcgtctcgtttgggtttcactgtaccggagaagagaaacctcgctgctaattcgtctctcgttgaagtatccattggcggagaaagtgacccaccaccatcatcatctggatcaggaggagacgacaagcaaattgcattactcaaactcaaattacttagtgtagtttcgggattaaacagaggacttgtggcgagtgttgatgatttagaaagagctgaagtggctgctaaagaacttgaaactgctgggggaccggttgatttaaccgatgatcttgataagcttcaagggaaatggaggctgttgtatagtagtgcgttctcttctcggtctttaggtggtagccgtcctggtctacctactggacgtttgatccctgttactcttggccaggtgtttcaacggattgatgtgtttagcaaagattttgataacatagcagaggtggaattaggagccccttggccatttccgccattagaagccactgcgacattggcacacaagtttgaactcttaggcacttgcaagatcaagataacatttgagaaaacaactgtgaagacatcgggaaacttgtcgcagattcctccgtttgatatcccgaggcttcccgacagtttcagaccatcgtcaaaccctggaactggggatttcgaagttacctatgttgatgataccatgcgcataactcgcggggacagaggtgaacttagggtattcgtcattgcttaattctcaaagctttgacatgtaaagataaataaatactttctgcttgatgcagtctcatgagttttgtacaaatcatgtgaacatataaatgcgctttataagtaaatgagtgtcttgttcaatgaatcatatgaaagaatttgtatgactcagaaaattggacaatgatatagaccttcc

SEQ ID NO: 99627 - protein, 309 aa, Arabidopsis thaliana
  peptide (1)..(309): Ceres Seq. ID no. 13603351
  misc_feature (110)..(307): Pfam Name: PAP_fibrillin Pfam Description: PAP_fibrillin
  misc_feature (26)..(309): Homolog of NCBI NO: 18403751 NR Description: plastid-lipid associated protein PAP/fibrillin [Arabidopsis thaliana] >gi|11994325|dbj|BAB02284.1|
  misc_feature (26)..(309): Homolog of NCBI NO: 21592536 NR Description: unknown [Arabidopsis thaliana]
  misc_feature (111)..(305): Homolog of NCBI NO: 22297962 NR Description: fibrillin [Thermosynechococcus elongatus BP-1]
  misc_feature (113)..(309): Homolog of NCBI NO: 16329838 NR Description: fibrillin [Synechocystis sp. PCC 6803]
  misc_feature (111)..(309): Homolog of NCBI NO: 17231810 NR Description: fibrillin [Nostoc sp. PCC 7120]
  misc_feature (113)..(309): Homolog of NCBI NO: 5020103 NR Description: fibrillin [Nostoc sp. PCC 8009]
  misc_feature (113)..(307): Homolog of NCBI NO: 23041005 NR Description: hypothetical protein [Trichodesmium erythraeum
  misc_feature (40)..(173): Homolog of NCBI NO: 30688146 NR Description: plastid-lipid associated protein PAP/fibrillin [Arabidopsis thaliana] >gi|9279612|dbj|BAB01070.1| protein [Arabidopsis thaliana] >gi|17473675|gb|AAL38294.1|
  misc_feature (273)..(309): Homolog of NCBI NO: 30688146 NR Description: plastid-lipid associated protein PAP/fibrillin [Arabidopsis thaliana] >gi|9279612|dbj|BAB01070.1| protein [Arabidopsis thaliana] >gi|17473675|gb|AAL38294.1|
  misc_feature (69)..(173): Homolog of NCBI NO: 17065226 NR Description: Unknown protein [Arabidopsis thaliana]
IIKVFFFFFFSTNYLTLFVFFSFSTMATSSTFSSLLPSPPALLSDHRSPPPSIRYSFSPLTTPKSSRLGFTVPEKRNLAANSSLVEVSIGGESDPPPSSSGSGGDDKQIALLKLKLLSVVSGLNRGLVASVDDLERAEVAAKELETAGGPVDLTDDLDKLQGKWRLLYSSAFSSRSLGGSRPGLPTGRLIPVTLGQVFQRIDVFSKDFDNIAEVELGAPWPFPPLEATATLAHKFELLGTCKIKITFEKTTVKTSGNLSQIPPFDIPRLPDSFRPSSNPGTGDFEVTYVDDTMRITRGDRGELRVFVIA

SEQ ID NO: 99628 - protein, 284 aa, Arabidopsis thaliana
  peptide (1)..(284): Ceres Seq. ID no. 13603352
  misc_feature (85)..(282): Pfam Name: PAP_fibrillin Pfam Description: PAP_fibrillin
  misc_feature (1)..(284): Homolog of NCBI NO: 18403751 NR Description: plastid-lipid associated protein PAP/fibrillin [Arabidopsis thaliana] >gi|11994325|dbj|BAB02284.1|
  misc_feature (1)..(284): Homolog of NCBI NO: 21592536 NR Description: unknown [Arabidopsis thaliana]
  misc_feature (86)..(280): Homolog of NCBI NO: 22297962 NR Description: fibrillin [Thermosynechococcus elongatus BP-1]
  misc_feature (88)..(284): Homolog of NCBI NO: 16329838 NR Description: fibrillin [Synechocystis sp. PCC 6803]
  misc_feature (86)..(284): Homolog of NCBI NO: 17231810 NR Description: fibrillin [Nostoc sp. PCC 7120]
  misc_feature (88)..(284): Homolog of NCBI NO: 5020103 NR Description: fibrillin [Nostoc sp. PCC 8009]
  misc_feature (88)..(282): Homolog of NCBI NO: 23041005 NR Description: hypothetical protein [Trichodesmium erythraeum
  misc_feature (15)..(148): Homolog of NCBI NO: 30688146 NR Description: plastid-lipid associated protein PAP/fibrillin [Arabidopsis thaliana] >gi|9279612|dbj|BAB01070.1| protein [Arabidopsis thaliana] >gi|17473675|gb|AAL38294.1|
  misc_feature (248)..(284): Homolog of NCBI NO: 30688146 NR Description: plastid-lipid associated protein PAP/fibrillin [Arabidopsis thaliana] >gi|9279612|dbj|BAB01070.1| protein [Arabidopsis thaliana] >gi|17473675|gb|AAL38294.1|
  misc_feature (44)..(148): Homolog of NCBI NO: 17065226 NR Description: Unknown protein [Arabidopsis thaliana]
MATSSTFSSLLPSPPALLSDHRSPPPSIRYSFSPLTTPKSSRLGFTVPEKRNLAANSSLVEVSIGGESDPPPSSSGSGGDDKQIALLKLKLLSVVSGLNRGLVASVDDLERAEVAAKELETAGGPVDLTDDLDKLQGKWRLLYSSAFSSRSLGGSRPGLPTGRLIPVTLGQVFQRIDVFSKDFDNIAEVELGAPWPFPPLEATATLAHKFELLGTCKIKITFEKTTVKTSGNLSQIPPFDIPRLPDSFRPSSNPGTGDFEVTYVDDTMRITRGDRGELRVFVIA

SEQ ID NO: 99629 - DNA, 945 bp, Arabidopsis thaliana
  misc_feature (1)..(945): Ceres Seq. ID no. 13603353
  misc_feature: MA Experiment ID: 108488 Result: Down-regulated in Transcription
  misc_feature: MA Experiment ID: 20000184 Result: Down-regulated in Transcription
  misc_feature: MA Experiment 20000184 PARAMETER Experiment Name: At_Shoots__P Parameter: Age (day) Value: 7
  misc_feature: MA Experiment 20000184 PARAMETER Experiment Name: At_Shoots__P Parameter: Tissue Value: Shoots vs. Whole Plant
  misc_feature: MA Experiment ID: 20001450 Result: Up-regulated in Transcription
  misc_feature: MA Experiment 20001450 PARAMETER Experiment Name: At_Far-red-induction_P Parameter: Age (day) Value: 7
  misc_feature: MA Experiment 20001450 PARAMETER Experiment Name: At_Far-red-induction_P Parameter: Light Value: Far-red vs. White
  misc_feature: MA Experiment 20001450 PARAMETER Experiment Name: At_Far-red-induction_P Parameter: Organism Value: A. thaliana
  misc_feature: MA Experiment 20001450 PARAMETER Experiment Name: At_Far-red-induction_P Parameter: Plant Line Value: Columbia
  misc_feature: MA Experiment 20001450 PARAMETER Experiment Name: At_Far-red-induction_P Parameter: Timepoint (hr) Value: 8
  misc_feature: MA Experiment 20001450 PARAMETER Experiment Name: At_Far-red-induction_P Parameter: Tissue Value: Whole Plant
  misc_feature: MA Experiment ID: 20001557 Result: Down-regulated in Transcription
  misc_feature: MA Experiment 20001557 PARAMETER Experiment Name: At_Drought_Soil_Dry_P Parameter: Age (day) Value: 27
  misc_feature: MA Experiment 20001557 PARAMETER Experiment Name: At_Drought_Soil_Dry_P Parameter: Organism Value: A. thaliana
  misc_feature: MA Experiment 20001557 PARAMETER Experiment Name: At_Drought_Soil_Dry_P Parameter: Plant Line Value: WS
  misc_feature: MA Experiment 20001557 PARAMETER Experiment Name: At_Drought_Soil_Dry_P Parameter: Post Timepoint (hr) Value: 3
  misc_feature: MA Experiment 20001557 PARAMETER Experiment Name: At_Drought_Soil_Dry_P Parameter: Post-Treatment Value: Re-Water vs. No Drought
  misc_feature: MA Experiment 20001557 PARAMETER Experiment Name: At_Drought_Soil_Dry_P Parameter: Timepoint (day) Value: 13
  misc_feature: MA Experiment 20001557 PARAMETER Experiment Name: At_Drought_Soil_Dry_P Parameter: Treatment Value: Drought vs. No Drought
gtctgtctgagtggattcgtatactatattgtgatgagagtcaccacaacaaattcgttgacatgagcctttcatatatttttgaattatactgaactaaaacccatttaaaagcccatttaaagacccattataagagtagagatactcagcccatttaaagataaaattacgtcatagcgatttttccattaaaagagtgaggaagagacaaaagtgattgattggtcagaaaaaatggaagcggcgaagaaacagagtgttacaaatcagcttctcgccgtgaaatcagcttccggcaagacttttagccagttagccgcggagacaggtctaaccaacgtatacgtagctcagcttctccgtcgtcaagctcagctcaaaccggacacagtcccaaagcttaaggaagctttaccagctctgaccgatgaactaatcggagatatgatgtctcctccgtggagatcctatgatcctaatctcatccaagaacccactatctacaggttgaatgaagcagtgatgcattttggtgagagtataaaggagattatcaatgaagattttggagatggcatcatgtcggcgatagatttctattgctctgtcgacaaaatcaaaggagtggatggtaacaatcgcgtggttgtgacgcttgatggaaagtatctttcgcattccgaacagaggacggagaatatggtctcaaggctaaatctcaagggaggtacaagcgaatgataagaaagcctttacgtatccatgaaggccttattgtaagtggtaacgttgtaatacctatgtgtttgtttatctgtaatatatgcaacttcagcatctagattaaaagctgtttcaggttgaataacagtgaataaacaaaacttataaaacctttctatgtttatctttaacatcgtaatcgagttccgattcatgctt

SEQ ID NO: 99630 - protein, 168 aa, Arabidopsis thaliana; identical to SEQ ID NO: 34779
  peptide (1)..(168): Ceres Seq. ID no. 13603354
  misc_feature (78)..(151): Pfam Name: Cyanate lyase C-terminal domain Pfam Description: Cyanate lyase C-terminal domain
  misc_feature (1)..(168): Homolog of NCBI NO: 15229458 NR Description: cyanate lyase (CYN) [Arabidopsis thaliana] Cyanate hydratase (Cyanase) (Cyanate lyase) (Cyanate hydrolase) cyanase [Arabidopsis thaliana] >gi|3287503|dbj|BAA31224.1|
  misc_feature (1)..(168): Homolog of NCBI NO: 21554171 NR Description: cyanate lyase (CYN) [Arabidopsis thaliana]
  misc_feature (9)..(163): Homolog of NCBI NO: 20137963 NR Description: Cyanate hydratase (Cyanase) (Cyanate lyase)
  misc_feature (9)..(90): Homolog of NCBI NO: 37535282 NR Description: putative cyanase [Oryza sativa (japonica
  misc_feature (91)..(163): Homolog of NCBI NO: 37535282 NR Description: putative cyanase [Oryza sativa (japonica
  misc_feature (1)..(148): Homolog of NCBI NO: 28869134 NR Description: cyanate lyase [Pseudomonas syringae pv. tomato DC3000] >gi|28852374|gb|AAO55448.1| cyanate lyase [Pseudomonas
  misc_feature (1)..(150): Homolog of NCBI NO: 16331651 NR Description: cyanate lyase [Synechocystis sp. PCC 6803]
  misc_feature (8)..(150): Homolog of NCBI NO: 2498272 NR Description: Cyanate hydratase (Cyanase) (Cyanate lyase) hydrolase) >gi|1389875|gb|AAB02940.1| cyanate lyase
  misc_feature (4)..(148): Homolog of NCBI NO: 23471974 NR Description: hypothetical protein [Pseudomonas syringae pv.
  misc_feature (8)..(150): Homolog of NCBI NO: 33867020 NR Description: cyanate lyase [Synechococcus sp. WH 8102]

SEQ ID NO: 99631 - protein, 98 aa, Arabidopsis thaliana; identical to SEQ ID NO: 34780
  peptide (1)..(98): Ceres Seq. ID no. 13603355
  misc_feature (8)..(81): Pfam Name: Cyanate lyase C-terminal domain Pfam Description: Cyanate lyase C-terminal domain
  misc_feature (1)..(98): Homolog of NCBI NO: 15229458 NR Description: cyanate lyase (CYN) [Arabidopsis thaliana] Cyanate hydratase (Cyanase) (Cyanate lyase) (Cyanate hydrolase) cyanase [Arabidopsis thaliana] >gi|3287503|dbj|BAA31224.1|
  misc_feature (1)..(98): Homolog of NCBI NO: 21554171 NR Description: cyanate lyase (CYN) [Arabidopsis thaliana]
  misc_feature (1)..(93): Homolog of NCBI NO: 20137963 NR Description: Cyanate hydratase (Cyanase) (Cyanate lyase)
  misc_feature (1)..(20): Homolog of NCBI NO: 37535282 NR Description: putative cyanase [Oryza sativa (japonica
  misc_feature (21)..(93): Homolog of NCBI NO: 37535282 NR Description: putative cyanase [Oryza sativa (japonica
  misc_feature (1)..(78): Homolog of NCBI NO: 28869134 NR Description: cyanate lyase [Pseudomonas syringae pv. tomato DC3000] >gi|28852374|gb|AAO55448.1| cyanate lyase [Pseudomonas
  misc_feature (1)..(80): Homolog of NCBI NO: 16331651 NR Description: cyanate lyase [Synechocystis sp. PCC 6803]
  misc_feature (1)..(80): Homolog of NCBI NO: 2498272 NR Description: Cyanate hydratase (Cyanase) (Cyanate lyase) hydrolase) >gi|1389875|gb|AAB02940.1| cyanate lyase
  misc_feature (1)..(78): Homolog of NCBI NO: 23471974 NR Description: hypothetical protein [Pseudomonas syringae pv.
  misc_feature (1)..(80): Homolog of NCBI NO: 33867020 NR Description: cyanate lyase [Synechococcus sp. WH 8102]

SEQ ID NO: 99632 - protein, 97 aa, Arabidopsis thaliana; identical to SEQ ID NO: 34781
  peptide (1)..(97): Ceres Seq. ID no. 13603356
  misc_feature (7)..(80): Pfam Name: Cyanate lyase C-terminal domain Pfam Description: Cyanate lyase C-terminal domain
  misc_feature (1)..(97): Homolog of NCBI NO: 15229458 NR Description: cyanate lyase (CYN) [Arabidopsis thaliana] Cyanate hydratase (Cyanase) (Cyanate lyase) (Cyanate hydrolase) cyanase [Arabidopsis thaliana] >gi|3287503|dbj|BAA31224.1|
  misc_feature (1)..(97): Homolog of NCBI NO: 21554171 NR Description: cyanate lyase (CYN) [Arabidopsis thaliana]
  misc_feature (1)..(92): Homolog of NCBI NO: 20137963 NR Description: Cyanate hydratase (Cyanase) (Cyanate lyase)
  misc_feature (1)..(19): Homolog of NCBI NO: 37535282 NR Description: putative cyanase [Oryza sativa (japonica
  misc_feature (20)..(92): Homolog of NCBI NO: 37535282 NR Description: putative cyanase [Oryza sativa (japonica
  misc_feature (1)..(77): Homolog of NCBI NO: 28869134 NR Description: cyanate lyase [Pseudomonas syringae pv. tomato DC3000] >gi|28852374|gb|AAO55448.1| cyanate lyase [Pseudomonas
  misc_feature (1)..(79): Homolog of NCBI NO: 16331651 NR Description: cyanate lyase [Synechocystis sp. PCC 6803]
  misc_feature (1)..(79): Homolog of NCBI NO: 2498272 NR Description: Cyanate hydratase (Cyanase) (Cyanate lyase) hydrolase) >gi|1389875|gb|AAB02940.1| cyanate lyase
  misc_feature (1)..(77): Homolog of NCBI NO: 23471974 NR Description: hypothetical protein [Pseudomonas syringae pv.
  misc_feature (1)..(79): Homolog of NCBI NO: 33867020 NR Description: cyanate lyase [Synechococcus sp. WH 8102]

SEQ ID NO: 99633 - DNA, 3149 bp, Arabidopsis thaliana
  misc_feature (1)..(3149): Ceres Seq. ID no. 13603357
  misc_feature: MA Experiment ID: 20000307 Result: Up-regulated in Transcription
  misc_feature: MA Experiment 20000307 PARAMETER Experiment Name: At_Germinating_Seeds_Sub_P Parameter: Age (hr) Value: 24 vs. 0
  misc_feature: MA Experiment 20000307 PARAMETER Experiment Name: At_Germinating_Seeds_Sub_P Parameter: Organism Value: A. thaliana
  misc_feature: MA Experiment 20000307 PARAMETER Experiment Name: At_Germinating_Seeds_Sub_P Parameter: Plant Line Value: WS
  misc_feature: MA Experiment 20000307 PARAMETER Experiment Name: At_Germinating_Seeds_Sub_P Parameter: Tissue Value: Germinating Seeds
  misc_feature: MA Experiment ID: 20000314 Result: Up-regulated in Transcription
  misc_feature: MA Experiment 20000314 PARAMETER Experiment Name: At_14day_Shoots-Roots_Sub_P Parameter: Age (day) Value: 14
  misc_feature: MA Experiment 20000314 PARAMETER Experiment Name: At_14day_Shoots-Roots_Sub_P Parameter: Organism Value: A. thaliana
  misc_feature: MA Experiment 20000314 PARAMETER Experiment Name: At_14day_Shoots-Roots_Sub_P Parameter: Plant Line Value: WS
  misc_feature: MA Experiment 20000314 PARAMETER Experiment Name: At_14day_Shoots-Roots_Sub_P Parameter: Tissue Value: Roots vs. Whole Plant
  misc_feature: MA Experiment ID: 20000328 Result: Down-regulated in Transcription
  misc_feature: MA Experiment 20000328 PARAMETER Experiment Name: At_42deg_Heat_Sub_P Parameter: Age (day) Value: 14
  misc_feature: MA Experiment 20000328 PARAMETER Experiment Name: At_42deg_Heat_Sub_P Parameter: Organism Value: A. thaliana
  misc_feature: MA Experiment 20000328 PARAMETER Experiment Name: At_42deg_Heat_Sub_P Parameter: Plant Line Value: WS
  misc_feature: MA Experiment 20000328 PARAMETER Experiment Name: At_42deg_Heat_Sub_P Parameter: Temperature (deg C) Value: 42 vs. 22
  misc_feature: MA Experiment 20000328 PARAMETER Experiment Name: At_42deg_Heat_Sub_P Parameter: Timepoint (hr) Value: 6
  misc_feature: MA Experiment 20000328 PARAMETER Experiment Name: At_42deg_Heat_Sub_P Parameter: Tissue Value: Aerial
aatgtggcttggcttatctcctcagcacaagtgtttcctctttactcttcaaatccttcttcattctcccattcacaattccttcatttttcatttttaacttatcctccatttttttttctgaaaacacacaaaaaaatatattcggttttagaattccaagaaatccgggaatgagcatatctctctagctagactcattccagcaaactctgaatcaatttcccattttcagatccaaatccattgtgttaaaaagagggattaacaaaattgaatagttcttaacaaamaattagaagaaaaaaaaagaggagaaacaaaatgaaagtggcagttataggaagtggtataagtggattaggaagtgcttacgtacttgcgaatcaaggagttaaagaagttgtgttgtacgagaaagaagagtcattaggaggccatgccaagacggtgcgtttcgatggcgttgacttggatcttggtttcatggtctttaatcgtgttacatatccaaacatgatagagttcttcgagaaccttggagtagagatggaggtttcagacatgtctttcgcagtgagccttgacaatggcaaaggttgtgaatggggaagccgcaacggtgtctcgggcttatttgctcaaaagaagaacgttttaaatccgtatttctggcaaatgatcagagaaattgttagatttaaagaagacgtcttaaattacattgagaagcttgagggtaaccccgatatcgatcgaaaggaaaccttaggagaatttctcaatacacgtggatactctgagttgtttcagcaagcttacttagtaccgatatgcggttcgatatggtcatgcccatcagatggtgtcttaagcttctctgcttactctgttctttcgttttgttgcaaccaccaccttcttcagatctttgggaggccacagtggctaactgttgcaggacgttctcagacttacgtcgcaaaggttagggcagaattggagagactaggatgcaagatcagaacaagctgcgacgtaaaatctgtttcgacatccgaaaatggttgtgtaactgttacaagtggagatgggtctgaagaagtattcgataggtgcatattggctatgcacgccccagatgctctgagattgcttggtgaagaagttacatttgacgaatctagggttcttggtgctttccaatacgtttacagcgatatatatctccatcatgacattgatttgatgccacggaacaaagcagcgtggagtgcgtggaatttcttgggaagtacggaaaagaaagtatgtgtaacatactggctcaatatacttcagaaccttggcgagaacagtgaaccattctttgtaacacttaacccagacgagaccccaaagaaagcattgctcaaatggaccactggtcaccctgtaccatcagttgcagcttcgatagcttcacaagagcttcaccagattcaaggcaaacgtaacatatggttctgtggtgcatatcagggctatggtttccatgaagacgggctaaaggccggtatggcggctgcacgaggtttgttagggaaagaaacagctcttctgaacaatccgcgacatatggtcccttccttgacagaaacaggagctcggcttttcgttactagattcttgggacaatttatatcaaccggttctgtaacaatactagaagaaggaggaacaatgttcacattcggagggaaggattctacttgtcctctgaaatctatcctcaagattcacagtcctcaattttactggaaggttatgacacaagcggatttaggacttgcagatgcttatatcaatggagatttttctttcgttgataaagaatcaggacttttaaatctgattatgattctcattgctaacagagatacaaaatcaaatcttactaagaaaaggggatggtggacaccgatgtttttaactgcgggtttagcatctgcaaagtattttctaaagcatgtctctaggcagaacactctaacacaagctcgtagaaacatttctcgtcactatgaccttagcaacgagcttttcggtttgttcttggatgataccatgacttactcctcggcagtattcaagtcggatgatgaggatctgagaactgcacagatgagaaaaatatctcttctgattgataaggcgagaatagagaaggaccatgaggttttagagataggatgtggatggggaactttggccatagaagttgtgagaagaactggatgcaaatacaccggcattacgctatctattgagcagcttaaatatgctgaagaaaaagtgaaagaagctggacttcaggaccggattacttttgagctccgcgattatcgccaactatctgatgctcacaaatatgacagaattatatcttgcgagatgctagaagcggtcggacatgagtttatggagatgtttttcagtcgatgtgaagccgcacttgctgaagacggcctaatggtcttgcagttcatatcgacacccgaagagcgttacaatgagtacagactaagttcagatttcattaaagaatacatattccctggtgcatgcgttccttctttagccaaagtcacttcagccatgtcctcttcttctaggctatgcattgaacatgttgagaacattgggattcattactaccaaacattgagattgtggaggaagaacttcttggagagacagaaacaaatcatggctcttggatttgatgataaattcgtaaggacatgggaatattattttgattattgcgcagctggattcaagactcgtactcttggagactaccagttggtgttctcgcgtccagggaacgtagctgcatttgcggattcataccgaggatttccttctgcttattgtgtctcttgagaggcatccacaacgtttgattgcttatatttttcgatctatacaatgtttgrttgacctgaaatactagtattgattattgatttgtttggtgtgccaatttgtgaaagtttgttgaataaaagagagatttactttggwaaaaaataagcagtactcgtggagctttatgaccaattcatacactccatgcacaatcttgtatgcgaaacctttttgac

SEQ ID NO: 99634 - protein, 867 aa, Arabidopsis thaliana
  peptide (1)..(867): Ceres Seq. ID no. 15218796
  misc_feature (10)..(268): Pfam Name: Flavin containing amine oxidoreductase Pfam Description: Flavin containing amine oxidoreductase
  misc_feature (1)..(867): Homolog of NCBI NO: 21069167 NR Description: cyclopropane synthase [Sterculia foetida]
  misc_feature (59)..(741): Homolog of NCBI NO: 34393848 NR Description: putative cyclopropane synthase [Oryza sativa
  misc_feature (721)..(863): Homolog of NCBI NO: 34393848 NR Description: putative cyclopropane synthase [Oryza sativa
  misc_feature (467)..(855): Homolog of NCBI NO: 15229454 NR Description: cyclopropane-fatty-acyl-phospholipid synthase
  misc_feature (412)..(842): Homolog of NCBI NO: 11994310 NR Description: cyclopocyclopropane fatty acid synthase-like
  misc_feature (426)..(585): Homolog of NCBI NO: 11994331 NR Description: gene_id:MLM24.19~unknown protein [Arabidopsis
  misc_feature (806)..(861): Homolog of NCBI NO: 11994331 NR Description: gene_id:MLM24.19~unknown protein [Arabidopsis
  misc_feature (604)..(636): Homolog of NCBI NO: 11994331 NR Description: gene_id:MLM24.19~unknown protein [Arabidopsis
  misc_feature (1)..(420): Homolog of NCBI NO: 13476696 NR Description: hypothetical protein [Mesorhizobium loti]
  misc_feature (1)..(420): Homolog of NCBI NO: 15889269 NR Description: AGR_C_3599p [Agrobacterium tumefaciens]
MKVAVIGSGISGLGSAYVLANQGVKEVVLYEKEESLGGHAKTVRFDGVDLDLGFMVFNRVTYPNMIEFFENLGVEMEVSDMSFAVSLDNGKGCEWGSRNGVSGLFAQKKNVLNPYFWQMIREIVRFKEDVLNYIEKLEGNPDIDRKETLGEFLNTRGYSELFQQAYLVPICGSIWSCPSDGVLSFSAYSVLSFCCNHHLLQIFGRPQWLTVAGRSQTYVAKVRAELERLGCKIRTSCDVKSVSTSENGCVTVTSGDGSEEVFDRCILAMHAPDALRLLGEEVTFDESRVLGAFQYVYSDIYLHHDIDLMPRNKAAWSAWNFLGSTEKKVCVTYWLNILQNLGENSEPFFVTLNPDETPKKALLKWTTGHPVPSVAASIASQELHQIQGKRNIWFCGAYQGYGFHEDGLKAGMAAARGLLGKETALLNNPRHMVPSLTETGARLFVTRFLGQFISTGSVTILEEGGTMFTFGGKDSTCPLKSILKIHSPQFYWKVMTQADLGLADAYINGDFSFVDKESGLLNLIMILIANRDTKSNLTKKRGWWTPMFLTAGLASAKYFLKHVSRQNTLTQARRNISRHYDLSNELFGLFLDDTMTYSSAVFKSDDEDLRTAQMRKISLLIDKARIEKDHEVLEIGCGWGTLAIEVVRRTGCKYTGITLSIEQLKYAEEKVKEAGLQDRITFELRDYRQLSDAHKYDRIISCEMLEAVGHEFMEMFFSRCEAALAEDGLMVLQFISTPEERYNEYRLSSDFIKEYIFPGACVPSLAKVTSAMSSSSRLCIEHVENIGIHYYQTLRLWRKNFLERQKQIMALGFDDKFVRTWEYYFDYCAAGFKTRTLGDYQLVFSRPGNVAAFADSYRGFPSAYCVS

SEQ ID NO: 99635 - protein, 813 aa, Arabidopsis thaliana
  peptide (1)..(813): Ceres Seq. ID no. 15218797
  misc_feature (1)..(214): Pfam Name: Flavin containing amine oxidoreductase Pfam Description: Flavin containing amine oxidoreductase
  misc_feature (1)..(813): Homolog of NCBI NO: 21069167 NR Description: cyclopropane synthase [Sterculia foetida]
  misc_feature (5)..(687): Homolog of NCBI NO: 34393848 NR Description: putative cyclopropane synthase [Oryza sativa
  misc_feature (667)..(809): Homolog of NCBI NO: 34393848 NR Description: putative cyclopropane synthase [Oryza sativa
  misc_feature (413)..(801): Homolog of NCBI NO: 15229454 NR Description: cyclopropane-fatty-acyl-phospholipid synthase
  misc_feature (358)..(788): Homolog of NCBI NO: 11994310 NR Description: cyclopocyclopropane fatty acid synthase-like
  misc_feature (372)..(531): Homolog of NCBI NO: 11994331 NR Description: gene_id:MLM24.19~unknown protein [Arabidopsis
  misc_feature (752)..(807): Homolog of NCBI NO: 11994331 NR Description: gene_id:MLM24.19~unknown protein [Arabidopsis
  misc_feature (550)..(582): Homolog of NCBI NO: 11994331 NR Description: gene_id:MLM24.19~unknown protein [Arabidopsis
  misc_feature (1)..(366): Homolog of NCBI NO: 13476696 NR Description: hypothetical protein [Mesorhizobium loti]
  misc_feature (1)..(366): Homolog of NCBI NO: 15889269 NR Description: AGR_C_3599p [Agrobacterium tumefaciens]
MVFNRVTYPNMIEFFENLGVEMEVSDMSFAVSLDNGKGCEWGSRNGVSGLFAQKKNVLNPYFWQMIREIVRFKEDVLNYIEKLEGNPDIDRKETLGEFLNTRGYSELFQQAYLVPICGSIWSCPSDGVLSFSAYSVLSFCCNHHLLQIFGRPQWLTVAGRSQTYVAKVRAELERLGCKIRTSCDVKSVSTSENGCVTVTSGDGSEEVFDRCILAMHAPDALRLLGEEVTFDESRVLGAFQYVYSDIYLHHDIDLMPRNKAAWSAWNFLGSTEKKVCVTYWLNILQNLGENSEPFFVTLNPDETPKKALLKWTTGHPVPSVAASIASQELHQIQGKRNIWFCGAYQGYGFHEDGLKAGMAAARGLLGKETALLNNPRHMVPSLTETGARLFVTRFLGQFISTGSVTILEEGGTMFTFGGKDSTCPLKSILKIHSPQFYWKVMTQADLGLADAYINGDFSFVDKESGLLNLIMILIANRDTKSNLTKKRGWWTPMFLTAGLASAKYFLKHVSRQNTLTQARRNISRHYDLSNELFGLFLDDTMTYSSAVFKSDDEDLRTAQMRKISLLIDKARIEKDHEVLEIGCGWGTLAIEVVRRTGCKYTGITLSIEQLKYAEEKVKEAGLQDRITFELRDYRQLSDAHKYDRIISCEMLEAVGHEFMEMFFSRCEAALAEDGLMVLQFISTPEERYNEYRLSSDFIKEYIFPGACVPSLAKVTSAMSSSSRLCIEHVENIGIHYYQTLRLWRKNFLERQKQIMALGFDDKFVRTWEYYFDYCAAGFKTRTLGDYQLVFSRPGNVAAFADSYRGFPSAYCVS

SEQ ID NO: 99636 - protein, 803 aa, Arabidopsis thaliana
  peptide (1)..(803): Ceres Seq. ID no. 15218798
  misc_feature (1)..(204): Pfam Name: Flavin containing amine oxidoreductase Pfam Description: Flavin containing amine oxidoreductase
  misc_feature (1)..(803): Homolog of NCBI NO: 21069167 NR Description: cyclopropane synthase [Sterculia foetida]
  misc_feature (1)..(677): Homolog of NCBI NO: 34393848 NR Description: putative cyclopropane synthase [Oryza sativa
  misc_feature (657)..(799): Homolog of NCBI NO: 34393848 NR Description: putative cyclopropane synthase [Oryza sativa
  misc_feature (403)..(791): Homolog of NCBI NO: 15229454 NR Description: cyclopropane-fatty-acyl-phospholipid synthase
  misc_feature (348)..(778): Homolog of NCBI NO: 11994310 NR Description: cyclopocyclopropane fatty acid synthase-like
  misc_feature (362)..(521): Homolog of NCBI NO: 11994331 NR Description: gene_id:MLM24.19~unknown protein [Arabidopsis
  misc_feature (742)..(797): Homolog of NCBI NO: 11994331 NR Description: gene_id:MLM24.19~unknown protein [Arabidopsis
  misc_feature (540)..(572): Homolog of NCBI NO: 11994331 NR Description: gene_id:MLM24.19~unknown protein [Arabidopsis
  misc_feature (1)..(356): Homolog of NCBI NO: 13476696 NR Description: hypothetical protein [Mesorhizobium loti]
  misc_feature (1)..(356): Homolog of NCBI NO: 15889269 NR Description: AGR_C_3599p [Agrobacterium tumefaciens]
MIEFFENLGVEMEVSDMSFAVSLDNGKGCEWGSRNGVSGLFAQKKNVLNPYFWQMIREIVRFKEDVLNYIEKLEGNPDIDRKETLGEFLNTRGYSELFQQAYLVPICGSIWSCPSDGVLSFSAYSVLSFCCNHHLLQIFGRPQWLTVAGRSQTYVAKVRAELERLGCKIRTSCDVKSVSTSENGCVTVTSGDGSEEVFDRCILAMHAPDALRLLGEEVTFDESRVLGAFQYVYSDIYLHHDIDLMPRNKAAWSAWNFLGSTEKKVCVTYWLNILQNLGENSEPFFVTLNPDETPKKALLKWTTGHPVPSVAASIASQELHQIQGKRNIWFCGAYQGYGFHEDGLKAGMAAARGLLGKETALLNNPRHMVPSLTETGARLFVTRFLGQFISTGSVTILEEGGTMFTFGGKDSTCPLKSILKIHSPQFYWKVMTQADLGLADAYINGDFSFVDKESGLLNLIMILIANRDTKSNLTKKRGWWTPMFLTAGLASAKYFLKHVSRQNTLTQARRNISRHYDLSNELFGLFLDDTMTYSSAVFKSDDEDLRTAQMRKISLLIDKARIEKDHEVLEIGCGWGTLAIEVVRRTGCKYTGITLSIEQLKYAEEKVKEAGLQDRITFELRDYRQLSDAHKYDRIISCEMLEAVGHEFMEMFFSRCEAALAEDGLMVLQFISTPEERYNEYRLSSDFIKEYIFPGACVPSLAKVTSAMSSSSRLCIEHVENIGIHYYQTLRLWRKNFLERQKQIMALGFDDKFVRTWEYYFDYCAAGFKTRTLGDYQLVFSRPGNVAAFADSYRGFPSAYCVS

SEQ ID NO: 99637 - DNA, 3148 bp, Arabidopsis thaliana
  misc_feature (1)..(3148): Ceres Seq. ID no. 13603358
  misc_feature: MA Experiment ID: 20000307 Result: Up-regulated in Transcription
  misc_feature: MA Experiment 20000307 PARAMETER Experiment Name: At_Germinating_Seeds_Sub_P Parameter: Age (hr) Value: 24 vs. 0
  misc_feature: MA Experiment 20000307 PARAMETER Experiment Name: At_Germinating_Seeds_Sub_P Parameter: Organism Value: A. thaliana
  misc_feature: MA Experiment 20000307 PARAMETER Experiment Name: At_Germinating_Seeds_Sub_P Parameter: Plant Line Value: WS
  misc_feature: MA Experiment 20000307 PARAMETER Experiment Name: At_Germinating_Seeds_Sub_P Parameter: Tissue Value: Germinating Seeds
  misc_feature: MA Experiment ID: 20000314 Result: Up-regulated in Transcription
  misc_feature: MA Experiment 20000314 PARAMETER Experiment Name: At_14day_Shoots-Roots_Sub_P Parameter: Age (day) Value: 14
  misc_feature: MA Experiment 20000314 PARAMETER Experiment Name: At_14day_Shoots-Roots_Sub_P Parameter: Organism Value: A. thaliana
  misc_feature: MA Experiment 20000314 PARAMETER Experiment Name: At_14day_Shoots-Roots_Sub_P Parameter: Plant Line Value: WS
  misc_feature: MA Experiment 20000314 PARAMETER Experiment Name: At_14day_Shoots-Roots_Sub_P Parameter: Tissue Value: Roots vs. Whole Plant
  misc_feature: MA Experiment ID: 20000328 Result: Down-regulated in Transcription
  misc_feature: MA Experiment 20000328 PARAMETER Experiment Name: At_42deg_Heat_Sub_P Parameter: Age (day) Value: 14
  misc_feature: MA Experiment 20000328 PARAMETER Experiment Name: At_42deg_Heat_Sub_P Parameter: Organism Value: A. thaliana
  misc_feature: MA Experiment 20000328 PARAMETER Experiment Name: At_42deg_Heat_Sub_P Parameter: Plant Line Value: WS
  misc_feature: MA Experiment 20000328 PARAMETER Experiment Name: At_42deg_Heat_Sub_P Parameter: Temperature (deg C) Value: 42 vs. 22
  misc_feature: MA Experiment 20000328 PARAMETER Experiment Name: At_42deg_Heat_Sub_P Parameter: Timepoint (hr) Value: 6
  misc_feature: MA Experiment 20000328 PARAMETER Experiment Name: At_42deg_Heat_Sub_P Parameter: Tissue Value: Aerial
aatgtggcttggcttatctcctcagcacaagtgtttcctctttactcttcaaatccttcttcattctcccattcacaattccttcatttttcatttttaacttatcctccatttttttttctgaaaacacacaaaaaaatatattcggttttagaattccaagaaatccgggaatgagcatatctctctagctagactcattccagcaaactctgaatcaatttcccattttcagatccaaatccattgtgttaaaaagagggattaacaaaattgaatagttcttaacaaacaattagaagaaaaaaaaagaggagaaacaaaatgaaagtggcagtgataggaagtggaataagtggattaggaagtgcttacgtacttgcgaatcaaggagttaaagaagttgtgttatacgagaaagaagagtcattaggaggtcatgctaaaacggtgcgtttcgatggcgttgacttggatcttggtttcatggtctttaatcgtgttacatatccaaacatgatggagttcttcgagaatcttggagtagagatggaggtttcagacatgtctttcgcagtgagccttgacaatgggaaaggttgtgaatggggaagccgcaacggtgtctcgggcttatttgctcagaagaagaacgttttaaatccgtatttctggcaaatgatcagagaaattgttagatttaaagaagacgtcttaaagtacattgaggagcttgagggtaaccccgatattgatcgaaaggaaacattaggagaatttctcaattcacgtggatactctgagttgtttcagcaagcttacttggtaccgatatgcggttcgatatggtcatgcccatcagacggtgtcttaagcttctctgcatactctgttctttcgttttgctgcaaccaccatcttcttcagatctttgggaggccacagtggctaactgttgcaggacgttctcagacttatgtcgcaaaggttaggacagaattggagagactaggatgcaggatcagaacaagctgcgacgtaaaatctgtttcgacatccgaaaatggttgtgtaactgttacaagtggagatgggtctaaagaagtattcgataggtgcatattggctatgcacgccccagatgctctgagattgcttggtgaagaagtaacgtttgacgaatctagggttcttggtgctttccaatacgtttacagcgatatatatctccatcacgacattgatttgatgccaaggaaccaagcagcgtggagtgcgtggaatttcttgggaagtacggaaaagaaagtatgtgtaacatactggctcaatatacttcagaaccttggcgagaacagtgaaccattctttgtaacacttaacccagacgagaccccaaagaaaacgttgctcaaatggaccactggtcaccctgtaccttcagttgctgcttggacagcttcacaagagcttcacaagattcaaggcaaacgtaacatatggttctgtggtgcatatcagggctatggtttccatgaagatggactaaaggctggtatggctgctgcacgaggtttgttaggcaaagaaactgctcttctgaacaatccgcgacatatggtcccttccttgacagaaacaggagctcggcttttcgttacaagattcttgggacaattcatatcaaccggttctgtaacaatactagaagaaggaggaacaatgttcacattcggagggaaggattctacttgtcctctaaaatctatcctcaagattcacagtcctcaattttactggaaggttatgacacaagcggatttaggacttgcagatgcttatatcaatggagatttttctttcgttgataaagaatcaggacttttaaatctgattatgattctcattgctaacagagatacaaaatcaaatcttagtaagaaaaggggatggtggacaccgatgtttttaactgcgggtttagcatctgcaaagtattttctaaagcatgtctctaggcagaacactctaacacaagctcgtagaaacatttctcgtcactatgaccttagcaacgagcttttcggtttcttcttggatgataccatgacttactcctctgcagtattcaagtcggatgatgaggatctgagaactgcacagatgagaaaaatctcgcttctgattgataaggcgagaatagagaaggaccacgaggttttagagataggatgtggatggggaactttggccatagaagttgtgagaagaactggatgcaaatacaccgggattacgctatctattgaacagcttaaatatgctgaagaaaaagtgaaagaagctggacttcaggactggattacttttgagctccgcgattatcgccaactatctgatgctcagaaatatgacagaattatatcttgcgagatgctagaagcggtcggacatgagttcatggagatgtttttcagtcgatgtgaagccgcacttgcagaaaatggcctaatagtcttgcagttcatatcgatacccgaagagcgttacaatgagtacagactaagttcagatttcattaaagaatacatattccctggtggatgccttccttctttagccagagtcactacagccatgtcctcttcttctaggctatgcatcgaacatgttgagaacattgggattcattactaccaaacattgagattgtggaggaagaacttcttggcgagacagaaacaaatcatggctcttggatttgatgacaaattcgtaaggacgtgggaatattattttgattattgcgcagctggattcaagactcttactcttggaaactaccagttggtgttctcgcgtccagggaacgtagctgcatttgcggattcatacagaggattcccttctgcttattgtgtcacctgagaggcatccacaacgtttgattgcttatatttttcgatctatacaatgtttgattgacctgaaatactagtattgattattgatttgtttggtgtgccaatttgtgaaagtttgttgaataaaagagagatttactttggaaaaaaataagcagtactcgtggagctttatgaccaattcatacactccatgcacaatcttgtatgcgaaacctttttga

SEQ ID NO: 99638 - protein, 867 aa, Arabidopsis thaliana
  peptide (1)..(867): Ceres Seq. ID no. 13603359
  misc_feature (10)..(268): Pfam Name: Flavin containing amine oxidoreductase Pfam Description: Flavin containing amine oxidoreductase
  misc_feature (1)..(864): Homolog of NCBI NO: 21069167 NR Description: cyclopropane synthase [Sterculia foetida]
  misc_feature (59)..(741): Homolog of NCBI NO: 34393848 NR Description: putative cyclopropane synthase [Oryza sativa
  misc_feature (721)..(863): Homolog of NCBI NO: 34393848 NR Description: putative cyclopropane synthase [Oryza sativa
  misc_feature (467)..(855): Homolog of NCBI NO: 15229454 NR Description: cyclopropane-fatty-acyl-phospholipid synthase
  misc_feature (412)..(842): Homolog of NCBI NO: 11994310 NR Description: cyclopocyclopropane fatty acid synthase-like
  misc_feature (426)..(585): Homolog of NCBI NO: 11994331 NR Description: gene_id:MLM24.19~unknown protein [Arabidopsis
  misc_feature (806)..(861): Homolog of NCBI NO: 11994331 NR Description: gene_id:MLM24.19~unknown protein [Arabidopsis
  misc_feature (604)..(636): Homolog of NCBI NO: 11994331 NR Description: gene_id:MLM24.19~unknown protein [Arabidopsis
  misc_feature (1)..(420): Homolog of NCBI NO: 13476696 NR Description: hypothetical protein [Mesorhizobium loti]
  misc_feature (1)..(420): Homolog of NCBI NO: 15889269 NR Description: AGR_C_3599p [Agrobacterium tumefaciens]
MKVAVIGSGISGLGSAYVLANQGVKEVVLYEKEESLGGHAKTVRFDGVDLDLGFMVFNRVTYPNMMEFFENLGVEMEVSDMSFAVSLDNGKGCEWGSRNGVSGLFAQKKNVLNPYFWQMIREIVRFKEDVLKYIEELEGNPDIDRKETLGEFLNSRGYSELFQQAYLVPICGSIWSCPSDGVLSFSAYSVLSFCCNHHLLQIFGRPQWLTVAGRSQTYVAKVRTELERLGCRIRTSCDVKSVSTSENGCVTVTSGDGSKEVFDRCILAMHAPDALRLLGEEVTFDESRVLGAFQYVYSDIYLHHDIDLMPRNQAAWSAWNFLGSTEKKVCVTYWLNILQNLGENSEPFFVTLNPDETPKKTLLKWTTGHPVPSVAAWTASQELHKIQGKRNIWFCGAYQGYGFHEDGLKAGMAAARGLLGKETALLNNPRHMVPSLTETGARLFVTRFLGQFISTGSVTILEEGGTMFTFGGKDSTCPLKSILKIHSPQFYWKVMTQADLGLADAYINGDFSFVDKESGLLNLIMILIANRDTKSNLSKKRGWWTPMFLTAGLASAKYFLKHVSRQNTLTQARRNISRHYDLSNELFGFFLDDTMTYSSAVFKSDDEDLRTAQMRKISLLIDKARIEKDHEVLEIGCGWGTLAIEVVRRTGCKYTGITLSIEQLKYAEEKVKEAGLQDWITFELRDYRQLSDAQKYDRIISCEMLEAVGHEFMEMFFSRCEAALAENGLIVLQFISIPEERYNEYRLSSDFIKEYIFPGGCLPSLARVTTAMSSSSRLCIEHVENIGIHYYQTLRLWRKNFLARQKQIMALGFDDKFVRTWEYYFDYCAAGFKTLTLGNYQLVFSRPGNVAAFADSYRGFPSAYCVT

SEQ ID NO: 99639 - protein, 813 aa, Arabidopsis thaliana
  peptide (1)..(813): Ceres Seq. ID no. 13603360
  misc_feature (1)..(214): Pfam Name: Flavin containing amine oxidoreductase Pfam Description: Flavin containing amine oxidoreductase
  misc_feature (1)..(810): Homolog of NCBI NO: 21069167 NR Description: cyclopropane synthase [Sterculia foetida]
  misc_feature (5)..(687): Homolog of NCBI NO: 34393848 NR Description: putative cyclopropane synthase [Oryza sativa
  misc_feature (667)..(809): Homolog of NCBI NO: 34393848 NR Description: putative cyclopropane synthase [Oryza sativa
  misc_feature (413)..(801): Homolog of NCBI NO: 15229454 NR Description: cyclopropane-fatty-acyl-phospholipid synthase
  misc_feature (358)..(788): Homolog of NCBI NO: 11994310 NR Description: cyclopocyclopropane fatty acid synthase-like
  misc_feature (372)..(531): Homolog of NCBI NO: 11994331 NR Description: gene_id:MLM24.19~unknown protein [Arabidopsis
  misc_feature (752)..(807): Homolog of NCBI NO: 11994331 NR Description: gene_id:MLM24.19~unknown protein [Arabidopsis
  misc_feature (550)..(582): Homolog of NCBI NO: 11994331 NR Description: gene_id:MLM24.19~unknown protein [Arabidopsis
  misc_feature (1)..(366): Homolog of NCBI NO: 13476696 NR Description: hypothetical protein [Mesorhizobium loti]
  misc_feature (1)..(366): Homolog of NCBI NO: 15889269 NR Description: AGR_C_3599p [Agrobacterium tumefaciens]
MVFNRVTYPNMMEFFENLGVEMEVSDMSFAVSLDNGKGCEWGSRNGVSGLFAQKKNVLNPYFWQMIREIVRFKEDVLKYIEELEGNPDIDRKETLGEFLNSRGYSELFQQAYLVPICGSIWSCPSDGVLSFSAYSVLSFCCNHHLLQIFGRPQWLTVAGRSQTYVAKVRTELERLGCRIRTSCDVKSVSTSENGCVTVTSGDGSKEVFDRCILAMHAPDALRLLGEEVTFDESRVLGAFQYVYSDIYLHHDIDLMPRNQAAWSAWNFLGSTEKKVCVTYWLNILQNLGENSEPFFVTLNPDETPKKTLLKWTTGHPVPSVAAWTASQELHKIQGKRNIWFCGAYQGYGFHEDGLKAGMAAARGLLGKETALLNNPRHMVPSLTETGARLFVTRFLGQFISTGSVTILEEGGTMFTFGGKDSTCPLKSILKIHSPQFYWKVMTQADLGLADAYINGDFSFVDKESGLLNLIMILIANRDTKSNLSKKRGWWTPMFLTAGLASAKYFLKHVSRQNTLTQARRNISRHYDLSNELFGFFLDDTMTYSSAVFKSDDEDLRTAQMRKISLLIDKARIEKDHEVLEIGCGWGTLAIEVVRRTGCKYTGITLSIEQLKYAEEKVKEAGLQDWITFELRDYRQLSDAQKYDRIISCEMLEAVGHEFMEMFFSRCEAALAENGLIVLQFISIPEERYNEYRLSSDFIKEYIFPGGCLPSLARVTTAMSSSSRLCIEHVENIGIHYYQTLRLWRKNFLARQKQIMALGFDDKFVRTWEYYFDYCAAGFKTLTLGNYQLVFSRPGNVAAFADSYRGFPSAYCVT

SEQ ID NO: 99640 - protein, 803 aa, Arabidopsis thaliana
  peptide (1)..(803): Ceres Seq. ID no. 13603361
  misc_feature (1)..(204): Pfam Name: Flavin containing amine oxidoreductase Pfam Description: Flavin containing amine oxidoreductase
  misc_feature (1)..(800): Homolog of NCBI NO: 21069167 NR Description: cyclopropane synthase [Sterculia foetida]
  misc_feature (1)..(677): Homolog of NCBI NO: 34393848 NR Description: putative cyclopropane synthase [Oryza sativa
  misc_feature (657)..(799): Homolog of NCBI NO: 34393848 NR Description: putative cyclopropane synthase [Oryza sativa
  misc_feature (403)..(791): Homolog of NCBI NO: 15229454 NR Description: cyclopropane-fatty-acyl-phospholipid synthase
  misc_feature (348)..(778): Homolog of NCBI NO: 11994310 NR Description: cyclopocyclopropane fatty acid synthase-like
  misc_feature (362)..(521): Homolog of NCBI NO: 11994331 NR Description: gene_id:MLM24.19~unknown protein [Arabidopsis
  misc_feature (742)..(797): Homolog of NCBI NO: 11994331 NR Description: gene_id:MLM24.19~unknown protein [Arabidopsis
  misc_feature (540)..(572): Homolog of NCBI NO: 11994331 NR Description: gene_id:MLM24.19~unknown protein [Arabidopsis
  misc_feature (1)..(356): Homolog of NCBI NO: 13476696 NR Description: hypothetical protein [Mesorhizobium loti]
  misc_feature (1)..(356): Homolog of NCBI NO: 15889269 NR Description: AGR_C_3599p [Agrobacterium tumefaciens]
MMEFFENLGVEMEVSDMSFAVSLDNGKGCEWGSRNGVSGLFAQKKNVLNPYFWQMIREIVRFKEDVLKYIEELEGNPDIDRKETLGEFLNSRGYSELFQQAYLVPICGSIWSCPSDGVLSFSAYSVLSFCCNHHLLQIFGRPQWLTVAGRSQTYVAKVRTELERLGCRIRTSCDVKSVSTSENGCVTVTSGDGSKEVFDRCILAMHAPDALRLLGEEVTFDESRVLGAFQYVYSDIYLHHDIDLMPRNQAAWSAWNFLGSTEKKVCVTYWLNILQNLGENSEPFFVTLNPDETPKKTLLKWTTGHPVPSVAAWTASQELHKIQGKRNIWFCGAYQGYGFHEDGLKAGMAAARGLLGKETALLNNPRHMVPSLTETGARLFVTRFLGQFISTGSVTILEEGGTMFTFGGKDSTCPLKSILKIHSPQFYWKVMTQADLGLADAYINGDFSFVDKESGLLNLIMILIANRDTKSNLSKKRGWWTPMFLTAGLASAKYFLKHVSRQNTLTQARRNISRHYDLSNELFGFFLDDTMTYSSAVFKSDDEDLRTAQMRKISLLIDKARIEKDHEVLEIGCGWGTLAIEVVRRTGCKYTGITLSIEQLKYAEEKVKEAGLQDWITFELRDYRQLSDAQKYDRIISCEMLEAVGHEFMEMFFSRCEAALAENGLIVLQFISIPEERYNEYRLSSDFIKEYIFPGGCLPSLARVTTAMSSSSRLCIEHVENIGIHYYQTLRLWRKNFLARQKQIMALGFDDKFVRTWEYYFDYCAAGFKTLTLGNYQLVFSRPGNVAAFADSYRGFPSAYCVT

SEQ ID NO: 99641 - DNA, 928 bp, Arabidopsis thaliana
  misc_feature (1)..(928): Ceres Seq. ID no. 13603362
  misc_feature: MA Experiment ID: 20000227 Result: Down-regulated in Transcription
  misc_feature: MA Experiment 20000227 PARAMETER Experiment Name: At_Root-Tips-vs-Tops_P Parameter: Tissue Value: Root Tips vs. Root Tops
  misc_feature: MA Experiment ID: 20000437 Result: Up-regulated in Transcription
  misc_feature: MA Experiment 20000437 PARAMETER Experiment Name: At_Drought_P Parameter: Age (day) Value: 8
  misc_feature: MA Experiment 20000437 PARAMETER Experiment Name: At_Drought_P Parameter: Organism Value: A. thaliana
  misc_feature: MA Experiment 20000437 PARAMETER Experiment Name: At_Drought_P Parameter: Plant Line Value: WS
  misc_feature: MA Experiment 20000437 PARAMETER Experiment Name: At_Drought_P Parameter: Timepoint (hr) Value: 24
  misc_feature: MA Experiment 20000437 PARAMETER Experiment Name: At_Drought_P Parameter: Tissue Value: Whole Plant
  misc_feature: MA Experiment 20000437 PARAMETER Experiment Name: At_Drought_P Parameter: Treatment Value: Drought vs. No Drought
  misc_feature: MA Experiment ID: 20000453 Result: Up-regulated in Transcription
  misc_feature: MA Experiment 20000453 PARAMETER Experiment Name: At_100uM_ABA_P Parameter: Age (day) Value: 15
  misc_feature: MA Experiment 20000453 PARAMETER Experiment Name: At_100uM_ABA_P Parameter: Organism Value: A. thaliana
  misc_feature: MA Experiment 20000453 PARAMETER Experiment Name: At_100uM_ABA_P Parameter: Plant Line Value: WS
  misc_feature: MA Experiment 20000453 PARAMETER Experiment Name: At_100uM_ABA_P Parameter: Timepoint (hr) Value: 24
  misc_feature: MA Experiment 20000453 PARAMETER Experiment Name: At_100uM_ABA_P Parameter: Tissue Value: Aerial
  misc_feature: MA Experiment 20000453 PARAMETER Experiment Name: At_100uM_ABA_P Parameter: Treatment Value: 100uM ABA vs. No Treatment
  misc_feature: MA Experiment ID: 20000794 Result: Up-regulated in Transcription
  misc_feature: MA Experiment 20000794 PARAMETER Experiment Name: At_Petals_P Parameter: Age (day) Value: 23-25 days
  misc_feature: MA Experiment 20000794 PARAMETER Experiment Name: At_Petals_P Parameter: Plant Line Value: WS
  misc_feature: MA Experiment 20000794 PARAMETER Experiment Name: At_Petals_P Parameter: Tissue Value: Petals vs. Whole plant
  misc_feature: MA Experiment ID: 20001558 Result: Down-regulated in Transcription
  misc_feature: MA Experiment 20001558 PARAMETER Experiment Name: At_Drought_Soil_Dry_P Parameter: Age (day) Value: 27
  misc_feature: MA Experiment 20001558 PARAMETER Experiment Name: At_Drought_Soil_Dry_P Parameter: Organism Value: A. thaliana
  misc_feature: MA Experiment 20001558 PARAMETER Experiment Name: At_Drought_Soil_Dry_P Parameter: Plant Line Value: WS
  misc_feature: MA Experiment 20001558 PARAMETER Experiment Name: At_Drought_Soil_Dry_P Parameter: Post Timepoint (hr) Value: 6
  misc_feature: MA Experiment 20001558 PARAMETER Experiment Name: At_Drought_Soil_Dry_P Parameter: Post-Treatment Value: Re-Water vs. No Drought
  misc_feature: MA Experiment 20001558 PARAMETER Experiment Name: At_Drought_Soil_Dry_P Parameter: Timepoint (day) Value: 13
  misc_feature: MA Experiment 20001558 PARAMETER Experiment Name: At_Drought_Soil_Dry_P Parameter: Treatment Value: Drought vs. No Drought
ctttgtatcatctctctgtttttccgaagaactaacacatgtcgggacctcagtgctgtgaaaacccgccaactcttaacccggtttccgggtcgggtcatgtcgagaagctgggtgggcttgatgcctacgtctccggctctgccgagtccaagctctgcgtcctcctcatttctgatatttttggttttgaagctccaaacttaagggcgcttgcggacaaggttgcagcttctggattctatgttgtggttcctgattactttggtggagatccttataatccctctaaccaggacagacccatccctgtctggatcaaagaccatggctgtgataagggctttgaaaacacgaaaccagtacttgaaaccataaagaacaaaggcataactgccattggagccgcagggatgtgttggggtgcaaaagtagtggtggaactgtctaaagaagagcttattcaagcagctgtgttgcttcatccttcttttgtcaatgttgatgatatcaaaggtgggaaggctccaattgctatattaggagctgaaattgatcaaatgtccccaccagcactcttgaagcaatttgaggagattctatcttccaaacccgaggtgaatagttacgtgaagatacacccgaaagtgtcacacggatggacagttagatacaacatcgatgaaccagaggcggttaaagcagcagaagaagctcacaaggagatgcttgattggtttgtgacctacatcaaatgatttgagaaagaaagaaaggtattgtctattacttcatatatgcaaagaataaaaattaaagagagacaaagcaaaactcttggttggtgtttcaatttctactttctatagtcttttgaagcattctctgagattctgtgataccttttgttaatcattgttttatgatt

SEQ ID NO: 99642 - protein, 239 aa, Arabidopsis thaliana; identical to SEQ ID NO: 28662
  peptide (1)..(239): Ceres Seq. ID no. 13603363
  misc_feature (28)..(238): Pfam Name: Dienelactone hydrolase family Pfam Description: Dienelactone hydrolase family
  misc_feature (1)..(239): Homolog of NCBI NO: 18403820 NR Description: expressed protein [Arabidopsis thaliana]
  misc_feature (1)..(239): Homolog of NCBI NO: 18403812 NR Description: expressed protein [Arabidopsis thaliana]
  misc_feature (1)..(239): Homolog of NCBI NO: 24899687 NR Description: Unknown protein [Arabidopsis thaliana]
  misc_feature (9)..(239): Homolog of NCBI NO: 9294513 NR Description: contains similarity to endo-1,3-1,4-beta-D-
  misc_feature (5)..(239): Homolog of NCBI NO: 40253303 NR Description: putative Endo-1,3;1,4-beta-D-glucanase precursor
  misc_feature (6)..(239): Homolog of NCBI NO: 40253306 NR Description: putative Endo-1,3;1,4-beta-D-glucanase precursor
  misc_feature (5)..(194): Homolog of NCBI NO: 8928122 NR Description: Endo-1,3;1,4-beta-D-glucanase precursor
  misc_feature (69)..(239): Homolog of NCBI NO: 40253308 NR Description: Endo-1,3;1,4-beta-D-glucanase precursor-like
  misc_feature (20)..(238): Homolog of NCBI NO: 38181938 NR Description: Unknown (protein for MGC:76315) [Silurana
  misc_feature (18)..(238): Homolog of NCBI NO: 31712014 NR Description: RIKEN cDNA 2310016A09 [Mus musculus]

SEQ ID NO: 99643 - DNA, 1307 bp, Arabidopsis thaliana
  misc_feature (1)..(1307): Ceres Seq. ID no. 13603364
  misc_feature: MA Experiment ID: 108434 Result: Up-regulated in Transcription
  misc_feature: MA Experiment 108434 PARAMETER Experiment Name: At_Root_Tips_cDNA_P Parameter: Tissue Value: Root Tips
  misc_feature: MA Experiment ID: 108462 Result: Down-regulated in Transcription
  misc_feature: MA Experiment 108462 PARAMETER Experiment Name: At_Germinating_Seeds_cDNA_P Parameter: Age (day) Value: 2 vs. 0
  misc_feature: MA Experiment 108462 PARAMETER Experiment Name: At_Germinating_Seeds_cDNA_P Parameter: Tissue Value: Germinating Seeds
  misc_feature: MA Experiment ID: 108463 Result: Down-regulated in Transcription
  misc_feature: MA Experiment 108463 PARAMETER Experiment Name: At_Germinating_Seeds_cDNA_P Parameter: Age (day) Value: 3 vs. 0
  misc_feature: MA Experiment 108463 PARAMETER Experiment Name: At_Germinating_Seeds_cDNA_P Parameter: Tissue Value: Germinating Seeds
  misc_feature: MA Experiment ID: 108464 Result: Down-regulated in Transcription
  misc_feature: MA Experiment 108464 PARAMETER Experiment Name: At_Germinating_Seeds_cDNA_P Parameter: Age (day) Value: 4 vs. 0
  misc_feature: MA Experiment 108464 PARAMETER Experiment Name: At_Germinating_Seeds_cDNA_P Parameter: Tissue Value: Germinating Seeds
  misc_feature: MA Experiment ID: 108488 Result: Up-regulated in Transcription
  misc_feature: MA Experiment ID: 108573 Result: Down-regulated in Transcription
  misc_feature: MA Experiment 108573 PARAMETER Experiment Name: At_Drought_cDNA_P Parameter: Timepoint (hr) Value: 6
  misc_feature: MA Experiment 108573 PARAMETER Experiment Name: At_Drought_cDNA_P Parameter: Tissue Value: Aerial
  misc_feature: MA Experiment 108573 PARAMETER Experiment Name: At_Drought_cDNA_P Parameter: Treatment Value: Drought vs. No Drought
  misc_feature: MA Experiment ID: 108579 Result: Up-regulated in Transcription
  misc_feature: MA Experiment 108579 PARAMETER Experiment Name: At_4deg_Cold_cDNA_P Parameter: Temperature (deg C) Value: 4 vs. 22
  misc_feature: MA Experiment 108579 PARAMETER Experiment Name: At_4deg_Cold_cDNA_P Parameter: Timepoint (hr) Value: 6
  misc_feature: MA Experiment 108579 PARAMETER Experiment Name: At_4deg_Cold_cDNA_P Parameter: Tissue Value: Aerial
  misc_feature: MA Experiment ID: 20000180 Result: Down-regulated in Transcription
  misc_feature: MA Experiment 20000180 PARAMETER Experiment Name: At_Germinating_Seeds_P Parameter: Age (hr) Value: 24 vs. 0
  misc_feature: MA Experiment 20000180 PARAMETER Experiment Name: At_Germinating_Seeds_P Parameter: Tissue Value: Germinating Seeds
  misc_feature: MA Experiment ID: 20001458 Result: Up-regulated in Transcription
  misc_feature: MA Experiment 20001458 PARAMETER Experiment Name: At_50mM_NH4NO3_L-to-H_P Parameter: Age (day) Value: Undefined
  misc_feature: MA Experiment 20001458 PARAMETER Experiment Name: At_50mM_NH4NO3_L-to-H_P Parameter: Organism Value: Undefined
  misc_feature: MA Experiment 20001458 PARAMETER Experiment Name: At_50mM_NH4NO3_L-to-H_P Parameter: Plant Line Value: Undefined
  misc_feature: MA Experiment 20001458 PARAMETER Experiment Name: At_50mM_NH4NO3_L-to-H_P Parameter: Timepoint (hr) Value: 2
  misc_feature: MA Experiment 20001458 PARAMETER Experiment Name: At_50mM_NH4NO3_L-to-H_P Parameter: Tissue Value: Siliques
  misc_feature: MA Experiment 20001458 PARAMETER Experiment Name: At_50mM_NH4NO3_L-to-H_P Parameter: Treatment Value: 50mM NH4NO3 vs. 100mM Manitol
  misc_feature: MA Experiment ID: 20001557 Result: Up-regulated in Transcription
  misc_feature: MA Experiment 20001557 PARAMETER Experiment Name: At_Drought_Soil_Dry_P Parameter: Age (day) Value: 27
  misc_feature: MA Experiment 20001557 PARAMETER Experiment Name: At_Drought_Soil_Dry_P Parameter: Organism Value: A. thaliana
  misc_feature: MA Experiment 20001557 PARAMETER Experiment Name: At_Drought_Soil_Dry_P Parameter: Plant Line Value: WS
  misc_feature: MA Experiment 20001557 PARAMETER Experiment Name: At_Drought_Soil_Dry_P Parameter: Post Timepoint (hr) Value: 3
  misc_feature: MA Experiment 20001557 PARAMETER Experiment Name: At_Drought_Soil_Dry_P Parameter: Post-Treatment Value: Re-Water vs. No Drought
  misc_feature: MA Experiment 20001557 PARAMETER Experiment Name: At_Drought_Soil_Dry_P Parameter: Timepoint (day) Value: 13
  misc_feature: MA Experiment 20001557 PARAMETER Experiment Name: At_Drought_Soil_Dry_P Parameter: Treatment Value: Drought vs. No Drought
  misc_feature: MA Experiment ID: 20001558 Result: Up-regulated in Transcription
  misc_feature: MA Experiment 20001558 PARAMETER Experiment Name: At_Drought_Soil_Dry_P Parameter: Age (day) Value: 27
  misc_feature: MA Experiment 20001558 PARAMETER Experiment Name: At_Drought_Soil_Dry_P Parameter: Organism Value: A. thaliana
  misc_feature: MA Experiment 20001558 PARAMETER Experiment Name: At_Drought_Soil_Dry_P Parameter: Plant Line Value: WS
  misc_feature: MA Experiment 20001558 PARAMETER Experiment Name: At_Drought_Soil_Dry_P Parameter: Post Timepoint (hr) Value: 6
  misc_feature: MA Experiment 20001558 PARAMETER Experiment Name: At_Drought_Soil_Dry_P Parameter: Post-Treatment Value: Re-Water vs. No Drought
  misc_feature: MA Experiment 20001558 PARAMETER Experiment Name: At_Drought_Soil_Dry_P Parameter: Timepoint (day) Value: 13
  misc_feature: MA Experiment 20001558 PARAMETER Experiment Name: At_Drought_Soil_Dry_P Parameter: Treatment Value: Drought vs. No Drought
  misc_feature: MA Experiment ID: 20001757 Result: Up-regulated in Transcription
  misc_feature: MA Experiment 20001757 PARAMETER Experiment Name: At_50mM_NH4NO3_L-to-H_P Parameter: Timepoint (hr) Value: 6
  misc_feature: MA Experiment 20001757 PARAMETER Experiment Name: At_50mM_NH4NO3_L-to-H_P Parameter: Tissue Value: Leaf
  misc_feature: MA Experiment 20001757 PARAMETER Experiment Name: At_50mM_NH4NO3_L-to-H_P Parameter: Treatment Value: 50mM NH4NO3 vs 100mM Mannitol
atatcaatcaatcgaaaaacctttctctcttctttcggagccgtcgcttgtgaaactttccggcgatttaacagagtcatgatggaaatacgaactccgaagactggcaaagccaagcgtgttctcgaaagccgagctcctaagttggttgaaactgggaagaagacgttgatacttcatggaacaaagacgagtgctacacttagctctgtaatgacggaactctaccgtttgaagaagggaggtgccatcagatattcaaggaggaatgagaatattaggcctttcgagagtggaggtgaaacttcattagagttcttctctcagaaaacagattgtagcatttttgtgtatggttctcacacgaagaaacgacctgacaatcttgtacttgggagaatgtatgatcaccaagtctatgatcttatagaagttgggattgagaactttaaatccttgcgggcgttttcgtatgacaagaaattcgcacctcatgaaggaacaaagcctttcatttgctttattggtgaaggttttgagaatgtatcagagcttaagcatctcaaagaagtcctcactgatctttttcgtggcgaggttgtggataatctaaatcttactggtttagaccgcgcttacgtatgttcagctatatccccaacaaaggttttccttactcattgcgcattgaagcttaaaaagtcaggatccattgttccgagaatggagcttgttgaagtcggtccatccatggacttggttatcaggcgtaatcgtcttcctaacgatagcttaatgaaagaagcaatgagaacatccaaggataagcctaagaagaaggagaaaaacgttgatcaagatgcagtactagggaagactgggaagatttatatgcctgatcagaagctgaaagaaatgaaactgttcgataaatctaagggatcgaagagagagcggaaagacgctaagcttaagcataaggaagagactgttgccaaaaagatgaaggtgtcttctgagtgactcaacagaccactcttggctctgcatcaacagctttcaatatgtggaagatgaaatgattttgtagtgtaatgagcttgacttttatttttccattagaatctataactgaatgttttctatacgctaatattttattaaggtgattttgttttgttaaaactctgcagcaacagaaactggatatgataaaaacacatttttgtctatctctgtttcctactgcagtacatgcgtaagacagcaacttttttcccgtgttgaatgagaccacaatttttgcc

SEQ ID NO: 99644 - protein, 340 aa, Arabidopsis thaliana; identical to SEQ ID NO: 35984
  peptide (1)..(340): Ceres Seq. ID no. 13603365
  misc_feature (27)..(340): Homolog of NCBI NO: 18403828 NR Description: expressed protein [Arabidopsis thaliana] Brix domain containing protein 1 homolog emb|CAB54156.1~gene_id:MDB19.11~similar to unknown protein
  misc_feature (28)..(340): Homolog of NCBI NO: 21554561 NR Description: unknown [Arabidopsis thaliana]
  misc_feature (30)..(340): Homolog of NCBI NO: 34914658 NR Description: P0504D03.20 [Oryza sativa (japonica >gi|18202717|sp|Q9AWM9|BXD1_ORYSA Brix domain containing protein
  misc_feature (33)..(336): Homolog of NCBI NO: 39930469 NR Description: brix domain containing 1 [Homo sapiens] Brix domain containing protein 1 >gi|22268137|gb|AAH35314.1|
  misc_feature (29)..(317): Homolog of NCBI NO: 7670547 NR Description: unnamed protein product [Mus musculus]
  misc_feature (29)..(317): Homolog of NCBI NO: 18203123 NR Description: Brix domain containing protein 1 unnamed protein product [Mus musculus] unnamed protein product [Mus musculus]
  misc_feature (29)..(338): Homolog of NCBI NO: 27705690 NR Description: similar to RIKEN cDNA 2810470K21 gene [Mus
  misc_feature (29)..(317): Homolog of NCBI NO: 31982662 NR Description: RIKEN cDNA 2810470K21 [Mus musculus]
  misc_feature (29)..(317): Homolog of NCBI NO: 12850727 NR Description: unnamed protein product [Mus musculus]
  misc_feature (33)..(336): Homolog of NCBI NO: 28461332 NR Description: Similar to RIKEN cDNA 2810470K21 gene [Xenopus

SEQ ID NO: 99645 - protein, 314 aa, Arabidopsis thaliana; identical to SEQ ID NO: 35985
  peptide (1)..(314): Ceres Seq. ID no. 13603366
  misc_feature (1)..(314): Homolog of NCBI NO: 18403828 NR Description: expressed protein [Arabidopsis thaliana] Brix domain containing protein 1 homolog emb|CAB54156.1~gene_id:MDB19.11~similar to unknown protein
  misc_feature (2)..(314): Homolog of NCBI NO: 21554561 NR Description: unknown [Arabidopsis thaliana]
  misc_feature (4)..(314): Homolog of NCBI NO: 34914658 NR Description: P0504D03.20 [Oryza sativa (japonica >gi|18202717|sp|Q9AWM9|BXD1_ORYSA Brix domain containing protein
  misc_feature (7)..(310): Homolog of NCBI NO: 39930469 NR Description: brix domain containing 1 [Homo sapiens] Brix domain containing protein 1 >gi|22268137|gb|AAH35314.1|
  misc_feature (3)..(291): Homolog of NCBI NO: 7670547 NR Description: unnamed protein product [Mus musculus]
  misc_feature (3)..(291): Homolog of NCBI NO: 18203123 NR Description: Brix domain containing protein 1 unnamed protein product [Mus musculus] unnamed protein product [Mus musculus]
  misc_feature (3)..(312): Homolog of NCBI NO: 27705690 NR Description: similar to RIKEN cDNA 2810470K21 gene [Mus
  misc_feature (3)..(291): Homolog of NCBI NO: 31982662 NR Description: RIKEN cDNA 2810470K21 [Mus musculus]
  misc_feature (3)..(291): Homolog of NCBI NO: 12850727 NR Description: unnamed protein product [Mus musculus]
  misc_feature (7)..(310): Homolog of NCBI NO: 28461332 NR Description: Similar to RIKEN cDNA 2810470K21 gene [Xenopus

SEQ ID NO: 99646 - protein, 313 aa, Arabidopsis thaliana; identical to SEQ ID NO: 35986
  peptide (1)..(313): Ceres Seq. ID no. 13603367
  misc_feature (1)..(313): Homolog of NCBI NO: 18403828 NR Description: expressed protein [Arabidopsis thaliana] Brix domain containing protein 1 homolog emb|CAB54156.1~gene_id:MDB19.11~similar to unknown protein
  misc_feature (1)..(313): Homolog of NCBI NO: 21554561 NR Description: unknown [Arabidopsis thaliana]
  misc_feature (3)..(313): Homolog of NCBI NO: 34914658 NR Description: P0504D03.20 [Oryza sativa (japonica >gi|18202717|sp|Q9AWM9|BXD1_ORYSA Brix domain containing protein
  misc_feature (6)..(309): Homolog of NCBI NO: 39930469 NR Description: brix domain containing 1 [Homo sapiens] Brix domain containing protein 1 >gi|22268137|gb|AAH35314.1|
  misc_feature (2)..(290): Homolog of NCBI NO: 7670547 NR Description: unnamed protein product [Mus musculus]
  misc_feature (2)..(290): Homolog of NCBI NO: 18203123 NR Description: Brix domain containing protein 1 unnamed protein product [Mus musculus] unnamed protein product [Mus musculus]
  misc_feature (2)..(311): Homolog of NCBI NO: 27705690 NR Description: similar to RIKEN cDNA 2810470K21 gene [Mus
  misc_feature (2)..(290): Homolog of NCBI NO: 31982662 NR Description: RIKEN cDNA 2810470K21 [Mus musculus]
  misc_feature (2)..(290): Homolog of NCBI NO: 12850727 NR Description: unnamed protein product [Mus musculus]
  misc_feature (6)..(309): Homolog of NCBI NO: 28461332 NR Description: Similar to RIKEN cDNA 2810470K21 gene [Xenopus

SEQ ID NO: 99647 - DNA, 1788 bp, Arabidopsis thaliana
  misc_feature (1)..(1788): Ceres Seq. ID no. 13603371
  misc_feature: MA Experiment ID: 108474 Result: Down-regulated in Transcription
  misc_feature: MA Experiment 108474 PARAMETER Experiment Name: At_Drought_Flowers_cDNA_P Parameter: Timepoint (hr) Value: null
  misc_feature: MA Experiment 108474 PARAMETER Experiment Name: At_Drought_Flowers_cDNA_P Parameter: Treatment Value: Drought vs. No Drought
  misc_feature: MA Experiment ID: 108501 Result: Down-regulated in Transcription
  misc_feature: MA Experiment 108501 PARAMETER Experiment Name: At_ap2_floral_buds_cDNA_P Parameter: Plant Line Value: ap2 (Ler.)
  misc_feature: MA Experiment 108501 PARAMETER Experiment Name: At_ap2_floral_buds_cDNA_P Parameter: Tissue Value: Closed Flower
  misc_feature: MA Experiment ID: 20000184 Result: Up-regulated in Transcription
  misc_feature: MA Experiment 20000184 PARAMETER Experiment Name: At_Shoots__P Parameter: Age (day) Value: 7
  misc_feature: MA Experiment 20000184 PARAMETER Experiment Name: At_Shoots__P Parameter: Tissue Value: Shoots vs. Whole Plant
  misc_feature: MA Experiment ID: 20000265 Result: Up-regulated in Transcription
  misc_feature: MA Experiment 20000265 PARAMETER Experiment Name: At_Open_Flower_P Parameter: Age (day) Value: 21
  misc_feature: MA Experiment 20000265 PARAMETER Experiment Name: At_Open_Flower_P Parameter: Plant Line Value: WS
  misc_feature: MA Experiment 20000265 PARAMETER Experiment Name: At_Open_Flower_P Parameter: Tissue Value: Closed Flower vs. Whole Plant
  misc_feature: MA Experiment ID: 20000286 Result: Up-regulated in Transcription
  misc_feature: MA Experiment 20000286 PARAMETER Experiment Name: At_Open_Flower_P Parameter: Age (day) Value: 21
  misc_feature: MA Experiment 20000286 PARAMETER Experiment Name: At_Open_Flower_P Parameter: Plant Line Value: WS
  misc_feature: MA Experiment 20000286 PARAMETER Experiment Name: At_Open_Flower_P Parameter: Tissue Value: Half Open vs. Whole Plant
  misc_feature: MA Experiment ID: 20001910 Result: Down-regulated in Transcription
  misc_feature: MA Experiment 20001910 PARAMETER Experiment Name: At_Drought_Reproduction_P Parameter: Age (day) Value: 37
  misc_feature: MA Experiment 20001910 PARAMETER Experiment Name: At_Drought_Reproduction_P Parameter: Organism Value: A. thaliana
  misc_feature: MA Experiment 20001910 PARAMETER Experiment Name: At_Drought_Reproduction_P Parameter: Plant Line Value: WS
  misc_feature: MA Experiment 20001910 PARAMETER Experiment Name: At_Drought_Reproduction_P Parameter: Timepoint (day) Value: 7
  misc_feature: MA Experiment 20001910 PARAMETER Experiment Name: At_Drought_Reproduction_P Parameter: Tissue Value: Flowers
  misc_feature: MA Experiment 20001910 PARAMETER Experiment Name: At_Drought_Reproduction_P Parameter: Treatment Value: Drought vs. No Drought
atcccaaatcacactcaccactctctcttctcaacatttttctccaacaaaaacaaaaaacaatgactccttttgctctgttcctcttcactctccttgccctttcaagttcatgttgctctgccattggtccacaaaacaacagaacagtgttagcacttgcaagcagaattgggatcaactatggaaaattaggcaacaatcttccttttccttaccaatcaatcaacctcatcaaaaccattaaagcaggccacgtcaagctctatgacgccgatccagaaaccctaaagctcctctctacgaccaatctttacgtcaccatcatggtccctaacaaccagatcatctcaataggtgctgatcaagccgctgctgataactgggtcgccactaatgtccttccttttcacccgcaaacccgaatccgattcgtcctcgttggcaacgaggtcctcagctacagttctgatcaagacaagcaaatatgggctaatcttgtccctgccatgcgtaaagtagtgaactctcttagagctcgtggaattcacaacatcaaagttgggacacctcttgccatggacgctcttcgttcgagttttcctccttcgagtggtacattccgggaagatatcgctgttccggtgatgttaccgttgttgaagtttctcaatggaacaaactctttcttcttccttgatgtttacccttacttcccttggtctactgatccggttaataaccatttggattttgctctgtttgaatcgaattctacttataccgatcctcaaaccggtttggtttacaccaatcttctagaccagatgctcgattcggttatctttgcgatgaccaagctcggttatccgaatatcagtctcgcaatctctgaaaccgggtggcctaatgacggtgatatccatgaaaccggagctaatattgtcaatgccgcgacgtataaccggaatttgatcaagaagatgactgctaacccgccactcggtacaccagctaggcgcggtgcacctataccgacgtttttgttctctttgttcaatgaaaaccagaaacccggttcgggaacagagagacattggggaattttgaaccctgacggtacaccgatctacgacatcgatttcagcggtagaagatcgttttctggttttgattcgttgcctaaaccgagtaacaatgttccgtttaaaggtaatgtatggtgtgtggcggttgatggggccgatgaggcagagctagggcaggcgcttaactttgcttgcggaagaagcaatgcaacatgtgcagcgttggctccaggaggagaatgctatgcaccggtgacggttacttggcatgcaagctatgcgtttagctcgtactgggctcagttccggaaccaaagctctcaatgctacttcaatggtttggctcgtgagaccacgaccaaccctggaaatgagcgttgcaagtttcctagcgttacattgtgaggctgcctcgtgactcaggcgtgtggaggaaaggatcaaaagaatcattcgcattaagttgattatatctcttgataattatgattagtttcctttttattccaagtttttactctttgtgtcccattgttgtgcaagatctataataatctatagaaatttgttcctcatcccttctcatttctcatatatctagtagtttattaatgttctgaaggaaattatgagaattttataactaattcaagaacatgttttgcgatcattactatacgagaaatatgaagtttttgat

SEQ ID NO: 99648 - protein, 496 aa, Arabidopsis thaliana
  peptide (1)..(496): Ceres Seq. ID no. 13603372
  misc_feature (57)..(381): Pfam Name: Glycosyl hydrolases family 17 Pfam Description: Glycosyl hydrolases family 17
  misc_feature (21)..(496): Homolog of NCBI NO: 15229514 NR Description: glycosyl hydrolase family 17 [Arabidopsis
  misc_feature (21)..(496): Homolog of NCBI NO: 21592541 NR Description: beta-1,3-glucanase, putative [Arabidopsis
  misc_feature (21)..(496): Homolog of NCBI NO: 15236405 NR Description: glycosyl hydrolase family 17 (anther-specific
  misc_feature (27)..(496): Homolog of NCBI NO: 322641 NR Description: beta-1,3-glucanase homolog (clone A6) - rape
  misc_feature (54)..(496): Homolog of NCBI NO: 21593090 NR Description: putative glucan endo-1-3-beta-glucosidase
  misc_feature (54)..(496): Homolog of NCBI NO: 22330905 NR Description: glycosyl hydrolase family 17 [Arabidopsis
  misc_feature (53)..(496): Homolog of NCBI NO: 6714534 NR Description: beta-1,3-glucanase [Salix gilgiana]
  misc_feature (54)..(420): Homolog of NCBI NO: 6642633 NR Description: putative beta-1,3-glucanase precursor
  misc_feature (431)..(496): Homolog of NCBI NO: 6642633 NR Description: putative beta-1,3-glucanase precursor
  misc_feature (57)..(486): Homolog of NCBI NO: 29647494 NR Description: putative beta-1,3-glucanase [Oryza sativa
PKSHSPLSLLNIFLQQKQKTMTPFALFLFTLLALSSSCCSAIGPQNNRTVLALASRIGINYGKLGNNLPFPYQSINLIKTIKAGHVKLYDADPETLKLLSTTNLYVTIMVPNNQIISIGADQAAADNWVATNVLPFHPQTRIRFVLVGNEVLSYSSDQDKQIWANLVPAMRKVVNSLRARGIHNIKVGTPLAMDALRSSFPPSSGTFREDIAVPVMLPLLKFLNGTNSFFFLDVYPYFPWSTDPVNNHLDFALFESNSTYTDPQTGLVYTNLLDQMLDSVIFAMTKLGYPNISLAISETGWPNDGDIHETGANIVNAATYNRNLIKKMTANPPLGTPARRGAPIPTFLFSLFNENQKPGSGTERHWGILNPDGTPIYDIDFSGRRSFSGFDSLPKPSNNVPFKGNVWCVAVDGADEAELGQALNFACGRSNATCAALAPGGECYAPVTVTWHASYAFSSYWAQFRNQSSQCYFNGLARETTTNPGNERCKFPSVTL

SEQ ID NO: 99649 - protein, 476 aa, Arabidopsis thaliana
  peptide (1)..(476): Ceres Seq. ID no. 13603373
  misc_feature (37)..(361): Pfam Name: Glycosyl hydrolases family 17 Pfam Description: Glycosyl hydrolases family 17
  misc_feature (1)..(476): Homolog of NCBI NO: 15229514 NR Description: glycosyl hydrolase family 17 [Arabidopsis
  misc_feature (1)..(476): Homolog of NCBI NO: 21592541 NR Description: beta-1,3-glucanase, putative [Arabidopsis
  misc_feature (1)..(476): Homolog of NCBI NO: 15236405 NR Description: glycosyl hydrolase family 17 (anther-specific
  misc_feature (7)..(476): Homolog of NCBI NO: 322641 NR Description: beta-1,3-glucanase homolog (clone A6) - rape
  misc_feature (34)..(476): Homolog of NCBI NO: 21593090 NR Description: putative glucan endo-1-3-beta-glucosidase
  misc_feature (34)..(476): Homolog of NCBI NO: 22330905 NR Description: glycosyl hydrolase family 17 [Arabidopsis
  misc_feature (33)..(476): Homolog of NCBI NO: 6714534 NR Description: beta-1,3-glucanase [Salix gilgiana]
  misc_feature (34)..(400): Homolog of NCBI NO: 6642633 NR Description: putative beta-1,3-glucanase precursor
  misc_feature (411)..(476): Homolog of NCBI NO: 6642633 NR Description: putative beta-1,3-glucanase precursor
  misc_feature (37)..(466): Homolog of NCBI NO: 29647494 NR Description: putative beta-1,3-glucanase [Oryza sativa
MTPFALFLFTLLALSSSCCSAIGPQNNRTVLALASRIGINYGKLGNNLPFPYQSINLIKTIKAGHVKLYDADPETLKLLSTTNLYVTIMVPNNQIISIGADQAAADNWVATNVLPFHPQTRIRFVLVGNEVLSYSSDQDKQIWANLVPAMRKVVNSLRARGIHNIKVGTPLAMDALRSSFPPSSGTFREDIAVPVMLPLLKFLNGTNSFFFLDVYPYFPWSTDPVNNHLDFALFESNSTYTDPQTGLVYTNLLDQMLDSVIFAMTKLGYPNISLAISETGWPNDGDIHETGANIVNAATYNRNLIKKMTANPPLGTPARRGAPIPTFLFSLFNENQKPGSGTERHWGILNPDGTPIYDIDFSGRRSFSGFDSLPKPSNNVPFKGNVWCVAVDGADEAELGQALNFACGRSNATCAALAPGGECYAPVTVTWHASYAFSSYWAQFRNQSSQCYFNGLARETTTNPGNERCKFPSVTL

SEQ ID NO: 99650 - protein, 388 aa, Arabidopsis thaliana
  peptide (1)..(388): Ceres Seq. ID no. 13603374
  misc_feature (1)..(273): Pfam Name: Glycosyl hydrolases family 17 Pfam Description: Glycosyl hydrolases family 17
  misc_feature (1)..(388): Homolog of NCBI NO: 15229514 NR Description: glycosyl hydrolase family 17 [Arabidopsis
  misc_feature (1)..(388): Homolog of NCBI NO: 21592541 NR Description: beta-1,3-glucanase, putative [Arabidopsis
  misc_feature (1)..(388): Homolog of NCBI NO: 15236405 NR Description: glycosyl hydrolase family 17 (anther-specific
  misc_feature (1)..(388): Homolog of NCBI NO: 322641 NR Description: beta-1,3-glucanase homolog (clone A6) - rape
  misc_feature (1)..(388): Homolog of NCBI NO: 21593090 NR Description: putative glucan endo-1-3-beta-glucosidase
  misc_feature (1)..(388): Homolog of NCBI NO: 22330905 NR Description: glycosyl hydrolase family 17 [Arabidopsis
  misc_feature (1)..(388): Homolog of NCBI NO: 6714534 NR Description: beta-1,3-glucanase [Salix gilgiana]
  misc_feature (1)..(312): Homolog of NCBI NO: 6642633 NR Description: putative beta-1,3-glucanase precursor
  misc_feature (323)..(388): Homolog of NCBI NO: 6642633 NR Description: putative beta-1,3-glucanase precursor
  misc_feature (1)..(378): Homolog of NCBI NO: 29647494 NR Description: putative beta-1,3-glucanase [Oryza sativa
MVPNNQIISIGADQAAADNWVATNVLPFHPQTRIRFVLVGNEVLSYSSDQDKQIWANLVPAMRKVVNSLRARGIHNIKVGTPLAMDALRSSFPPSSGTFREDIAVPVMLPLLKFLNGTNSFFFLDVYPYFPWSTDPVNNHLDFALFESNSTYTDPQTGLVYTNLLDQMLDSVIFAMTKLGYPNISLAISETGWPNDGDIHETGANIVNAATYNRNLIKKMTANPPLGTPARRGAPIPTFLFSLFNENQKPGSGTERHWGILNPDGTPIYDIDFSGRRSFSGFDSLPKPSNNVPFKGNVWCVAVDGADEAELGQALNFACGRSNATCAALAPGGECYAPVTVTWHASYAFSSYWAQFRNQSSQCYFNGLARETTTNPGNERCKFPSVTL

SEQ ID NO: 99651 - DNA, 651 bp, Arabidopsis thaliana
  misc_feature (1)..(651): Ceres Seq. ID no. 13603375
  misc_feature: MA Experiment ID: 108461 Result: Up-regulated in Transcription
  misc_feature: MA Experiment 108461 PARAMETER Experiment Name: At_Germinating_Seeds_cDNA_P Parameter: Age (day) Value: 1 vs. 0
  misc_feature: MA Experiment 108461 PARAMETER Experiment Name: At_Germinating_Seeds_cDNA_P Parameter: Tissue Value: Germinating Seeds
  misc_feature: MA Experiment ID: 108462 Result: Up-regulated in Transcription
  misc_feature: MA Experiment 108462 PARAMETER Experiment Name: At_Germinating_Seeds_cDNA_P Parameter: Age (day) Value: 2 vs. 0
  misc_feature: MA Experiment 108462 PARAMETER Experiment Name: At_Germinating_Seeds_cDNA_P Parameter: Tissue Value: Germinating Seeds
  misc_feature: MA Experiment ID: 108464 Result: Up-regulated in Transcription
  misc_feature: MA Experiment 108464 PARAMETER Experiment Name: At_Germinating_Seeds_cDNA_P Parameter: Age (day) Value: 4 vs. 0
  misc_feature: MA Experiment 108464 PARAMETER Experiment Name: At_Germinating_Seeds_cDNA_P Parameter: Tissue Value: Germinating Seeds
  misc_feature: MA Experiment ID: 108561 Result: Down-regulated in Transcription
  misc_feature: MA Experiment 108561 PARAMETER Experiment Name: At_100uM_ABA_cDNA_P Parameter: Timepoint (hr) Value: 6
  misc_feature: MA Experiment 108561 PARAMETER Experiment Name: At_100uM_ABA_cDNA_P Parameter: Tissue Value: Aerial
  misc_feature: MA Experiment 108561 PARAMETER Experiment Name: At_100uM_ABA_cDNA_P Parameter: Treatment Value: 100uM ABA vs. No Treatment
  misc_feature: MA Experiment ID: 108572 Result: Down-regulated in Transcription
  misc_feature: MA Experiment 108572 PARAMETER Experiment Name: At_Drought_cDNA_P Parameter: Timepoint (hr) Value: 1
  misc_feature: MA Experiment 108572 PARAMETER Experiment Name: At_Drought_cDNA_P Parameter: Tissue Value: Aerial
  misc_feature: MA Experiment 108572 PARAMETER Experiment Name: At_Drought_cDNA_P Parameter: Treatment Value: Drought vs. No Drought
  misc_feature: MA Experiment ID: 108573 Result: Down-regulated in Transcription
  misc_feature: MA Experiment 108573 PARAMETER Experiment Name: At_Drought_cDNA_P Parameter: Timepoint (hr) Value: 6
  misc_feature: MA Experiment 108573 PARAMETER Experiment Name: At_Drought_cDNA_P Parameter: Tissue Value: Aerial
  misc_feature: MA Experiment 108573 PARAMETER Experiment Name: At_Drought_cDNA_P Parameter: Treatment Value: Drought vs. No Drought
  misc_feature: MA Experiment ID: 108585 Result: Down-regulated in Transcription
  misc_feature: MA Experiment 108585 PARAMETER Experiment Name: At_5mM_NaNP_cDNA_P Parameter: Timepoint (hr) Value: 6
  misc_feature: MA Experiment 108585 PARAMETER Experiment Name: At_5mM_NaNP_cDNA_P Parameter: Tissue Value: Aerial
  misc_feature: MA Experiment 108585 PARAMETER Experiment Name: At_5mM_NaNP_cDNA_P Parameter: Treatment Value: null
  misc_feature: MA Experiment ID: 108668 Result: Down-regulated in Transcription
  misc_feature: MA Experiment 108668 PARAMETER Experiment Name: At_2mM_SA_cDNA_P Parameter: Plant Line Value: WS
  misc_feature: MA Experiment 108668 PARAMETER Experiment Name: At_2mM_SA_cDNA_P Parameter: Timepoint (hr) Value: 6
  misc_feature: MA Experiment 108668 PARAMETER Experiment Name: At_2mM_SA_cDNA_P Parameter: Treatment Value: 2mM SA vs. No Treatment
  misc_feature: MA Experiment ID: 20000070 Result: Down-regulated in Transcription
  misc_feature: MA Experiment 20000070 PARAMETER Experiment Name: At_100uM_ABA_Mutants_cDNA_P Parameter: Plant Line Value: CS24
  misc_feature: MA Experiment 20000070 PARAMETER Experiment Name: At_100uM_ABA_Mutants_cDNA_P Parameter: Timepoint (hr) Value: 6
  misc_feature: MA Experiment 20000070 PARAMETER Experiment Name: At_100uM_ABA_Mutants_cDNA_P Parameter: Tissue Value: Aerial
  misc_feature: MA Experiment 20000070 PARAMETER Experiment Name: At_100uM_ABA_Mutants_cDNA_P Parameter: Treatment Value: 100uM ABA vs. No Treatment
  misc_feature: MA Experiment ID: 20000071 Result: Down-regulated in Transcription
  misc_feature: MA Experiment 20000071 PARAMETER Experiment Name: At_100uM_ABA_Mutants_cDNA_P Parameter: Plant Line Value: CS8104
  misc_feature: MA Experiment 20000071 PARAMETER Experiment Name: At_100uM_ABA_Mutants_cDNA_P Parameter: Timepoint (hr) Value: 6
  misc_feature: MA Experiment 20000071 PARAMETER Experiment Name: At_100uM_ABA_Mutants_cDNA_P Parameter: Tissue Value: Aerial
  misc_feature: MA Experiment 20000071 PARAMETER Experiment Name: At_100uM_ABA_Mutants_cDNA_P Parameter: Treatment Value: 100uM ABA vs. No Treatment
  misc_feature: MA Experiment ID: 20000072 Result: Down-regulated in Transcription
  misc_feature: MA Experiment 20000072 PARAMETER Experiment Name: At_100uM_ABA_Mutants_cDNA_P Parameter: Plant Line Value: CS8105
  misc_feature: MA Experiment 20000072 PARAMETER Experiment Name: At_100uM_ABA_Mutants_cDNA_P Parameter: Timepoint (hr) Value: 6
  misc_feature: MA Experiment 20000072 PARAMETER Experiment Name: At_100uM_ABA_Mutants_cDNA_P Parameter: Tissue Value: Aerial
  misc_feature: MA Experiment 20000072 PARAMETER Experiment Name: At_100uM_ABA_Mutants_cDNA_P Parameter: Treatment Value: 100uM ABA vs. No Treatment
  misc_feature: MA Experiment ID: 20000087 Result: Down-regulated in Transcription
  misc_feature: MA Experiment 20000087 PARAMETER Experiment Name: At_100uM_ABA_Mutants_cDNA_P Parameter: Plant Line Value: WS
  misc_feature: MA Experiment 20000087 PARAMETER Experiment Name: At_100uM_ABA_Mutants_cDNA_P Parameter: Timepoint (hr) Value: 6
  misc_feature: MA Experiment 20000087 PARAMETER Experiment Name: At_100uM_ABA_Mutants_cDNA_P Parameter: Tissue Value: Aerial
  misc_feature: MA Experiment 20000087 PARAMETER Experiment Name: At_100uM_ABA_Mutants_cDNA_P Parameter: Treatment Value: 100uM ABA vs. No Treatment
  misc_feature: MA Experiment ID: 20000088 Result: Down-regulated in Transcription
  misc_feature: MA Experiment 20000088 PARAMETER Experiment Name: At_100uM_ABA_Mutants_cDNA_P Parameter: Plant Line Value: Landsberg
  misc_feature: MA Experiment 20000088 PARAMETER Experiment Name: At_100uM_ABA_Mutants_cDNA_P Parameter: Timepoint (hr) Value: 6
  misc_feature: MA Experiment 20000088 PARAMETER Experiment Name: At_100uM_ABA_Mutants_cDNA_P Parameter: Tissue Value: Aerial
  misc_feature: MA Experiment 20000088 PARAMETER Experiment Name: At_100uM_ABA_Mutants_cDNA_P Parameter: Treatment Value: 100uM ABA vs. No Treatment
  misc_feature: MA Experiment ID: 20000090 Result: Down-regulated in Transcription
  misc_feature: MA Experiment ID: 20000117 Result: Down-regulated in Transcription
  misc_feature: MA Experiment 20000117 PARAMETER Experiment Name: At_100uM_ABA_Mutants_cDNA_P Parameter: Plant Line Value: Columbia
  misc_feature: MA Experiment 20000117 PARAMETER Experiment Name: At_100uM_ABA_Mutants_cDNA_P Parameter: Timepoint (hr) Value: 6
  misc_feature: MA Experiment 20000117 PARAMETER Experiment Name: At_100uM_ABA_Mutants_cDNA_P Parameter: Tissue Value: Aerial
  misc_feature: MA Experiment 20000117 PARAMETER Experiment Name: At_100uM_ABA_Mutants_cDNA_P Parameter: Treatment Value: 100uM ABA vs. No Treatment
  misc_feature: MA Experiment ID: 20000179 Result: Up-regulated in Transcription
  misc_feature: MA Experiment 20000179 PARAMETER Experiment Name: At_Germinating_Seeds_P Parameter: Age (hr) Value: 6 vs. 0
  misc_feature: MA Experiment 20000179 PARAMETER Experiment Name: At_Germinating_Seeds_P Parameter: Tissue Value: Germinating Seeds
  misc_feature: MA Experiment ID: 20000180 Result: Up-regulated in Transcription
  misc_feature: MA Experiment 20000180 PARAMETER Experiment Name: At_Germinating_Seeds_P Parameter: Age (hr) Value: 24 vs. 0
  misc_feature: MA Experiment 20000180 PARAMETER Experiment Name: At_Germinating_Seeds_P Parameter: Tissue Value: Germinating Seeds
  misc_feature: MA Experiment ID: 20000182 Result: Down-regulated in Transcription
  misc_feature: MA Experiment 20000182 PARAMETER Experiment Name: At_2mM_SA_P Parameter: Age (day) Value: 14
  misc_feature: MA Experiment 20000182 PARAMETER Experiment Name: At_2mM_SA_P Parameter: Organism Value: A. thaliana
  misc_feature: MA Experiment 20000182 PARAMETER Experiment Name: At_2mM_SA_P Parameter: Plant Line Value: WS
  misc_feature: MA Experiment 20000182 PARAMETER Experiment Name: At_2mM_SA_P Parameter: Timepoint (hr) Value: 6
  misc_feature: MA Experiment 20000182 PARAMETER Experiment Name: At_2mM_SA_P Parameter: Tissue Value: Aerial
  misc_feature: MA Experiment 20000182 PARAMETER Experiment Name: At_2mM_SA_P Parameter: Treatment Value: 2mM SA vs. No Treatment
  misc_feature: MA Experiment ID: 20000184 Result: Up-regulated in Transcription
  misc_feature: MA Experiment 20000184 PARAMETER Experiment Name: At_Shoots__P Parameter: Age (day) Value: 7
  misc_feature: MA Experiment 20000184 PARAMETER Experiment Name: At_Shoots__P Parameter: Tissue Value: Shoots vs. Whole Plant
  misc_feature: MA Experiment ID: 20000185 Result: Down-regulated in Transcription
  misc_feature: MA Experiment 20000185 PARAMETER Experiment Name: At_Roots__P Parameter: Age (day) Value: 7 vs. 21
  misc_feature: MA Experiment 20000185 PARAMETER Experiment Name: At_Roots__P Parameter: Organism Value: A. thaliana
  misc_feature: MA Experiment 20000185 PARAMETER Experiment Name: At_Roots__P Parameter: Tissue Value: Roots vs. Whole Plant
  misc_feature: MA Experiment ID: 20000227 Result: Up-regulated in Transcription
  misc_feature: MA Experiment 20000227 PARAMETER Experiment Name: At_Root-Tips-vs-Tops_P Parameter: Tissue Value: Root Tips vs. Root Tops
  misc_feature: MA Experiment ID: 20000437 Result: Down-regulated in Transcription
  misc_feature: MA Experiment 20000437 PARAMETER Experiment Name: At_Drought_P Parameter: Age (day) Value: 8
  misc_feature: MA Experiment 20000437 PARAMETER Experiment Name: At_Drought_P Parameter: Organism Value: A. thaliana
  misc_feature: MA Experiment 20000437 PARAMETER Experiment Name: At_Drought_P Parameter: Plant Line Value: WS
  misc_feature: MA Experiment 20000437 PARAMETER Experiment Name: At_Drought_P Parameter: Timepoint (hr) Value: 24
  misc_feature: MA Experiment 20000437 PARAMETER Experiment Name: At_Drought_P Parameter: Tissue Value: Whole Plant
  misc_feature: MA Experiment 20000437 PARAMETER Experiment Name: At_Drought_P Parameter: Treatment Value: Drought vs. No Drought
  misc_feature: MA Experiment ID: 20000439 Result: Down-regulated in Transcription
  misc_feature: MA Experiment 20000439 PARAMETER Experiment Name: At_Roots__P Parameter: Age (day) Value: 14 vs. 21
  misc_feature: MA Experiment 20000439 PARAMETER Experiment Name: At_Roots__P Parameter: Organism Value: A. thaliana
  misc_feature: MA Experiment 20000439 PARAMETER Experiment Name: At_Roots__P Parameter: Tissue Value: Roots vs. Whole Plant
  misc_feature: MA Experiment ID: 20000794 Result: Down-regulated in Transcription
  misc_feature: MA Experiment 20000794 PARAMETER Experiment Name: At_Petals_P Parameter: Age (day) Value: 23-25 days
  misc_feature: MA Experiment 20000794 PARAMETER Experiment Name: At_Petals_P Parameter: Plant Line Value: WS
  misc_feature: MA Experiment 20000794 PARAMETER Experiment Name: At_Petals_P Parameter: Tissue Value: Petals vs. Whole plant
  misc_feature: MA Experiment ID: 20001248 Result: Down-regulated in Transcription
  misc_feature: MA Experiment 20001248 PARAMETER Experiment Name: At_Far-red-induction_P Parameter: Age (day) Value: 7
  misc_feature: MA Experiment 20001248 PARAMETER Experiment Name: At_Far-red-induction_P Parameter: Light Value: Far-red vs. White
  misc_feature: MA Experiment 20001248 PARAMETER Experiment Name: At_Far-red-induction_P Parameter: Organism Value: A. thaliana
  misc_feature: MA Experiment 20001248 PARAMETER Experiment Name: At_Far-red-induction_P Parameter: Plant Line Value: Columbia
  misc_feature: MA Experiment 20001248 PARAMETER Experiment Name: At_Far-red-induction_P Parameter: Timepoint (hr) Value: 4
  misc_feature: MA Experiment 20001248 PARAMETER Experiment Name: At_Far-red-induction_P Parameter: Tissue Value: Whole Plant
  misc_feature: MA Experiment ID: 20001558 Result: Up-regulated in Transcription
  misc_feature: MA Experiment 20001558 PARAMETER Experiment Name: At_Drought_Soil_Dry_P Parameter: Age (day) Value: 27
  misc_feature: MA Experiment 20001558 PARAMETER Experiment Name: At_Drought_Soil_Dry_P Parameter: Organism Value: A. thaliana
  misc_feature: MA Experiment 20001558 PARAMETER Experiment Name: At_Drought_Soil_Dry_P Parameter: Plant Line Value: WS
  misc_feature: MA Experiment 20001558 PARAMETER Experiment Name: At_Drought_Soil_Dry_P Parameter: Post Timepoint (hr) Value: 6
  misc_feature: MA Experiment 20001558 PARAMETER Experiment Name: At_Drought_Soil_Dry_P Parameter: Post-Treatment Value: Re-Water vs. No Drought
  misc_feature: MA Experiment 20001558 PARAMETER Experiment Name: At_Drought_Soil_Dry_P Parameter: Timepoint (day) Value: 13
  misc_feature: MA Experiment 20001558 PARAMETER Experiment Name: At_Drought_Soil_Dry_P Parameter: Treatment Value: Drought vs. No Drought
  misc_feature: MA Experiment ID: 20001560 Result: Up-regulated in Transcription
  misc_feature: MA Experiment 20001560 PARAMETER Experiment Name: At_Drought_Soil_Dry_P Parameter: Age (day) Value: 28
  misc_feature: MA Experiment 20001560 PARAMETER Experiment Name: At_Drought_Soil_Dry_P Parameter: Organism Value: A. thaliana
  misc_feature: MA Experiment 20001560 PARAMETER Experiment Name: At_Drought_Soil_Dry_P Parameter: Plant Line Value: WS
  misc_feature: MA Experiment 20001560 PARAMETER Experiment Name: At_Drought_Soil_Dry_P Parameter: Post Timepoint (hr) Value: None
  misc_feature: MA Experiment 20001560 PARAMETER Experiment Name: At_Drought_Soil_Dry_P Parameter: Post-Treatment Value: None
  misc_feature: MA Experiment 20001560 PARAMETER Experiment Name: At_Drought_Soil_Dry_P Parameter: Timepoint (day) Value: 14
  misc_feature: MA Experiment 20001560 PARAMETER Experiment Name: At_Drought_Soil_Dry_P Parameter: Treatment Value: Drought vs. No Drought
  misc_feature: MA Experiment ID: 20001906 Result: Down-regulated in Transcription
  misc_feature: MA Experiment 20001906 PARAMETER Experiment Name: At_Drought_Reproduction_P Parameter: Age (day) Value: 35
  misc_feature: MA Experiment 20001906 PARAMETER Experiment Name: At_Drought_Reproduction_P Parameter: Organism Value: A. thaliana
  misc_feature: MA Experiment 20001906 PARAMETER Experiment Name: At_Drought_Reproduction_P Parameter: Plant Line Value: WS
  misc_feature: MA Experiment 20001906 PARAMETER Experiment Name: At_Drought_Reproduction_P Parameter: Timepoint (day) Value: 5
  misc_feature: MA Experiment 20001906 PARAMETER Experiment Name: At_Drought_Reproduction_P Parameter: Tissue Value: Siliques
  misc_feature: MA Experiment 20001906 PARAMETER Experiment Name: At_Drought_Reproduction_P Parameter: Treatment Value: Drought vs. No Drought
  misc_feature: MA Experiment ID: 20001908 Result: Down-regulated in Transcription
  misc_feature: MA Experiment 20001908 PARAMETER Experiment Name: At_Drought_Reproduction_P Parameter: Age (day) Value: 40
  misc_feature: MA Experiment 20001908 PARAMETER Experiment Name: At_Drought_Reproduction_P Parameter: Organism Value: A. thaliana
  misc_feature: MA Experiment 20001908 PARAMETER Experiment Name: At_Drought_Reproduction_P Parameter: Plant Line Value: WS
  misc_feature: MA Experiment 20001908 PARAMETER Experiment Name: At_Drought_Reproduction_P Parameter: Timepoint (day) Value: 10
  misc_feature: MA Experiment 20001908 PARAMETER Experiment Name: At_Drought_Reproduction_P Parameter: Tissue Value: Siliques
  misc_feature: MA Experiment 20001908 PARAMETER Experiment Name: At_Drought_Reproduction_P Parameter: Treatment Value: Drought vs. No Drought
aaaccgaccggtttaactcccaagagctacttggagttgtcgtaaacacagagatcacaatcttaccaaattttcacacaccgacatgtctagatccttagctctcgtttacttatccttactttgtcttcaaacccatctctcaatctccgtcacagttccgattccgtcggtaaacggcgaaatcgacgcaatgctgaaccggaacggcgtaatcggagaggaagaaggagaggagatgatgccatcggagataagtcggagagtaatgatgatgcggaaacagtacataagctacgaaactttaaggagagatatggttccttgtcagaaaccaggtgcttcttattacgcttgtcgctctggtcaggctaatgcttacaacagaggatgtagtgtcattactaggtgtgctagagacactaacgacatcaagacttgaaaacattggggtctttaagtacatttgagttttaaactcagatgctctagaggcaagtgaaatcttattattcttgtcttttgttttgtaatgttgttgtttacattagatttcttaattattgatatgtaattttggctattaatgttcaagtaattgatatttatagtcttgaaagtgttgagtggagtaatagatggaagattgtg

SEQ ID NO: 99652 - protein, 118 aa, Arabidopsis thaliana
  peptide (1)..(118): Ceres Seq. ID no. 13603376
  misc_feature (46)..(111): Pfam Name: Rapid ALkalinization Factor (RALF) Pfam Description: Rapid ALkalinization Factor (RALF)
  misc_feature (1)..(118): Homolog of NCBI NO: 18403901 NR Description: expressed protein [Arabidopsis thaliana] dbj|BAA85220.1~gene_id:MYM9.15~similar to unknown protein
  misc_feature (1)..(118): Homolog of NCBI NO: 21553907 NR Description: unknown [Arabidopsis thaliana]
  misc_feature (1)..(118): Homolog of NCBI NO: 18414108 NR Description: expressed protein [Arabidopsis thaliana]
  misc_feature (1)..(67): Homolog of NCBI NO: 7459901 NR Description: hypothetical protein DL3015C - Arabidopsis >gi|2244751|emb|CAB10174.1| hypothetical protein [Arabidopsis >gi|7268099|emb|CAB78437.1| hypothetical protein [Arabidopsis
  misc_feature (45)..(111): Homolog of NCBI NO: 18401177 NR Description: expressed protein [Arabidopsis thaliana] gb|AAF02876.1~gene_id:MGL6.3~similar to unknown protein thaliana] >gi|15081817|gb|AAK82563.1| AT3g16570/MGL6_2
  misc_feature (25)..(111): Homolog of NCBI NO: 18414528 NR Description: expressed protein [Arabidopsis thaliana]
  misc_feature (44)..(111): Homolog of NCBI NO: 18397246 NR Description: expressed protein [Arabidopsis thaliana] unknown protein [Arabidopsis thaliana] RALF precursor [Arabidopsis thaliana] >gi|27754284|gb|AAO22595.1|
  misc_feature (38)..(114): Homolog of NCBI NO: 30685837 NR Description: expressed protein [Arabidopsis thaliana]
  misc_feature (44)..(109): Homolog of NCBI NO: 15218637 NR Description: expressed protein [Arabidopsis thaliana]
  misc_feature (44)..(109): Homolog of NCBI NO: 28628205 NR Description: rapid alkalinization factor 2 precursor [Populus
MSRSLALVYLSLLCLQTHLSISVTVPIPSVNGEIDAMLNRNGVIGEEEGEEMMPSEISRRVMMMRKQYISYETLRRDMVPCQKPGASYYACRSGQANAYNRGCSVITRCARDTNDIKT

SEQ ID NO: 99653 - protein, 82 aa, Arabidopsis thaliana
  peptide (1)..(82): Ceres Seq. ID no. 13603377
  misc_feature (10)..(75): Pfam Name: Rapid ALkalinization Factor (RALF) Pfam Description: Rapid ALkalinization Factor (RALF)
  misc_feature (1)..(82): Homolog of NCBI NO: 18403901 NR Description: expressed protein [Arabidopsis thaliana] dbj|BAA85220.1~gene_id:MYM9.15~similar to unknown protein
  misc_feature (1)..(82): Homolog of NCBI NO: 21553907 NR Description: unknown [Arabidopsis thaliana]
  misc_feature (1)..(82): Homolog of NCBI NO: 18414108 NR Description: expressed protein [Arabidopsis thaliana]
  misc_feature (1)..(31): Homolog of NCBI NO: 7459901 NR Description: hypothetical protein DL3015C - Arabidopsis >gi|2244751|emb|CAB10174.1| hypothetical protein [Arabidopsis >gi|7268099|emb|CAB78437.1| hypothetical protein [Arabidopsis
  misc_feature (9)..(75): Homolog of NCBI NO: 18401177 NR Description: expressed protein [Arabidopsis thaliana] gb|AAF02876.1~gene_id:MGL6.3~similar to unknown protein thaliana] >gi|15081817|gb|AAK82563.1| AT3g16570/MGL6_2
  misc_feature (1)..(75): Homolog of NCBI NO: 18414528 NR Description: expressed protein [Arabidopsis thaliana]
  misc_feature (8)..(75): Homolog of NCBI NO: 18397246 NR Description: expressed protein [Arabidopsis thaliana] unknown protein [Arabidopsis thaliana] RALF precursor [Arabidopsis thaliana] >gi|27754284|gb|AAO22595.1|
  misc_feature (2)..(78): Homolog of NCBI NO: 30685837 NR Description: expressed protein [Arabidopsis thaliana]
  misc_feature (8)..(73): Homolog of NCBI NO: 15218637 NR Description: expressed protein [Arabidopsis thaliana]
  misc_feature (8)..(73): Homolog of NCBI NO: 28628205 NR Description: rapid alkalinization factor 2 precursor [Populus
MLNRNGVIGEEEGEEMMPSEISRRVMMMRKQYISYETLRRDMVPCQKPGASYYACRSGQANAYNRGCSVITRCARDTNDIKT

SEQ ID NO: 99654 - protein, 67 aa, Arabidopsis thaliana; identical to SEQ ID NO: 28721
  peptide (1)..(67): Ceres Seq. ID no. 13603378
  misc_feature (1)..(60): Pfam Name: Rapid ALkalinization Factor (RALF) Pfam Description: Rapid ALkalinization Factor (RALF)
  misc_feature (1)..(67): Homolog of NCBI NO: 18403901 NR Description: expressed protein [Arabidopsis thaliana] dbj|BAA85220.1~gene_id:MYM9.15~similar to unknown protein
  misc_feature (1)..(67): Homolog of NCBI NO: 21553907 NR Description: unknown [Arabidopsis thaliana]
  misc_feature (1)..(67): Homolog of NCBI NO: 18414108 NR Description: expressed protein [Arabidopsis thaliana]
  misc_feature (1)..(16): Homolog of NCBI NO: 7459901 NR Description: hypothetical protein DL3015C - Arabidopsis >gi|2244751|emb|CAB10174.1| hypothetical protein [Arabidopsis >gi|7268099|emb|CAB78437.1| hypothetical protein [Arabidopsis
  misc_feature (1)..(60): Homolog of NCBI NO: 18401177 NR Description: expressed protein [Arabidopsis thaliana] gb|AAF02876.1~gene_id:MGL6.3~similar to unknown protein thaliana] >gi|15081817|gb|AAK82563.1| AT3g16570/MGL6_2
  misc_feature (1)..(60): Homolog of NCBI NO: 18414528 NR Description: expressed protein [Arabidopsis thaliana]
  misc_feature (1)..(60): Homolog of NCBI NO: 18397246 NR Description: expressed protein [Arabidopsis thaliana] unknown protein [Arabidopsis thaliana] RALF precursor [Arabidopsis thaliana] >gi|27754284|gb|AAO22595.1|
  misc_feature (1)..(63): Homolog of NCBI NO: 30685837 NR Description: expressed protein [Arabidopsis thaliana]
  misc_feature (1)..(58): Homolog of NCBI NO: 15218637 NR Description: expressed protein [Arabidopsis thaliana]
  misc_feature (1)..(58): Homolog of NCBI NO: 28628205 NR Description: rapid alkalinization factor 2 precursor [Populus

SEQ ID NO: 99655 - DNA, 710 bp, Arabidopsis thaliana
  misc_feature (1)..(710): Ceres Seq. ID no. 13603379
  misc_feature: MA Experiment ID: 108434 Result: Up-regulated in Transcription
  misc_feature: MA Experiment 108434 PARAMETER Experiment Name: At_Root_Tips_cDNA_P Parameter: Tissue Value: Root Tips
  misc_feature: MA Experiment ID: 108435 Result: Up-regulated in Transcription
  misc_feature: MA Experiment 108435 PARAMETER Experiment Name: At_stm_Mutants_cDNA_P Parameter: Plant Line Value: wt Landsburg vs stm
  misc_feature: MA Experiment 108435 PARAMETER Experiment Name: At_stm_Mutants_cDNA_P Parameter: Tissue Value: Shoot Apical Meristem Region
  misc_feature: MA Experiment ID: 108462 Result: Down-regulated in Transcription
  misc_feature: MA Experiment 108462 PARAMETER Experiment Name: At_Germinating_Seeds_cDNA_P Parameter: Age (day) Value: 2 vs. 0
  misc_feature: MA Experiment 108462 PARAMETER Experiment Name: At_Germinating_Seeds_cDNA_P Parameter: Tissue Value: Germinating Seeds
  misc_feature: MA Experiment ID: 108463 Result: Down-regulated in Transcription
  misc_feature: MA Experiment 108463 PARAMETER Experiment Name: At_Germinating_Seeds_cDNA_P Parameter: Age (day) Value: 3 vs. 0
  misc_feature: MA Experiment 108463 PARAMETER Experiment Name: At_Germinating_Seeds_cDNA_P Parameter: Tissue Value: Germinating Seeds
  misc_feature: MA Experiment ID: 108489 Result: Up-regulated in Transcription
  misc_feature: MA Experiment ID: 108561 Result: Down-regulated in Transcription
  misc_feature: MA Experiment 108561 PARAMETER Experiment Name: At_100uM_ABA_cDNA_P Parameter: Timepoint (hr) Value: 6
  misc_feature: MA Experiment 108561 PARAMETER Experiment Name: At_100uM_ABA_cDNA_P Parameter: Tissue Value: Aerial
  misc_feature: MA Experiment 108561 PARAMETER Experiment Name: At_100uM_ABA_cDNA_P Parameter: Treatment Value: 100uM ABA vs. No Treatment
  misc_feature: MA Experiment ID: 108573 Result: Down-regulated in Transcription
  misc_feature: MA Experiment 108573 PARAMETER Experiment Name: At_Drought_cDNA_P Parameter: Timepoint (hr) Value: 6
  misc_feature: MA Experiment 108573 PARAMETER Experiment Name: At_Drought_cDNA_P Parameter: Tissue Value: Aerial
  misc_feature: MA Experiment 108573 PARAMETER Experiment Name: At_Drought_cDNA_P Parameter: Treatment Value: Drought vs. No Drought
  misc_feature: MA Experiment ID: 108607 Result: Down-regulated in Transcription
  misc_feature: MA Experiment 108607 PARAMETER Experiment Name: At_100uM_ABA_cDNA_P Parameter: Timepoint (hr) Value: 4
  misc_feature: MA Experiment 108607 PARAMETER Experiment Name: At_100uM_ABA_cDNA_P Parameter: Tissue Value: Aerial
  misc_feature: MA Experiment 108607 PARAMETER Experiment Name: At_100uM_ABA_cDNA_P Parameter: Treatment Value: 100uM ABA vs. No Treatment
  misc_feature: MA Experiment ID: 108609 Result: Down-regulated in Transcription
  misc_feature: MA Experiment 108609 PARAMETER Experiment Name: At_100uM_ABA_cDNA_P Parameter: Timepoint (hr) Value: 24
  misc_feature: MA Experiment 108609 PARAMETER Experiment Name: At_100uM_ABA_cDNA_P Parameter: Tissue Value: Aerial
  misc_feature: MA Experiment 108609 PARAMETER Experiment Name: At_100uM_ABA_cDNA_P Parameter: Treatment Value: 100uM ABA vs. No Treatment
  misc_feature: MA Experiment ID: 20000180 Result: Down-regulated in Transcription
  misc_feature: MA Experiment 20000180 PARAMETER Experiment Name: At_Germinating_Seeds_P Parameter: Age (hr) Value: 24 vs. 0
  misc_feature: MA Experiment 20000180 PARAMETER Experiment Name: At_Germinating_Seeds_P Parameter: Tissue Value: Germinating Seeds
  misc_feature: MA Experiment ID: 20000227 Result: Up-regulated in Transcription
  misc_feature: MA Experiment 20000227 PARAMETER Experiment Name: At_Root-Tips-vs-Tops_P Parameter: Tissue Value: Root Tips vs. Root Tops
  misc_feature: MA Experiment ID: 20000264 Result: Up-regulated in Transcription
  misc_feature: MA Experiment 20000264 PARAMETER Experiment Name: At_Open_Flower_P Parameter: Age (day) Value: 21
  misc_feature: MA Experiment 20000264 PARAMETER Experiment Name: At_Open_Flower_P Parameter: Plant Line Value: WS
  misc_feature: MA Experiment 20000264 PARAMETER Experiment Name: At_Open_Flower_P Parameter: Tissue Value: Open Flower vs. Whole Plant
  misc_feature: MA Experiment ID: 20000453 Result: Down-regulated in Transcription
  misc_feature: MA Experiment 20000453 PARAMETER Experiment Name: At_100uM_ABA_P Parameter: Age (day) Value: 15
  misc_feature: MA Experiment 20000453 PARAMETER Experiment Name: At_100uM_ABA_P Parameter: Organism Value: A. thaliana
  misc_feature: MA Experiment 20000453 PARAMETER Experiment Name: At_100uM_ABA_P Parameter: Plant Line Value: WS
  misc_feature: MA Experiment 20000453 PARAMETER Experiment Name: At_100uM_ABA_P Parameter: Timepoint (hr) Value: 24
  misc_feature: MA Experiment 20000453 PARAMETER Experiment Name: At_100uM_ABA_P Parameter: Tissue Value: Aerial
  misc_feature: MA Experiment 20000453 PARAMETER Experiment Name: At_100uM_ABA_P Parameter: Treatment Value: 100uM ABA vs. No Treatment
  misc_feature: MA Experiment ID: 20000456 Result: Up-regulated in Transcription
  misc_feature: MA Experiment 20000456 PARAMETER Experiment Name: At_100uM_BA_P Parameter: Age (day) Value: 14
  misc_feature: MA Experiment 20000456 PARAMETER Experiment Name: At_100uM_BA_P Parameter: Organism Value: A. thaliana
  misc_feature: MA Experiment 20000456 PARAMETER Experiment Name: At_100uM_BA_P Parameter: Plant Line Value: WS
  misc_feature: MA Experiment 20000456 PARAMETER Experiment Name: At_100uM_BA_P Parameter: Timepoint (hr) Value: 6
  misc_feature: MA Experiment 20000456 PARAMETER Experiment Name: At_100uM_BA_P Parameter: Tissue Value: Aerial
  misc_feature: MA Experiment 20000456 PARAMETER Experiment Name: At_100uM_BA_P Parameter: Treatment Value: 100uM BA vs. No Treatment
  misc_feature: MA Experiment ID: 20000495 Result: Up-regulated in Transcription
  misc_feature: MA Experiment 20000495 PARAMETER Experiment Name: At_Guard_Cells_P Parameter: Harvest Date Value: 8/2/2002
  misc_feature: MA Experiment 20000495 PARAMETER Experiment Name: At_Guard_Cells_P Parameter: Organism Value: A. thaliana
  misc_feature: MA Experiment 20000495 PARAMETER Experiment Name: At_Guard_Cells_P Parameter: Tissue Value: Guard Cells vs. Leaves
  misc_feature: MA Experiment ID: 20000794 Result: Down-regulated in Transcription
  misc_feature: MA Experiment 20000794 PARAMETER Experiment Name: At_Petals_P Parameter: Age (day) Value: 23-25 days
  misc_feature: MA Experiment 20000794 PARAMETER Experiment Name: At_Petals_P Parameter: Plant Line Value: WS
  misc_feature: MA Experiment 20000794 PARAMETER Experiment Name: At_Petals_P Parameter: Tissue Value: Petals vs. Whole plant
  misc_feature: MA Experiment ID: 20001247 Result: Down-regulated in Transcription
  misc_feature: MA Experiment 20001247 PARAMETER Experiment Name: At_Far-red-induction_P Parameter: Age (day) Value: 7
  misc_feature: MA Experiment 20001247 PARAMETER Experiment Name: At_Far-red-induction_P Parameter: Light Value: Far-red vs. White
  misc_feature: MA Experiment 20001247 PARAMETER Experiment Name: At_Far-red-induction_P Parameter: Organism Value: A. thaliana
  misc_feature: MA Experiment 20001247 PARAMETER Experiment Name: At_Far-red-induction_P Parameter: Plant Line Value: Columbia
  misc_feature: MA Experiment 20001247 PARAMETER Experiment Name: At_Far-red-induction_P Parameter: Timepoint (hr) Value: 1
  misc_feature: MA Experiment 20001247 PARAMETER Experiment Name: At_Far-red-induction_P Parameter: Tissue Value: Whole Plant
  misc_feature: MA Experiment ID: 20001458 Result: Up-regulated in Transcription
  misc_feature: MA Experiment 20001458 PARAMETER Experiment Name: At_50mM_NH4NO3_L-to-H_P Parameter: Age (day) Value: Undefined
  misc_feature: MA Experiment 20001458 PARAMETER Experiment Name: At_50mM_NH4NO3_L-to-H_P Parameter: Organism Value: Undefined
  misc_feature: MA Experiment 20001458 PARAMETER Experiment Name: At_50mM_NH4NO3_L-to-H_P Parameter: Plant Line Value: Undefined
  misc_feature: MA Experiment 20001458 PARAMETER Experiment Name: At_50mM_NH4NO3_L-to-H_P Parameter: Timepoint (hr) Value: 2
  misc_feature: MA Experiment 20001458 PARAMETER Experiment Name: At_50mM_NH4NO3_L-to-H_P Parameter: Tissue Value: Siliques
  misc_feature: MA Experiment 20001458 PARAMETER Experiment Name: At_50mM_NH4NO3_L-to-H_P Parameter: Treatment Value: 50mM NH4NO3 vs. 100mM Manitol
  misc_feature: MA Experiment ID: 20001556 Result: Up-regulated in Transcription
  misc_feature: MA Experiment 20001556 PARAMETER Experiment Name: At_Drought_Soil_Dry_P Parameter: Age (day) Value: 26
  misc_feature: MA Experiment 20001556 PARAMETER Experiment Name: At_Drought_Soil_Dry_P Parameter: Organism Value: A. thaliana
  misc_feature: MA Experiment 20001556 PARAMETER Experiment Name: At_Drought_Soil_Dry_P Parameter: Plant Line Value: WS
  misc_feature: MA Experiment 20001556 PARAMETER Experiment Name: At_Drought_Soil_Dry_P Parameter: Post Timepoint (hr) Value: None
  misc_feature: MA Experiment 20001556 PARAMETER Experiment Name: At_Drought_Soil_Dry_P Parameter: Post-Treatment Value: None
  misc_feature: MA Experiment 20001556 PARAMETER Experiment Name: At_Drought_Soil_Dry_P Parameter: Timepoint (day) Value: 12
  misc_feature: MA Experiment 20001556 PARAMETER Experiment Name: At_Drought_Soil_Dry_P Parameter: Treatment Value: Drought vs. No Drought
  misc_feature: MA Experiment ID: 20001557 Result: Up-regulated in Transcription
  misc_feature: MA Experiment 20001557 PARAMETER Experiment Name: At_Drought_Soil_Dry_P Parameter: Age (day) Value: 27
  misc_feature: MA Experiment 20001557 PARAMETER Experiment Name: At_Drought_Soil_Dry_P Parameter: Organism Value: A. thaliana
  misc_feature: MA Experiment 20001557 PARAMETER Experiment Name: At_Drought_Soil_Dry_P Parameter: Plant Line Value: WS
  misc_feature: MA Experiment 20001557 PARAMETER Experiment Name: At_Drought_Soil_Dry_P Parameter: Post Timepoint (hr) Value: 3
  misc_feature: MA Experiment 20001557 PARAMETER Experiment Name: At_Drought_Soil_Dry_P Parameter: Post-Treatment Value: Re-Water vs. No Drought
  misc_feature: MA Experiment 20001557 PARAMETER Experiment Name: At_Drought_Soil_Dry_P Parameter: Timepoint (day) Value: 13
  misc_feature: MA Experiment 20001557 PARAMETER Experiment Name: At_Drought_Soil_Dry_P Parameter: Treatment Value: Drought vs. No Drought
  misc_feature: MA Experiment ID: 20001558 Result: Up-regulated in Transcription
  misc_feature: MA Experiment 20001558 PARAMETER Experiment Name: At_Drought_Soil_Dry_P Parameter: Age (day) Value: 27
  misc_feature: MA Experiment 20001558 PARAMETER Experiment Name: At_Drought_Soil_Dry_P Parameter: Organism Value: A. thaliana
  misc_feature: MA Experiment 20001558 PARAMETER Experiment Name: At_Drought_Soil_Dry_P Parameter: Plant Line Value: WS
  misc_feature: MA Experiment 20001558 PARAMETER Experiment Name: At_Drought_Soil_Dry_P Parameter: Post Timepoint (hr) Value: 6
  misc_feature: MA Experiment 20001558 PARAMETER Experiment Name: At_Drought_Soil_Dry_P Parameter: Post-Treatment Value: Re-Water vs. No Drought
  misc_feature: MA Experiment 20001558 PARAMETER Experiment Name: At_Drought_Soil_Dry_P Parameter: Timepoint (day) Value: 13
  misc_feature: MA Experiment 20001558 PARAMETER Experiment Name: At_Drought_Soil_Dry_P Parameter: Treatment Value: Drought vs. No Drought
  misc_feature: MA Experiment ID: 20001560 Result: Up-regulated in Transcription
  misc_feature: MA Experiment 20001560 PARAMETER Experiment Name: At_Drought_Soil_Dry_P Parameter: Age (day) Value: 28
  misc_feature: MA Experiment 20001560 PARAMETER Experiment Name: At_Drought_Soil_Dry_P Parameter: Organism Value: A. thaliana
  misc_feature: MA Experiment 20001560 PARAMETER Experiment Name: At_Drought_Soil_Dry_P Parameter: Plant Line Value: WS
  misc_feature: MA Experiment 20001560 PARAMETER Experiment Name: At_Drought_Soil_Dry_P Parameter: Post Timepoint (hr) Value: None
  misc_feature: MA Experiment 20001560 PARAMETER Experiment Name: At_Drought_Soil_Dry_P Parameter: Post-Treatment Value: None
  misc_feature: MA Experiment 20001560 PARAMETER Experiment Name: At_Drought_Soil_Dry_P Parameter: Timepoint (day) Value: 14
  misc_feature: MA Experiment 20001560 PARAMETER Experiment Name: At_Drought_Soil_Dry_P Parameter: Treatment Value: Drought vs. No Drought
  misc_feature: MA Experiment ID: 20001756 Result: Up-regulated in Transcription
  misc_feature: MA Experiment 20001756 PARAMETER Experiment Name: At_50mM_NH4NO3_L-to-H_P Parameter: Timepoint (hr) Value: 4
  misc_feature: MA Experiment 20001756 PARAMETER Experiment Name: At_50mM_NH4NO3_L-to-H_P Parameter: Tissue Value: Leaf
  misc_feature: MA Experiment 20001756 PARAMETER Experiment Name: At_50mM_NH4NO3_L-to-H_P Parameter: Treatment Value: 50mM NH4NO3 vs 100mM Mannitol
  misc_feature: MA Experiment ID: 20001757 Result: Up-regulated in Transcription
  misc_feature: MA Experiment 20001757 PARAMETER Experiment Name: At_50mM_NH4NO3_L-to-H_P Parameter: Timepoint (hr) Value: 6
  misc_feature: MA Experiment 20001757 PARAMETER Experiment Name: At_50mM_NH4NO3_L-to-H_P Parameter: Tissue Value: Leaf
  misc_feature: MA Experiment 20001757 PARAMETER Experiment Name: At_50mM_NH4NO3_L-to-H_P Parameter: Treatment Value: 50mM NH4NO3 vs 100mM Mannitol
catcctctcactgcctcttttctcactcactgttacttcgctaaaaccctaatttcgccattcccttctctaagttttgtgtgtagacatttagaaatggctttctgcaacaaacttagcggtatcttgagacaaggggtttctcagagctcaaatggtccagttacatctatgcttggctctcttcgttacatgtcctctaagctttttgttggtggtctctcttggggaactgatgacagctccttaaagcaagctttcactagctttggtgaagtcacagaagcaacggtgattgcagacagagagacagggaggtcgaggggattcggatttgttagcttcagctgtgaggattctgctaacaatgccataaaagaaatggatggaaaggagctgaatggtaggcaaatccgtgtgaatcttgcaaccgaaagatcgagtgccccgagatcatcatttggtggtggtggcggttacggtggtggcggtggtggtggctactaaagcaaacaagccagaggatttgagagagagaggagcctcagaactttcagtagttagttagtttgtttgtttcctctttgtttaactgcaaataaccttaactggttttgttaaacttatttagccctgttttttggttgtgtctgaataccgtagtattgttgctccatcttctgcaaatctattagcatcgagttcgattc

SEQ ID NO: 99656 - protein, 168 aa, Arabidopsis thaliana; identical to SEQ ID NO: 30689
  peptide (1)..(168): Ceres Seq. ID no. 13603380
  misc_feature (69)..(140): Pfam Name: RNA recognition motif. (a.k.a. RRM, RBD, or RNP domain) Pfam Description: RNA recognition motif. (a.k.a. RRM, RBD, or RNP
  misc_feature (33)..(168): Homolog of NCBI NO: 15229525 NR Description: RNA-binding protein, putative [Arabidopsis
  misc_feature (33)..(168): Homolog of NCBI NO: 21553972 NR Description: glycine-rich RNA binding protein, putative
  misc_feature (33)..(168): Homolog of NCBI NO: 2826811 NR Description: AtGRP2 [Arabidopsis thaliana]
  misc_feature (33)..(168): Homolog of NCBI NO: 30682622 NR Description: glycine-rich RNA-binding protein (AtGRP2)
  misc_feature (33)..(166): Homolog of NCBI NO: 15236359 NR Description: glycine-rich RNA-binding protein (AtGRP2)
  misc_feature (33)..(168): Homolog of NCBI NO: 7439994 NR Description: glycine-rich RNA-binding protein - garden pea
  misc_feature (52)..(166): Homolog of NCBI NO: 322514 NR Description: glycine-rich RNA-binding protein (clone A81) -
  misc_feature (33)..(168): Homolog of NCBI NO: 7439995 NR Description: RNA binding protein 3 - wood tobacco
  misc_feature (33)..(166): Homolog of NCBI NO: 15239505 NR Description: RNA-binding protein, putative [Arabidopsis >gi|9759450|dbj|BAB10366.1| contains similarity to RNA binding [Arabidopsis thaliana] >gi|16974556|gb|AAL31194.1|
  misc_feature (155)..(168): Homolog of NCBI NO: 15239505 NR Description: RNA-binding protein, putative [Arabidopsis >gi|9759450|dbj|BAB10366.1| contains similarity to RNA binding [Arabidopsis thaliana] >gi|16974556|gb|AAL31194.1|

SEQ ID NO: 99657 - protein, 136 aa, Arabidopsis thaliana; identical to SEQ ID NO: 25481
  peptide (1)..(136): Ceres Seq. ID no. 13603381
  misc_feature (37)..(108): Pfam Name: RNA recognition motif. (a.k.a. RRM, RBD, or RNP domain) Pfam Description: RNA recognition motif. (a.k.a. RRM, RBD, or RNP
  misc_feature (1)..(136): Homolog of NCBI NO: 15229525 NR Description: RNA-binding protein, putative [Arabidopsis
  misc_feature (1)..(136): Homolog of NCBI NO: 21553972 NR Description: glycine-rich RNA binding protein, putative
  misc_feature (1)..(136): Homolog of NCBI NO: 2826811 NR Description: AtGRP2 [Arabidopsis thaliana]
  misc_feature (1)..(136): Homolog of NCBI NO: 30682622 NR Description: glycine-rich RNA-binding protein (AtGRP2)
  misc_feature (1)..(134): Homolog of NCBI NO: 15236359 NR Description: glycine-rich RNA-binding protein (AtGRP2)
  misc_feature (1)..(136): Homolog of NCBI NO: 7439994 NR Description: glycine-rich RNA-binding protein - garden pea
  misc_feature (20)..(134): Homolog of NCBI NO: 322514 NR Description: glycine-rich RNA-binding protein (clone A81) -
  misc_feature (1)..(136): Homolog of NCBI NO: 7439995 NR Description: RNA binding protein 3 - wood tobacco
  misc_feature (1)..(134): Homolog of NCBI NO: 15239505 NR Description: RNA-binding protein, putative [Arabidopsis >gi|9759450|dbj|BAB10366.1| contains similarity to RNA binding [Arabidopsis thaliana] >gi|16974556|gb|AAL31194.1|
  misc_feature (123)..(136): Homolog of NCBI NO: 15239505 NR Description: RNA-binding protein, putative [Arabidopsis >gi|9759450|dbj|BAB10366.1| contains similarity to RNA binding [Arabidopsis thaliana] >gi|16974556|gb|AAL31194.1|

SEQ ID NO: 99658 - protein, 111 aa, Arabidopsis thaliana; identical to SEQ ID NO: 25482
  peptide (1)..(111): Ceres Seq. ID no. 13603382
  misc_feature (12)..(83): Pfam Name: RNA recognition motif. (a.k.a. RRM, RBD, or RNP domain) Pfam Description: RNA recognition motif. (a.k.a. RRM, RBD, or RNP
  misc_feature (1)..(111): Homolog of NCBI NO: 15229525 NR Description: RNA-binding protein, putative [Arabidopsis
  misc_feature (1)..(111): Homolog of NCBI NO: 21553972 NR Description: glycine-rich RNA binding protein, putative
  misc_feature (1)..(111): Homolog of NCBI NO: 2826811 NR Description: AtGRP2 [Arabidopsis thaliana]
  misc_feature (1)..(111): Homolog of NCBI NO: 30682622 NR Description: glycine-rich RNA-binding protein (AtGRP2)
  misc_feature (1)..(109): Homolog of NCBI NO: 15236359 NR Description: glycine-rich RNA-binding protein (AtGRP2)
  misc_feature (1)..(111): Homolog of NCBI NO: 7439994 NR Description: glycine-rich RNA-binding protein - garden pea
  misc_feature (1)..(109): Homolog of NCBI NO: 322514 NR Description: glycine-rich RNA-binding protein (clone A81) -
  misc_feature (1)..(111): Homolog of NCBI NO: 7439995 NR Description: RNA binding protein 3 - wood tobacco
  misc_feature (1)..(109): Homolog of NCBI NO: 15239505 NR Description: RNA-binding protein, putative [Arabidopsis >gi|9759450|dbj|BAB10366.1| contains similarity to RNA binding [Arabidopsis thaliana] >gi|16974556|gb|AAL31194.1|
  misc_feature (98)..(111): Homolog of NCBI NO: 15239505 NR Description: RNA-binding protein, putative [Arabidopsis >gi|9759450|dbj|BAB10366.1| contains similarity to RNA binding [Arabidopsis thaliana] >gi|16974556|gb|AAL31194.1|

SEQ ID NO: 99659 - DNA, 1445 bp, Arabidopsis thaliana
  misc_feature (1)..(1445): Ceres Seq. ID no. 13603383
  misc_feature: MA Experiment ID: 108462 Result: Up-regulated in Transcription
  misc_feature: MA Experiment 108462 PARAMETER Experiment Name: At_Germinating_Seeds_cDNA_P Parameter: Age (day) Value: 2 vs. 0
  misc_feature: MA Experiment 108462 PARAMETER Experiment Name: At_Germinating_Seeds_cDNA_P Parameter: Tissue Value: Germinating Seeds
  misc_feature: MA Experiment ID: 108463 Result: Up-regulated in Transcription
  misc_feature: MA Experiment 108463 PARAMETER Experiment Name: At_Germinating_Seeds_cDNA_P Parameter: Age (day) Value: 3 vs. 0
  misc_feature: MA Experiment 108463 PARAMETER Experiment Name: At_Germinating_Seeds_cDNA_P Parameter: Tissue Value: Germinating Seeds
  misc_feature: MA Experiment ID: 108464 Result: Up-regulated in Transcription
  misc_feature: MA Experiment 108464 PARAMETER Experiment Name: At_Germinating_Seeds_cDNA_P Parameter: Age (day) Value: 4 vs. 0
  misc_feature: MA Experiment 108464 PARAMETER Experiment Name: At_Germinating_Seeds_cDNA_P Parameter: Tissue Value: Germinating Seeds
  misc_feature: MA Experiment ID: 108474 Result: Up-regulated in Transcription
  misc_feature: MA Experiment 108474 PARAMETER Experiment Name: At_Drought_Flowers_cDNA_P Parameter: Timepoint (hr) Value: null
  misc_feature: MA Experiment 108474 PARAMETER Experiment Name: At_Drought_Flowers_cDNA_P Parameter: Treatment Value: Drought vs. No Drought
  misc_feature: MA Experiment ID: 108501 Result: Down-regulated in Transcription
  misc_feature: MA Experiment 108501 PARAMETER Experiment Name: At_ap2_floral_buds_cDNA_P Parameter: Plant Line Value: ap2 (Ler.)
  misc_feature: MA Experiment 108501 PARAMETER Experiment Name: At_ap2_floral_buds_cDNA_P Parameter: Tissue Value: Closed Flower
  misc_feature: MA Experiment ID: 108573 Result: Up-regulated in Transcription
  misc_feature: MA Experiment 108573 PARAMETER Experiment Name: At_Drought_cDNA_P Parameter: Timepoint (hr) Value: 6
  misc_feature: MA Experiment 108573 PARAMETER Experiment Name: At_Drought_cDNA_P Parameter: Tissue Value: Aerial
  misc_feature: MA Experiment 108573 PARAMETER Experiment Name: At_Drought_cDNA_P Parameter: Treatment Value: Drought vs. No Drought
  misc_feature: MA Experiment ID: 108595 Result: Down-regulated in Transcription
  misc_feature: MA Experiment 108595 PARAMETER Experiment Name: At_Ler-pi_Ovule_cDNA_P Parameter: Plant Line Value: null
  misc_feature: MA Experiment ID: 20000086 Result: Down-regulated in Transcription
  misc_feature: MA Experiment 20000086 PARAMETER Experiment Name: At_100uM_ABA_Mutants_cDNA_P Parameter: Plant Line Value: CS22
  misc_feature: MA Experiment 20000086 PARAMETER Experiment Name: At_100uM_ABA_Mutants_cDNA_P Parameter: Timepoint (hr) Value: 6
  misc_feature: MA Experiment 20000086 PARAMETER Experiment Name: At_100uM_ABA_Mutants_cDNA_P Parameter: Tissue Value: Aerial
  misc_feature: MA Experiment 20000086 PARAMETER Experiment Name: At_100uM_ABA_Mutants_cDNA_P Parameter: Treatment Value: 100uM ABA vs. No Treatment
  misc_feature: MA Experiment ID: 20000087 Result: Down-regulated in Transcription
  misc_feature: MA Experiment 20000087 PARAMETER Experiment Name: At_100uM_ABA_Mutants_cDNA_P Parameter: Plant Line Value: WS
  misc_feature: MA Experiment 20000087 PARAMETER Experiment Name: At_100uM_ABA_Mutants_cDNA_P Parameter: Timepoint (hr) Value: 6
  misc_feature: MA Experiment 20000087 PARAMETER Experiment Name: At_100uM_ABA_Mutants_cDNA_P Parameter: Tissue Value: Aerial
  misc_feature: MA Experiment 20000087 PARAMETER Experiment Name: At_100uM_ABA_Mutants_cDNA_P Parameter: Treatment Value: 100uM ABA vs. No Treatment
  misc_feature: MA Experiment ID: 20000113 Result: Down-regulated in Transcription
  misc_feature: MA Experiment 20000113 PARAMETER Experiment Name: At_42deg_Heat_cDNA_P Parameter: Temperature (deg C) Value: 42 vs. 22
  misc_feature: MA Experiment 20000113 PARAMETER Experiment Name: At_42deg_Heat_cDNA_P Parameter: Timepoint (hr) Value: 8
  misc_feature: MA Experiment 20000113 PARAMETER Experiment Name: At_42deg_Heat_cDNA_P Parameter: Tissue Value: Aerial
  misc_feature: MA Experiment ID: 20000169 Result: Up-regulated in Transcription
  misc_feature: MA Experiment 20000169 PARAMETER Experiment Name: At_100uM_ABA_P Parameter: Age (day) Value: 14
  misc_feature: MA Experiment 20000169 PARAMETER Experiment Name: At_100uM_ABA_P Parameter: Organism Value: A. thaliana
  misc_feature: MA Experiment 20000169 PARAMETER Experiment Name: At_100uM_ABA_P Parameter: Plant Line Value: WS
  misc_feature: MA Experiment 20000169 PARAMETER Experiment Name: At_100uM_ABA_P Parameter: Timepoint (hr) Value: 6
  misc_feature: MA Experiment 20000169 PARAMETER Experiment Name: At_100uM_ABA_P Parameter: Tissue Value: Aerial
  misc_feature: MA Experiment 20000169 PARAMETER Experiment Name: At_100uM_ABA_P Parameter: Treatment Value: 100uM ABA vs. No Treatment
  misc_feature: MA Experiment ID: 20000171 Result: Down-regulated in Transcription
  misc_feature: MA Experiment 20000171 PARAMETER Experiment Name: At_42deg_Heat_P Parameter: Age (day) Value: 14
  misc_feature: MA Experiment 20000171 PARAMETER Experiment Name: At_42deg_Heat_P Parameter: Organism Value: A. thaliana
  misc_feature: MA Experiment 20000171 PARAMETER Experiment Name: At_42deg_Heat_P Parameter: Plant Line Value: WS
  misc_feature: MA Experiment 20000171 PARAMETER Experiment Name: At_42deg_Heat_P Parameter: Temperature (deg C) Value: 42 vs. 22
  misc_feature: MA Experiment 20000171 PARAMETER Experiment Name: At_42deg_Heat_P Parameter: Timepoint (hr) Value: 1
  misc_feature: MA Experiment 20000171 PARAMETER Experiment Name: At_42deg_Heat_P Parameter: Tissue Value: Aerial
  misc_feature: MA Experiment ID: 20000184 Result: Up-regulated in Transcription
  misc_feature: MA Experiment 20000184 PARAMETER Experiment Name: At_Shoots__P Parameter: Age (day) Value: 7
  misc_feature: MA Experiment 20000184 PARAMETER Experiment Name: At_Shoots__P Parameter: Tissue Value: Shoots vs. Whole Plant
  misc_feature: MA Experiment ID: 20000185 Result: Down-regulated in Transcription
  misc_feature: MA Experiment 20000185 PARAMETER Experiment Name: At_Roots__P Parameter: Age (day) Value: 7 vs. 21
  misc_feature: MA Experiment 20000185 PARAMETER Experiment Name: At_Roots__P Parameter: Organism Value: A. thaliana
  misc_feature: MA Experiment 20000185 PARAMETER Experiment Name: At_Roots__P Parameter: Tissue Value: Roots vs. Whole Plant
  misc_feature: MA Experiment ID: 20000234 Result: Down-regulated in Transcription
  misc_feature: MA Experiment 20000234 PARAMETER Experiment Name: At_Siliques_P Parameter: Age (day) Value: 21
  misc_feature: MA Experiment 20000234 PARAMETER Experiment Name: At_Siliques_P Parameter: Organism Value: A. thaliana
  misc_feature: MA Experiment 20000234 PARAMETER Experiment Name: At_Siliques_P Parameter: Plant Line Value: WS
  misc_feature: MA Experiment 20000234 PARAMETER Experiment Name: At_Siliques_P Parameter: Tissue Value: Less Than 5mm Siliques vs. Whole Plant
  misc_feature: MA Experiment ID: 20000235 Result: Down-regulated in Transcription
  misc_feature: MA Experiment 20000235 PARAMETER Experiment Name: At_Siliques_P Parameter: Age (day) Value: 21
  misc_feature: MA Experiment 20000235 PARAMETER Experiment Name: At_Siliques_P Parameter: Organism Value: A. thaliana
  misc_feature: MA Experiment 20000235 PARAMETER Experiment Name: At_Siliques_P Parameter: Plant Line Value: WS
  misc_feature: MA Experiment 20000235 PARAMETER Experiment Name: At_Siliques_P Parameter: Tissue Value: 5-10mm Siliques vs. Whole Plant
  misc_feature: MA Experiment ID: 20000264 Result: Down-regulated in Transcription
  misc_feature: MA Experiment 20000264 PARAMETER Experiment Name: At_Open_Flower_P Parameter: Age (day) Value: 21
  misc_feature: MA Experiment 20000264 PARAMETER Experiment Name: At_Open_Flower_P Parameter: Plant Line Value: WS
  misc_feature: MA Experiment 20000264 PARAMETER Experiment Name: At_Open_Flower_P Parameter: Tissue Value: Open Flower vs. Whole Plant
  misc_feature: MA Experiment ID: 20000265 Result: Up-regulated in Transcription
  misc_feature: MA Experiment 20000265 PARAMETER Experiment Name: At_Open_Flower_P Parameter: Age (day) Value: 21
  misc_feature: MA Experiment 20000265 PARAMETER Experiment Name: At_Open_Flower_P Parameter: Plant Line Value: WS
  misc_feature: MA Experiment 20000265 PARAMETER Experiment Name: At_Open_Flower_P Parameter: Tissue Value: Closed Flower vs. Whole Plant
  misc_feature: MA Experiment ID: 20000286 Result: Up-regulated in Transcription
  misc_feature: MA Experiment 20000286 PARAMETER Experiment Name: At_Open_Flower_P Parameter: Age (day) Value: 21
  misc_feature: MA Experiment 20000286 PARAMETER Experiment Name: At_Open_Flower_P Parameter: Plant Line Value: WS
  misc_feature: MA Experiment 20000286 PARAMETER Experiment Name: At_Open_Flower_P Parameter: Tissue Value: Half Open vs. Whole Plant
  misc_feature: MA Experiment ID: 20000438 Result: Up-regulated in Transcription
  misc_feature: MA Experiment 20000438 PARAMETER Experiment Name: At_Shoots__P Parameter: Age (day) Value: 14
  misc_feature: MA Experiment 20000438 PARAMETER Experiment Name: At_Shoots__P Parameter: Tissue Value: Shoots vs. Whole Plant
  misc_feature: MA Experiment ID: 20000439 Result: Down-regulated in Transcription
  misc_feature: MA Experiment 20000439 PARAMETER Experiment Name: At_Roots__P Parameter: Age (day) Value: 14 vs. 21
  misc_feature: MA Experiment 20000439 PARAMETER Experiment Name: At_Roots__P Parameter: Organism Value: A. thaliana
  misc_feature: MA Experiment 20000439 PARAMETER Experiment Name: At_Roots__P Parameter: Tissue Value: Roots vs. Whole Plant
  misc_feature: MA Experiment ID: 20000455 Result: Up-regulated in Transcription
  misc_feature: MA Experiment 20000455 PARAMETER Experiment Name: At_100uM_ABA_P Parameter: Age (day) Value: 16
  misc_feature: MA Experiment 20000455 PARAMETER Experiment Name: At_100uM_ABA_P Parameter: Organism Value: A. thaliana
  misc_feature: MA Experiment 20000455 PARAMETER Experiment Name: At_100uM_ABA_P Parameter: Plant Line Value: WS
  misc_feature: MA Experiment 20000455 PARAMETER Experiment Name: At_100uM_ABA_P Parameter: Timepoint (hr) Value: 48
  misc_feature: MA Experiment 20000455 PARAMETER Experiment Name: At_100uM_ABA_P Parameter: Tissue Value: Aerial
  misc_feature: MA Experiment 20000455 PARAMETER Experiment Name: At_100uM_ABA_P Parameter: Treatment Value: 100uM ABA vs. No Treatment
  misc_feature: MA Experiment ID: 20000495 Result: Down-regulated in Transcription
  misc_feature: MA Experiment 20000495 PARAMETER Experiment Name: At_Guard_Cells_P Parameter: Harvest Date Value: 8/2/2002
  misc_feature: MA Experiment 20000495 PARAMETER Experiment Name: At_Guard_Cells_P Parameter: Organism Value: A. thaliana
  misc_feature: MA Experiment 20000495 PARAMETER Experiment Name: At_Guard_Cells_P Parameter: Tissue Value: Guard Cells vs. Leaves
  misc_feature: MA Experiment ID: 20000573 Result: Down-regulated in Transcription
  misc_feature: MA Experiment 20000573 PARAMETER Experiment Name: At_100uM_ABA_Mutants__P Parameter: Organism Value: A. thaliana
  misc_feature: MA Experiment 20000573 PARAMETER Experiment Name: At_100uM_ABA_Mutants__P Parameter: Plant Line Value: CS22 vs. Ler wt
  misc_feature: MA Experiment 20000573 PARAMETER Experiment Name: At_100uM_ABA_Mutants__P Parameter: Timepoint (hr) Value: N/A
  misc_feature: MA Experiment 20000573 PARAMETER Experiment Name: At_100uM_ABA_Mutants__P Parameter: Tissue Value: Whole Plant
  misc_feature: MA Experiment 20000573 PARAMETER Experiment Name: At_100uM_ABA_Mutants__P Parameter: Treatment Value: None
  misc_feature: MA Experiment ID: 20000574 Result: Down-regulated in Transcription
  misc_feature: MA Experiment 20000574 PARAMETER Experiment Name: At_100uM_ABA_Mutants__P Parameter: Organism Value: A. thaliana
  misc_feature: MA Experiment 20000574 PARAMETER Experiment Name: At_100uM_ABA_Mutants__P Parameter: Plant Line Value: CS23 vs. Ler wt
  misc_feature: MA Experiment 20000574 PARAMETER Experiment Name: At_100uM_ABA_Mutants__P Parameter: Timepoint (hr) Value: N/A
  misc_feature: MA Experiment 20000574 PARAMETER Experiment Name: At_100uM_ABA_Mutants__P Parameter: Tissue Value: Whole Plant
  misc_feature: MA Experiment 20000574 PARAMETER Experiment Name: At_100uM_ABA_Mutants__P Parameter: Treatment Value: None
  misc_feature: MA Experiment ID: 20000794 Result: Down-regulated in Transcription
  misc_feature: MA Experiment 20000794 PARAMETER Experiment Name: At_Petals_P Parameter: Age (day) Value: 23-25 days
  misc_feature: MA Experiment 20000794 PARAMETER Experiment Name: At_Petals_P Parameter: Plant Line Value: WS
  misc_feature: MA Experiment 20000794 PARAMETER Experiment Name: At_Petals_P Parameter: Tissue Value: Petals vs. Whole plant
  misc_feature: MA Experiment ID: 20001248 Result: Down-regulated in Transcription
  misc_feature: MA Experiment 20001248 PARAMETER Experiment Name: At_Far-red-induction_P Parameter: Age (day) Value: 7
  misc_feature: MA Experiment 20001248 PARAMETER Experiment Name: At_Far-red-induction_P Parameter: Light Value: Far-red vs. White
  misc_feature: MA Experiment 20001248 PARAMETER Experiment Name: At_Far-red-induction_P Parameter: Organism Value: A. thaliana
  misc_feature: MA Experiment 20001248 PARAMETER Experiment Name: At_Far-red-induction_P Parameter: Plant Line Value: Columbia
  misc_feature: MA Experiment 20001248 PARAMETER Experiment Name: At_Far-red-induction_P Parameter: Timepoint (hr) Value: 4
  misc_feature: MA Experiment 20001248 PARAMETER Experiment Name: At_Far-red-induction_P Parameter: Tissue Value: Whole Plant
  misc_feature: MA Experiment ID: 20001554 Result: Up-regulated in Transcription
  misc_feature: MA Experiment 20001554 PARAMETER Experiment Name: At_Drought_Soil_Dry_P Parameter: Age (day) Value: 21
  misc_feature: MA Experiment 20001554 PARAMETER Experiment Name: At_Drought_Soil_Dry_P Parameter: Organism Value: A. thaliana
  misc_feature: MA Experiment 20001554 PARAMETER Experiment Name: At_Drought_Soil_Dry_P Parameter: Plant Line Value: WS
  misc_feature: MA Experiment 20001554 PARAMETER Experiment Name: At_Drought_Soil_Dry_P Parameter: Post Timepoint (hr) Value: None
  misc_feature: MA Experiment 20001554 PARAMETER Experiment Name: At_Drought_Soil_Dry_P Parameter: Post-Treatment Value: None
  misc_feature: MA Experiment 20001554 PARAMETER Experiment Name: At_Drought_Soil_Dry_P Parameter: Timepoint (day) Value: 7
  misc_feature: MA Experiment 20001554 PARAMETER Experiment Name: At_Drought_Soil_Dry_P Parameter: Treatment Value: Drought vs. No Drought
  misc_feature: MA Experiment ID: 20001757 Result: Down-regulated in Transcription
  misc_feature: MA Experiment 20001757 PARAMETER Experiment Name: At_50mM_NH4NO3_L-to-H_P Parameter: Timepoint (hr) Value: 6
  misc_feature: MA Experiment 20001757 PARAMETER Experiment Name: At_50mM_NH4NO3_L-to-H_P Parameter: Tissue Value: Leaf
  misc_feature: MA Experiment 20001757 PARAMETER Experiment Name: At_50mM_NH4NO3_L-to-H_P Parameter: Treatment Value: 50mM NH4NO3 vs 100mM Mannitol
  misc_feature: MA Experiment ID: 20001910 Result: Down-regulated in Transcription
  misc_feature: MA Experiment 20001910 PARAMETER Experiment Name: At_Drought_Reproduction_P Parameter: Age (day) Value: 37
  misc_feature: MA Experiment 20001910 PARAMETER Experiment Name: At_Drought_Reproduction_P Parameter: Organism Value: A. thaliana
  misc_feature: MA Experiment 20001910 PARAMETER Experiment Name: At_Drought_Reproduction_P Parameter: Plant Line Value: WS
  misc_feature: MA Experiment 20001910 PARAMETER Experiment Name: At_Drought_Reproduction_P Parameter: Timepoint (day) Value: 7
  misc_feature: MA Experiment 20001910 PARAMETER Experiment Name: At_Drought_Reproduction_P Parameter: Tissue Value: Flowers
  misc_feature: MA Experiment 20001910 PARAMETER Experiment Name: At_Drought_Reproduction_P Parameter: Treatment Value: Drought vs. No Drought
actcagaatcatctttgtcaatatttctctaccatcttttgtctcatagccatgggtctagttcaagaagagggaagcggtcctgttcatggctttcggttatcaaccgtgagtgcgtccctgccgtcagagacaggtacgacccacgagcccaccggtttagacctcgccatgaagctccactacctaaaggcggtttacatttactcggccgggacagcacgtgacttgactgtgatggacgtgaaggcgcctttgttttcagtgttctaccagatcccttgcatcattggcaggttcaggcgacatgaatcgggacgtccgtacctaaagtgcaacgactgtggcacacgtttcgtggagagtcattgtgatctcactgtggaggagtggctccgtgtaccggaccggtccgttgatgagtctttggtttaccatcaaccagttggaccagatttggcattctctcctttgctctatattcagatgacccggtttagctgcggtggattagctttgggcttaagctgggctcatatcatgggagatccattctctctttctcatttcttcaacttatgggctcaagcctttgctggtgggaagatctactgccccaaaacctctgtcacagagagagactttcaaaacccgacctcaacattcaaaaaaccggattcagtcaaacaggttgacctggttggagatctctgggtcgctccgaataacagcaaaatgacaacattctccttcaatttaacggttaacgatttaaaaacacattttccggtgaacggagacggcgaattcgagattctcactggaatcatatggaaatgtgttgcgacggtgaggggagaatcagctccggtgacgattacggttatcagatcggatccgaagaagttgaagcctagagcggtgagaaatggtcagatgataagttccattcacgtcgatttctcggtggcggaggcgagtttggaggagattgtgaaatcgatcggtgaagcgaaagatgagagggttgtgatcgatgagattgttgatgatgtttcggattttattgtttacggagcgaatttaacgtttgtggatatgagtgaagttgatttttatgaggcgaaagttatggggaaatcgccggaatcggtttattgtaatgttcaggggattggggacgacggagcagtggtggttttaccgggggttgtggaggaggagagggttgtgacggtgacattaccggtggatgagattgagaaggtgaaatgggaaatgaagaaatgtggtttgatcacgccgttagtttaacggtgaatgaagaaatcattttatgcggttatcgttaatcgtgttttttattgtttgtttgggtttttattttatttggtgtgttttatataaaatcaaataaatgtcatttttataatttatgtttgtag

SEQ ID NO: 99660 - protein, 437 aa, Arabidopsis thaliana
  peptide (1)..(437): Ceres Seq. ID no. 13603384
  misc_feature (27)..(430): Pfam Name: Transferase family Pfam Description: Transferase family
  misc_feature (18)..(437): Homolog of NCBI NO: 18403923 NR Description: transferase family [Arabidopsis thaliana]
  misc_feature (18)..(437): Homolog of NCBI NO: 21593424 NR Description: fatty acid elongase-like protein (cer2-like)
  misc_feature (18)..(435): Homolog of NCBI NO: 15236357 NR Description: transferase family [Arabidopsis thaliana]
  misc_feature (29)..(424): Homolog of NCBI NO: 38345799 NR Description: OSJNBa0085I10.16 [Oryza sativa (japonica
  misc_feature (22)..(424): Homolog of NCBI NO: 2130139 NR Description: hypothetical protein - maize
  misc_feature (24)..(427): Homolog of NCBI NO: 15233851 NR Description: CER2 [Arabidopsis thaliana]
  misc_feature (171)..(424): Homolog of NCBI NO: 38568010 NR Description: OSJNBa0070C17.2 [Oryza sativa (japonica
  misc_feature (29)..(163): Homolog of NCBI NO: 38568009 NR Description: OSJNBa0070C17.1 [Oryza sativa (japonica
  misc_feature (110)..(407): Homolog of NCBI NO: 30017587 NR Description: unknown protein [Oryza sativa (japonica
  misc_feature (37)..(288): Homolog of NCBI NO: 40644899 NR Description: hydroxycinnamoyl CoA quinate transferase
TQNHLCQYFSTIFCLIAMGLVQEEGSGPVHGFRLSTVSASLPSETGTTHEPTGLDLAMKLHYLKAVYIYSAGTARDLTVMDVKAPLFSVFYQIPCIIGRFRRHESGRPYLKCNDCGTRFVESHCDLTVEEWLRVPDRSVDESLVYHQPVGPDLAFSPLLYIQMTRFSCGGLALGLSWAHIMGDPFSLSHFFNLWAQAFAGGKIYCPKTSVTERDFQNPTSTFKKPDSVKQVDLVGDLWVAPNNSKMTTFSFNLTVNDLKTHFPVNGDGEFEILTGIIWKCVATVRGESAPVTITVIRSDPKKLKPRAVRNGQMISSIHVDFSVAEASLEEIVKSIGEAKDERVVIDEIVDDVSDFIVYGANLTFVDMSEVDFYEAKVMGKSPESVYCNVQGIGDDGAVVVLPGVVEEERVVTVTLPVDEIEKVKWEMKKCGLITPLV

SEQ ID NO: 99661 - protein, 420 aa, Arabidopsis thaliana
  peptide (1)..(420): Ceres Seq. ID no. 13603385
  misc_feature (10)..(413): Pfam Name: Transferase family Pfam Description: Transferase family
  misc_feature (1)..(420): Homolog of NCBI NO: 18403923 NR Description: transferase family [Arabidopsis thaliana]
  misc_feature (1)..(420): Homolog of NCBI NO: 21593424 NR Description: fatty acid elongase-like protein (cer2-like)
  misc_feature (1)..(418): Homolog of NCBI NO: 15236357 NR Description: transferase family [Arabidopsis thaliana]
  misc_feature (12)..(407): Homolog of NCBI NO: 38345799 NR Description: OSJNBa0085I10.16 [Oryza sativa (japonica
  misc_feature (5)..(407): Homolog of NCBI NO: 2130139 NR Description: hypothetical protein - maize
  misc_feature (7)..(410): Homolog of NCBI NO: 15233851 NR Description: CER2 [Arabidopsis thaliana]
  misc_feature (154)..(407): Homolog of NCBI NO: 38568010 NR Description: OSJNBa0070C17.2 [Oryza sativa (japonica
  misc_feature (12)..(146): Homolog of NCBI NO: 38568009 NR Description: OSJNBa0070C17.1 [Oryza sativa (japonica
  misc_feature (93)..(390): Homolog of NCBI NO: 30017587 NR Description: unknown protein [Oryza sativa (japonica
  misc_feature (20)..(271): Homolog of NCBI NO: 40644899 NR Description: hydroxycinnamoyl CoA quinate transferase
MGLVQEEGSGPVHGFRLSTVSASLPSETGTTHEPTGLDLAMKLHYLKAVYIYSAGTARDLTVMDVKAPLFSVFYQIPCIIGRFRRHESGRPYLKCNDCGTRFVESHCDLTVEEWLRVPDRSVDESLVYHQPVGPDLAFSPLLYIQMTRFSCGGLALGLSWAHIMGDPFSLSHFFNLWAQAFAGGKIYCPKTSVTERDFQNPTSTFKKPDSVKQVDLVGDLWVAPNNSKMTTFSFNLTVNDLKTHFPVNGDGEFEILTGIIWKCVATVRGESAPVTITVIRSDPKKLKPRAVRNGQMISSIHVDFSVAEASLEEIVKSIGEAKDERVVIDEIVDDVSDFIVYGANLTFVDMSEVDFYEAKVMGKSPESVYCNVQGIGDDGAVVVLPGVVEEERVVTVTLPVDEIEKVKWEMKKCGLITPLV

SEQ ID NO: 99662 - protein, 380 aa, Arabidopsis thaliana
  peptide (1)..(380): Ceres Seq. ID no. 13603386
  misc_feature (1)..(373): Pfam Name: Transferase family Pfam Description: Transferase family
  misc_feature (1)..(380): Homolog of NCBI NO: 18403923 NR Description: transferase family [Arabidopsis thaliana]
  misc_feature (1)..(380): Homolog of NCBI NO: 21593424 NR Description: fatty acid elongase-like protein (cer2-like)
  misc_feature (1)..(378): Homolog of NCBI NO: 15236357 NR Description: transferase family [Arabidopsis thaliana]
  misc_feature (1)..(367): Homolog of NCBI NO: 38345799 NR Description: OSJNBa0085I10.16 [Oryza sativa (japonica
  misc_feature (1)..(367): Homolog of NCBI NO: 2130139 NR Description: hypothetical protein - maize
  misc_feature (1)..(370): Homolog of NCBI NO: 15233851 NR Description: CER2 [Arabidopsis thaliana]
  misc_feature (114)..(367): Homolog of NCBI NO: 38568010 NR Description: OSJNBa0070C17.2 [Oryza sativa (japonica
  misc_feature (1)..(106): Homolog of NCBI NO: 38568009 NR Description: OSJNBa0070C17.1 [Oryza sativa (japonica
  misc_feature (53)..(350): Homolog of NCBI NO: 30017587 NR Description: unknown protein [Oryza sativa (japonica
  misc_feature (1)..(231): Homolog of NCBI NO: 40644899 NR Description: hydroxycinnamoyl CoA quinate transferase
MKLHYLKAVYIYSAGTARDLTVMDVKAPLFSVFYQIPCIIGRFRRHESGRPYLKCNDCGTRFVESHCDLTVEEWLRVPDRSVDESLVYHQPVGPDLAFSPLLYIQMTRFSCGGLALGLSWAHIMGDPFSLSHFFNLWAQAFAGGKIYCPKTSVTERDFQNPTSTFKKPDSVKQVDLVGDLWVAPNNSKMTTFSFNLTVNDLKTHFPVNGDGEFEILTGIIWKCVATVRGESAPVTITVIRSDPKKLKPRAVRNGQMISSIHVDFSVAEASLEEIVKSIGEAKDERVVIDEIVDDVSDFIVYGANLTFVDMSEVDFYEAKVMGKSPESVYCNVQGIGDDGAVVVLPGVVEEERVVTVTLPVDEIEKVKWEMKKCGLITPLV

SEQ ID NO: 99663 - DNA, 1256 bp, Arabidopsis thaliana
  misc_feature (1)..(1256): Ceres Seq. ID no. 13603387
  misc_feature: MA Experiment ID: 108434 Result: Up-regulated in Transcription
  misc_feature: MA Experiment 108434 PARAMETER Experiment Name: At_Root_Tips_cDNA_P Parameter: Tissue Value: Root Tips
  misc_feature: MA Experiment ID: 108435 Result: Down-regulated in Transcription
  misc_feature: MA Experiment 108435 PARAMETER Experiment Name: At_stm_Mutants_cDNA_P Parameter: Plant Line Value: wt Landsburg vs stm
  misc_feature: MA Experiment 108435 PARAMETER Experiment Name: At_stm_Mutants_cDNA_P Parameter: Tissue Value: Shoot Apical Meristem Region
  misc_feature: MA Experiment ID: 108461 Result: Up-regulated in Transcription
  misc_feature: MA Experiment 108461 PARAMETER Experiment Name: At_Germinating_Seeds_cDNA_P Parameter: Age (day) Value: 1 vs. 0
  misc_feature: MA Experiment 108461 PARAMETER Experiment Name: At_Germinating_Seeds_cDNA_P Parameter: Tissue Value: Germinating Seeds
  misc_feature: MA Experiment ID: 108501 Result: Down-regulated in Transcription
  misc_feature: MA Experiment 108501 PARAMETER Experiment Name: At_ap2_floral_buds_cDNA_P Parameter: Plant Line Value: ap2 (Ler.)
  misc_feature: MA Experiment 108501 PARAMETER Experiment Name: At_ap2_floral_buds_cDNA_P Parameter: Tissue Value: Closed Flower
  misc_feature: MA Experiment ID: 108574 Result: Down-regulated in Transcription
  misc_feature: MA Experiment 108574 PARAMETER Experiment Name: At_Wounding__cDNA_P Parameter: Timepoint (hr) Value: 1
  misc_feature: MA Experiment 108574 PARAMETER Experiment Name: At_Wounding__cDNA_P Parameter: Tissue Value: Aerial
  misc_feature: MA Experiment 108574 PARAMETER Experiment Name: At_Wounding__cDNA_P Parameter: Treatment Value: Wounding vs. No Wounding
  misc_feature: MA Experiment ID: 108579 Result: Down-regulated in Transcription
  misc_feature: MA Experiment 108579 PARAMETER Experiment Name: At_4deg_Cold_cDNA_P Parameter: Temperature (deg C) Value: 4 vs. 22
  misc_feature: MA Experiment 108579 PARAMETER Experiment Name: At_4deg_Cold_cDNA_P Parameter: Timepoint (hr) Value: 6
  misc_feature: MA Experiment 108579 PARAMETER Experiment Name: At_4deg_Cold_cDNA_P Parameter: Tissue Value: Aerial
  misc_feature: MA Experiment ID: 108585 Result: Down-regulated in Transcription
  misc_feature: MA Experiment 108585 PARAMETER Experiment Name: At_5mM_NaNP_cDNA_P Parameter: Timepoint (hr) Value: 6
  misc_feature: MA Experiment 108585 PARAMETER Experiment Name: At_5mM_NaNP_cDNA_P Parameter: Tissue Value: Aerial
  misc_feature: MA Experiment 108585 PARAMETER Experiment Name: At_5mM_NaNP_cDNA_P Parameter: Treatment Value: null
  misc_feature: MA Experiment ID: 108594 Result: Up-regulated in Transcription
  misc_feature: MA Experiment 108594 PARAMETER Experiment Name: At_Ler-rhl_Root_cDNA_P Parameter: Plant Line Value: null
  misc_feature: MA Experiment ID: 108595 Result: Down-regulated in Transcription
  misc_feature: MA Experiment 108595 PARAMETER Experiment Name: At_Ler-pi_Ovule_cDNA_P Parameter: Plant Line Value: null
  misc_feature: MA Experiment ID: 108608 Result: Down-regulated in Transcription
  misc_feature: MA Experiment 108608 PARAMETER Experiment Name: At_100uM_ABA_cDNA_P Parameter: Timepoint (hr) Value: 1
  misc_feature: MA Experiment 108608 PARAMETER Experiment Name: At_100uM_ABA_cDNA_P Parameter: Tissue Value: Aerial
  misc_feature: MA Experiment 108608 PARAMETER Experiment Name: At_100uM_ABA_cDNA_P Parameter: Treatment Value: 100uM ABA vs. No Treatment
  misc_feature: MA Experiment ID: 108667 Result: Down-regulated in Transcription
  misc_feature: MA Experiment 108667 PARAMETER Experiment Name: At_2mM_SA_cDNA_P Parameter: Plant Line Value: WS
  misc_feature: MA Experiment 108667 PARAMETER Experiment Name: At_2mM_SA_cDNA_P Parameter: Timepoint (hr) Value: 1
  misc_feature: MA Experiment 108667 PARAMETER Experiment Name: At_2mM_SA_cDNA_P Parameter: Treatment Value: 2mM SA vs. No Treatment
  misc_feature: MA Experiment ID: 20000069 Result: Down-regulated in Transcription
  misc_feature: MA Experiment 20000069 PARAMETER Experiment Name: At_100uM_ABA_Mutants_cDNA_P Parameter: Plant Line Value: CS23
  misc_feature: MA Experiment 20000069 PARAMETER Experiment Name: At_100uM_ABA_Mutants_cDNA_P Parameter: Timepoint (hr) Value: 6
  misc_feature: MA Experiment 20000069 PARAMETER Experiment Name: At_100uM_ABA_Mutants_cDNA_P Parameter: Tissue Value: Aerial
  misc_feature: MA Experiment 20000069 PARAMETER Experiment Name: At_100uM_ABA_Mutants_cDNA_P Parameter: Treatment Value: 100uM ABA vs. No Treatment
  misc_feature: MA Experiment ID: 20000070 Result: Down-regulated in Transcription
  misc_feature: MA Experiment 20000070 PARAMETER Experiment Name: At_100uM_ABA_Mutants_cDNA_P Parameter: Plant Line Value: CS24
  misc_feature: MA Experiment 20000070 PARAMETER Experiment Name: At_100uM_ABA_Mutants_cDNA_P Parameter: Timepoint (hr) Value: 6
  misc_feature: MA Experiment 20000070 PARAMETER Experiment Name: At_100uM_ABA_Mutants_cDNA_P Parameter: Tissue Value: Aerial
  misc_feature: MA Experiment 20000070 PARAMETER Experiment Name: At_100uM_ABA_Mutants_cDNA_P Parameter: Treatment Value: 100uM ABA vs. No Treatment
  misc_feature: MA Experiment ID: 20000071 Result: Down-regulated in Transcription
  misc_feature: MA Experiment 20000071 PARAMETER Experiment Name: At_100uM_ABA_Mutants_cDNA_P Parameter: Plant Line Value: CS8104
  misc_feature: MA Experiment 20000071 PARAMETER Experiment Name: At_100uM_ABA_Mutants_cDNA_P Parameter: Timepoint (hr) Value: 6
  misc_feature: MA Experiment 20000071 PARAMETER Experiment Name: At_100uM_ABA_Mutants_cDNA_P Parameter: Tissue Value: Aerial
  misc_feature: MA Experiment 20000071 PARAMETER Experiment Name: At_100uM_ABA_Mutants_cDNA_P Parameter: Treatment Value: 100uM ABA vs. No Treatment
  misc_feature: MA Experiment ID: 20000072 Result: Down-regulated in Transcription
  misc_feature: MA Experiment 20000072 PARAMETER Experiment Name: At_100uM_ABA_Mutants_cDNA_P Parameter: Plant Line Value: CS8105
  misc_feature: MA Experiment 20000072 PARAMETER Experiment Name: At_100uM_ABA_Mutants_cDNA_P Parameter: Timepoint (hr) Value: 6
  misc_feature: MA Experiment 20000072 PARAMETER Experiment Name: At_100uM_ABA_Mutants_cDNA_P Parameter: Tissue Value: Aerial
  misc_feature: MA Experiment 20000072 PARAMETER Experiment Name: At_100uM_ABA_Mutants_cDNA_P Parameter: Treatment Value: 100uM ABA vs. No Treatment
  misc_feature: MA Experiment ID: 20000086 Result: Down-regulated in Transcription
  misc_feature: MA Experiment 20000086 PARAMETER Experiment Name: At_100uM_ABA_Mutants_cDNA_P Parameter: Plant Line Value: CS22
  misc_feature: MA Experiment 20000086 PARAMETER Experiment Name: At_100uM_ABA_Mutants_cDNA_P Parameter: Timepoint (hr) Value: 6
  misc_feature: MA Experiment 20000086 PARAMETER Experiment Name: At_100uM_ABA_Mutants_cDNA_P Parameter: Tissue Value: Aerial
  misc_feature: MA Experiment 20000086 PARAMETER Experiment Name: At_100uM_ABA_Mutants_cDNA_P Parameter: Treatment Value: 100uM ABA vs. No Treatment
  misc_feature: MA Experiment ID: 20000087 Result: Down-regulated in Transcription
  misc_feature: MA Experiment 20000087 PARAMETER Experiment Name: At_100uM_ABA_Mutants_cDNA_P Parameter: Plant Line Value: WS
  misc_feature: MA Experiment 20000087 PARAMETER Experiment Name: At_100uM_ABA_Mutants_cDNA_P Parameter: Timepoint (hr) Value: 6
  misc_feature: MA Experiment 20000087 PARAMETER Experiment Name: At_100uM_ABA_Mutants_cDNA_P Parameter: Tissue Value: Aerial
  misc_feature: MA Experiment 20000087 PARAMETER Experiment Name: At_100uM_ABA_Mutants_cDNA_P Parameter: Treatment Value: 100uM ABA vs. No Treatment
  misc_feature: MA Experiment ID: 20000088 Result: Down-regulated in Transcription
  misc_feature: MA Experiment 20000088 PARAMETER Experiment Name: At_100uM_ABA_Mutants_cDNA_P Parameter: Plant Line Value: Landsberg
  misc_feature: MA Experiment 20000088 PARAMETER Experiment Name: At_100uM_ABA_Mutants_cDNA_P Parameter: Timepoint (hr) Value: 6
  misc_feature: MA Experiment 20000088 PARAMETER Experiment Name: At_100uM_ABA_Mutants_cDNA_P Parameter: Tissue Value: Aerial
  misc_feature: MA Experiment 20000088 PARAMETER Experiment Name: At_100uM_ABA_Mutants_cDNA_P Parameter: Treatment Value: 100uM ABA vs. No Treatment
  misc_feature: MA Experiment ID: 20000089 Result: Down-regulated in Transcription
  misc_feature: MA Experiment ID: 20000111 Result: Down-regulated in Transcription
  misc_feature: MA Experiment 20000111 PARAMETER Experiment Name: At_42deg_Heat_cDNA_P Parameter: Temperature (deg C) Value: 42 vs. 22
  misc_feature: MA Experiment 20000111 PARAMETER Experiment Name: At_42deg_Heat_cDNA_P Parameter: Timepoint (hr) Value: 6
  misc_feature: MA Experiment 20000111 PARAMETER Experiment Name: At_42deg_Heat_cDNA_P Parameter: Tissue Value: Aerial
  misc_feature: MA Experiment ID: 20000117 Result: Down-regulated in Transcription
  misc_feature: MA Experiment 20000117 PARAMETER Experiment Name: At_100uM_ABA_Mutants_cDNA_P Parameter: Plant Line Value: Columbia
  misc_feature: MA Experiment 20000117 PARAMETER Experiment Name: At_100uM_ABA_Mutants_cDNA_P Parameter: Timepoint (hr) Value: 6
  misc_feature: MA Experiment 20000117 PARAMETER Experiment Name: At_100uM_ABA_Mutants_cDNA_P Parameter: Tissue Value: Aerial
  misc_feature: MA Experiment 20000117 PARAMETER Experiment Name: At_100uM_ABA_Mutants_cDNA_P Parameter: Treatment Value: 100uM ABA vs. No Treatment
  misc_feature: MA Experiment ID: 20000166 Result: Down-regulated in Transcription
  misc_feature: MA Experiment 20000166 PARAMETER Experiment Name: At_100uM_ABA_P Parameter: Age (day) Value: 14
  misc_feature: MA Experiment 20000166 PARAMETER Experiment Name: At_100uM_ABA_P Parameter: Organism Value: A. thaliana
  misc_feature: MA Experiment 20000166 PARAMETER Experiment Name: At_100uM_ABA_P Parameter: Plant Line Value: WS
  misc_feature: MA Experiment 20000166 PARAMETER Experiment Name: At_100uM_ABA_P Parameter: Timepoint (hr) Value: 1
  misc_feature: MA Experiment 20000166 PARAMETER Experiment Name: At_100uM_ABA_P Parameter: Tissue Value: Aerial
  misc_feature: MA Experiment 20000166 PARAMETER Experiment Name: At_100uM_ABA_P Parameter: Treatment Value: 100uM ABA vs. No Treatment
  misc_feature: MA Experiment ID: 20000179 Result: Up-regulated in Transcription
  misc_feature: MA Experiment 20000179 PARAMETER Experiment Name: At_Germinating_Seeds_P Parameter: Age (hr) Value: 6 vs. 0
  misc_feature: MA Experiment 20000179 PARAMETER Experiment Name: At_Germinating_Seeds_P Parameter: Tissue Value: Germinating Seeds
  misc_feature: MA Experiment ID: 20000180 Result: Up-regulated in Transcription
  misc_feature: MA Experiment 20000180 PARAMETER Experiment Name: At_Germinating_Seeds_P Parameter: Age (hr) Value: 24 vs. 0
  misc_feature: MA Experiment 20000180 PARAMETER Experiment Name: At_Germinating_Seeds_P Parameter: Tissue Value: Germinating Seeds
  misc_feature: MA Experiment ID: 20000184 Result: Up-regulated in Transcription
  misc_feature: MA Experiment 20000184 PARAMETER Experiment Name: At_Shoots__P Parameter: Age (day) Value: 7
  misc_feature: MA Experiment 20000184 PARAMETER Experiment Name: At_Shoots__P Parameter: Tissue Value: Shoots vs. Whole Plant
  misc_feature: MA Experiment ID: 20000213 Result: Down-regulated in Transcription
  misc_feature: MA Experiment 20000213 PARAMETER Experiment Name: At_4deg_Cold_P Parameter: Timepoint (hr) Value: 2
  misc_feature: MA Experiment ID: 20000224 Result: Down-regulated in Transcription
  misc_feature: MA Experiment ID: 20000227 Result: Down-regulated in Transcription
  misc_feature: MA Experiment 20000227 PARAMETER Experiment Name: At_Root-Tips-vs-Tops_P Parameter: Tissue Value: Root Tips vs. Root Tops
  misc_feature: MA Experiment ID: 20000234 Result: Down-regulated in Transcription
  misc_feature: MA Experiment 20000234 PARAMETER Experiment Name: At_Siliques_P Parameter: Age (day) Value: 21
  misc_feature: MA Experiment 20000234 PARAMETER Experiment Name: At_Siliques_P Parameter: Organism Value: A. thaliana
  misc_feature: MA Experiment 20000234 PARAMETER Experiment Name: At_Siliques_P Parameter: Plant Line Value: WS
  misc_feature: MA Experiment 20000234 PARAMETER Experiment Name: At_Siliques_P Parameter: Tissue Value: Less Than 5mm Siliques vs. Whole Plant
  misc_feature: MA Experiment ID: 20000235 Result: Down-regulated in Transcription
  misc_feature: MA Experiment 20000235 PARAMETER Experiment Name: At_Siliques_P Parameter: Age (day) Value: 21
  misc_feature: MA Experiment 20000235 PARAMETER Experiment Name: At_Siliques_P Parameter: Organism Value: A. thaliana
  misc_feature: MA Experiment 20000235 PARAMETER Experiment Name: At_Siliques_P Parameter: Plant Line Value: WS
  misc_feature: MA Experiment 20000235 PARAMETER Experiment Name: At_Siliques_P Parameter: Tissue Value: 5-10mm Siliques vs. Whole Plant
  misc_feature: MA Experiment ID: 20000264 Result: Down-regulated in Transcription
  misc_feature: MA Experiment 20000264 PARAMETER Experiment Name: At_Open_Flower_P Parameter: Age (day) Value: 21
  misc_feature: MA Experiment 20000264 PARAMETER Experiment Name: At_Open_Flower_P Parameter: Plant Line Value: WS
  misc_feature: MA Experiment 20000264 PARAMETER Experiment Name: At_Open_Flower_P Parameter: Tissue Value: Open Flower vs. Whole Plant
  misc_feature: MA Experiment ID: 20000436 Result: Down-regulated in Transcription
  misc_feature: MA Experiment 20000436 PARAMETER Experiment Name: At_Drought_P Parameter: Age (day) Value: 7
  misc_feature: MA Experiment 20000436 PARAMETER Experiment Name: At_Drought_P Parameter: Organism Value: A. thaliana
  misc_feature: MA Experiment 20000436 PARAMETER Experiment Name: At_Drought_P Parameter: Plant Line Value: WS
  misc_feature: MA Experiment 20000436 PARAMETER Experiment Name: At_Drought_P Parameter: Timepoint (hr) Value: 12
  misc_feature: MA Experiment 20000436 PARAMETER Experiment Name: At_Drought_P Parameter: Tissue Value: Whole Plant
  misc_feature: MA Experiment 20000436 PARAMETER Experiment Name: At_Drought_P Parameter: Treatment Value: Drought vs. No Drought
  misc_feature: MA Experiment ID: 20000437 Result: Down-regulated in Transcription
  misc_feature: MA Experiment 20000437 PARAMETER Experiment Name: At_Drought_P Parameter: Age (day) Value: 8
  misc_feature: MA Experiment 20000437 PARAMETER Experiment Name: At_Drought_P Parameter: Organism Value: A. thaliana
  misc_feature: MA Experiment 20000437 PARAMETER Experiment Name: At_Drought_P Parameter: Plant Line Value: WS
  misc_feature: MA Experiment 20000437 PARAMETER Experiment Name: At_Drought_P Parameter: Timepoint (hr) Value: 24
  misc_feature: MA Experiment 20000437 PARAMETER Experiment Name: At_Drought_P Parameter: Tissue Value: Whole Plant
  misc_feature: MA Experiment 20000437 PARAMETER Experiment Name: At_Drought_P Parameter: Treatment Value: Drought vs. No Drought
  misc_feature: MA Experiment ID: 20000438 Result: Up-regulated in Transcription
  misc_feature: MA Experiment 20000438 PARAMETER Experiment Name: At_Shoots__P Parameter: Age (day) Value: 14
  misc_feature: MA Experiment 20000438 PARAMETER Experiment Name: At_Shoots__P Parameter: Tissue Value: Shoots vs. Whole Plant
  misc_feature: MA Experiment ID: 20000441 Result: Up-regulated in Transcription
  misc_feature: MA Experiment 20000441 PARAMETER Experiment Name: At_1uM_BR-BRZ__P Parameter: Tissue Value: Shoot Apices
  misc_feature: MA Experiment 20000441 PARAMETER Experiment Name: At_1uM_BR-BRZ__P Parameter: Treatment Value: 1uM BR vs. No Treatment
  misc_feature: MA Experiment ID: 20000443 Result: Up-regulated in Transcription
  misc_feature: MA Experiment 20000443 PARAMETER Experiment Name: At_1uM_BR-BRZ__P Parameter: Tissue Value: Shoot Apices
  misc_feature: MA Experiment 20000443 PARAMETER Experiment Name: At_1uM_BR-BRZ__P Parameter: Treatment Value: 1uM BRZ vs. No Treatment
  misc_feature: MA Experiment ID: 20000451 Result: Down-regulated in Transcription
  misc_feature: MA Experiment 20000451 PARAMETER Experiment Name: At_CS6879_Shoots-Roots_P Parameter: Age (day) Value: 14
  misc_feature: MA Experiment 20000451 PARAMETER Experiment Name: At_CS6879_Shoots-Roots_P Parameter: Organism Value: A. thaliana
  misc_feature: MA Experiment 20000451 PARAMETER Experiment Name: At_CS6879_Shoots-Roots_P Parameter: Plant Line Value: CS6879 vs. WS
  misc_feature: MA Experiment 20000451 PARAMETER Experiment Name: At_CS6879_Shoots-Roots_P Parameter: Tissue Value: Roots
  misc_feature: MA Experiment ID: 20000452 Result: Down-regulated in Transcription
  misc_feature: MA Experiment 20000452 PARAMETER Experiment Name: At_CS6879_Shoots-Roots_P Parameter: Age (day) Value: 14
  misc_feature: MA Experiment 20000452 PARAMETER Experiment Name: At_CS6879_Shoots-Roots_P Parameter: Organism Value: A. thaliana
  misc_feature: MA Experiment 20000452 PARAMETER Experiment Name: At_CS6879_Shoots-Roots_P Parameter: Plant Line Value: CS6879 vs. WS
  misc_feature: MA Experiment 20000452 PARAMETER Experiment Name: At_CS6879_Shoots-Roots_P Parameter: Tissue Value: Shoots
  misc_feature: MA Experiment ID: 20000575 Result: Down-regulated in Transcription
  misc_feature: MA Experiment 20000575 PARAMETER Experiment Name: At_100uM_ABA_Mutants__P Parameter: Organism Value: A. thaliana
  misc_feature: MA Experiment 20000575 PARAMETER Experiment Name: At_100uM_ABA_Mutants__P Parameter: Plant Line Value: CS22
  misc_feature: MA Experiment 20000575 PARAMETER Experiment Name: At_100uM_ABA_Mutants__P Parameter: Timepoint (hr) Value: 6
  misc_feature: MA Experiment 20000575 PARAMETER Experiment Name: At_100uM_ABA_Mutants__P Parameter: Tissue Value: Whole Plant
  misc_feature: MA Experiment 20000575 PARAMETER Experiment Name: At_100uM_ABA_Mutants__P Parameter: Treatment Value: 1uM ABA vs. No Treatment
  misc_feature: MA Experiment ID: 20000794 Result: Down-regulated in Transcription
  misc_feature: MA Experiment 20000794 PARAMETER Experiment Name: At_Petals_P Parameter: Age (day) Value: 23-25 days
  misc_feature: MA Experiment 20000794 PARAMETER Experiment Name: At_Petals_P Parameter: Plant Line Value: WS
  misc_feature: MA Experiment 20000794 PARAMETER Experiment Name: At_Petals_P Parameter: Tissue Value: Petals vs. Whole plant
  misc_feature: MA Experiment ID: 20001247 Result: Up-regulated in Transcription
  misc_feature: MA Experiment 20001247 PARAMETER Experiment Name: At_Far-red-induction_P Parameter: Age (day) Value: 7
  misc_feature: MA Experiment 20001247 PARAMETER Experiment Name: At_Far-red-induction_P Parameter: Light Value: Far-red vs. White
  misc_feature: MA Experiment 20001247 PARAMETER Experiment Name: At_Far-red-induction_P Parameter: Organism Value: A. thaliana
  misc_feature: MA Experiment 20001247 PARAMETER Experiment Name: At_Far-red-induction_P Parameter: Plant Line Value: Columbia
  misc_feature: MA Experiment 20001247 PARAMETER Experiment Name: At_Far-red-induction_P Parameter: Timepoint (hr) Value: 1
  misc_feature: MA Experiment 20001247 PARAMETER Experiment Name: At_Far-red-induction_P Parameter: Tissue Value: Whole Plant
  misc_feature: MA Experiment ID: 20001248 Result: Up-regulated in Transcription
  misc_feature: MA Experiment 20001248 PARAMETER Experiment Name: At_Far-red-induction_P Parameter: Age (day) Value: 7
  misc_feature: MA Experiment 20001248 PARAMETER Experiment Name: At_Far-red-induction_P Parameter: Light Value: Far-red vs. White
  misc_feature: MA Experiment 20001248 PARAMETER Experiment Name: At_Far-red-induction_P Parameter: Organism Value: A. thaliana
  misc_feature: MA Experiment 20001248 PARAMETER Experiment Name: At_Far-red-induction_P Parameter: Plant Line Value: Columbia
  misc_feature: MA Experiment 20001248 PARAMETER Experiment Name: At_Far-red-induction_P Parameter: Timepoint (hr) Value: 4
  misc_feature: MA Experiment 20001248 PARAMETER Experiment Name: At_Far-red-induction_P Parameter: Tissue Value: Whole Plant
  misc_feature: MA Experiment ID: 20001450 Result: Up-regulated in Transcription
  misc_feature: MA Experiment 20001450 PARAMETER Experiment Name: At_Far-red-induction_P Parameter: Age (day) Value: 7
  misc_feature: MA Experiment 20001450 PARAMETER Experiment Name: At_Far-red-induction_P Parameter: Light Value: Far-red vs. White
  misc_feature: MA Experiment 20001450 PARAMETER Experiment Name: At_Far-red-induction_P Parameter: Organism Value: A. thaliana
  misc_feature: MA Experiment 20001450 PARAMETER Experiment Name: At_Far-red-induction_P Parameter: Plant Line Value: Columbia
  misc_feature: MA Experiment 20001450 PARAMETER Experiment Name: At_Far-red-induction_P Parameter: Timepoint (hr) Value: 8
  misc_feature: MA Experiment 20001450 PARAMETER Experiment Name: At_Far-red-induction_P Parameter: Tissue Value: Whole Plant
  misc_feature: MA Experiment ID: 20001451 Result: Up-regulated in Transcription
  misc_feature: MA Experiment 20001451 PARAMETER Experiment Name: At_Far-red-induction_P Parameter: Age (day) Value: 7
  misc_feature: MA Experiment 20001451 PARAMETER Experiment Name: At_Far-red-induction_P Parameter: Light Value: Far-red vs. White
  misc_feature: MA Experiment 20001451 PARAMETER Experiment Name: At_Far-red-induction_P Parameter: Organism Value: A. thaliana
  misc_feature: MA Experiment 20001451 PARAMETER Experiment Name: At_Far-red-induction_P Parameter: Plant Line Value: Columbia
  misc_feature: MA Experiment 20001451 PARAMETER Experiment Name: At_Far-red-induction_P Parameter: Timepoint (hr) Value: 24
  misc_feature: MA Experiment 20001451 PARAMETER Experiment Name: At_Far-red-induction_P Parameter: Tissue Value: Whole Plant
  misc_feature: MA Experiment ID: 20001555 Result: Down-regulated in Transcription
  misc_feature: MA Experiment 20001555 PARAMETER Experiment Name: At_Drought_Soil_Dry_P Parameter: Age (day) Value: 24
  misc_feature: MA Experiment 20001555 PARAMETER Experiment Name: At_Drought_Soil_Dry_P Parameter: Organism Value: A. thaliana
  misc_feature: MA Experiment 20001555 PARAMETER Experiment Name: At_Drought_Soil_Dry_P Parameter: Plant Line Value: WS
  misc_feature: MA Experiment 20001555 PARAMETER Experiment Name: At_Drought_Soil_Dry_P Parameter: Post Timepoint (hr) Value: None
  misc_feature: MA Experiment 20001555 PARAMETER Experiment Name: At_Drought_Soil_Dry_P Parameter: Post-Treatment Value: None
  misc_feature: MA Experiment 20001555 PARAMETER Experiment Name: At_Drought_Soil_Dry_P Parameter: Timepoint (day) Value: 10
  misc_feature: MA Experiment 20001555 PARAMETER Experiment Name: At_Drought_Soil_Dry_P Parameter: Treatment Value: Drought vs. No Drought
  misc_feature: MA Experiment ID: 20001560 Result: Down-regulated in Transcription
  misc_feature: MA Experiment 20001560 PARAMETER Experiment Name: At_Drought_Soil_Dry_P Parameter: Age (day) Value: 28
  misc_feature: MA Experiment 20001560 PARAMETER Experiment Name: At_Drought_Soil_Dry_P Parameter: Organism Value: A. thaliana
  misc_feature: MA Experiment 20001560 PARAMETER Experiment Name: At_Drought_Soil_Dry_P Parameter: Plant Line Value: WS
  misc_feature: MA Experiment 20001560 PARAMETER Experiment Name: At_Drought_Soil_Dry_P Parameter: Post Timepoint (hr) Value: None
  misc_feature: MA Experiment 20001560 PARAMETER Experiment Name: At_Drought_Soil_Dry_P Parameter: Post-Treatment Value: None
  misc_feature: MA Experiment 20001560 PARAMETER Experiment Name: At_Drought_Soil_Dry_P Parameter: Timepoint (day) Value: 14
  misc_feature: MA Experiment 20001560 PARAMETER Experiment Name: At_Drought_Soil_Dry_P Parameter: Treatment Value: Drought vs. No Drought
  misc_feature: MA Experiment ID: 20001904 Result: Down-regulated in Transcription
  misc_feature: MA Experiment 20001904 PARAMETER Experiment Name: At_Drought_Reproduction_P Parameter: Age (day) Value: 37
  misc_feature: MA Experiment 20001904 PARAMETER Experiment Name: At_Drought_Reproduction_P Parameter: Organism Value: A. thaliana
  misc_feature: MA Experiment 20001904 PARAMETER Experiment Name: At_Drought_Reproduction_P Parameter: Plant Line Value: WS
  misc_feature: MA Experiment 20001904 PARAMETER Experiment Name: At_Drought_Reproduction_P Parameter: Timepoint (day) Value: 7
  misc_feature: MA Experiment 20001904 PARAMETER Experiment Name: At_Drought_Reproduction_P Parameter: Tissue Value: Rosettes
  misc_feature: MA Experiment 20001904 PARAMETER Experiment Name: At_Drought_Reproduction_P Parameter: Treatment Value: Drought vs. No Drought
  misc_feature: MA Experiment ID: 20001905 Result: Down-regulated in Transcription
  misc_feature: MA Experiment 20001905 PARAMETER Experiment Name: At_Drought_Reproduction_P Parameter: Age (day) Value: 40
  misc_feature: MA Experiment 20001905 PARAMETER Experiment Name: At_Drought_Reproduction_P Parameter: Organism Value: A. thaliana
  misc_feature: MA Experiment 20001905 PARAMETER Experiment Name: At_Drought_Reproduction_P Parameter: Plant Line Value: WS
  misc_feature: MA Experiment 20001905 PARAMETER Experiment Name: At_Drought_Reproduction_P Parameter: Timepoint (day) Value: 10
  misc_feature: MA Experiment 20001905 PARAMETER Experiment Name: At_Drought_Reproduction_P Parameter: Tissue Value: Rosettes
  misc_feature: MA Experiment 20001905 PARAMETER Experiment Name: At_Drought_Reproduction_P Parameter: Treatment Value: Drought vs. No Drought
actattggttcctctgctctggctcatggatgaaactaccagagagatgttctcacctcataatcttcctcttgaaatgatggaagagattctcttaagactacccgtaaagtcattgacgcgattcaaatgcgtttgcagctcctggagatctttgatctcagagactctgtttgctctgaaacacgctttgatcttggagacatcgaaggcaactacttccacgaagagtccttacggagtcataacaacgtctcggtaccatctcaagtcatgctgcatccattctctctacaacgcgtcaacggtctacgtctcagaacatgatggtgagcttttaggaagagattactatcaagtcgtggggacgtgccatggattggtttgtttccacgtagattacgacaaaagtctctacctgtggaatccaaccatcaagcttcaacaaagattgtctagttcggatcttgaaacgagcgatgatgagtgtgttgtaacgtatgggtttggttatgatgaatctgaagatgactataaagtggttgcgttgttgcaacaaagacaccaagtgaagatagagacaaagatctactcaacgagacaaaagctatggagaagcaacacaagtttcccatctggagttgttgttgctgacaaatcaagatccggaatctacatcaacgggacactaaactgggcagccacttcctcatcatcgtcatggacgatcatatcgtatgatatgtcacgcgatgagttcaaggagcttccagggccagtttgttgtggcagaggatgttttacaatgacgcttggagatttaagaggatgtctttcgatggtgtgttattgcaaaggagctaatgcagatgtttgggtgatgaaggagtttggagaagtatattcttggtctaaactcttgagcattcctggtttgaccgactttgttcgaccgctttggatctcagacggtttagtggttttattggagtttagatccggtttagctctctataactgttccaatggaaggtttcattacccagtttcaaacagcataagtggttgtcgtgacgccaaagtttatctcaagacaatggtttctccaaatgatctttgagatataaaaaattgttcctaatgtttctatccaagattttatttaaaaaattagctcgattcgatttaactaagattggtatcaattgatagaaaagaaacagtacttatatggatatttaaattcaagaattaat

SEQ ID NO: 99664 - protein, 372 aa, Arabidopsis thaliana; identical to SEQ ID NO: 43442
  peptide (1)..(372): Ceres Seq. ID no. 13603388
  misc_feature (9)..(372): Homolog of NCBI NO: 15229536 NR Description: F-box protein family [Arabidopsis thaliana] gb|AAF30317.1~gene_id:F14O13.6~similar to unknown protein thaliana] >gi|26449693|dbj|BAC41970.1| unknown protein
  misc_feature (115)..(370): Homolog of NCBI NO: 30679777 NR Description: F-box protein family [Arabidopsis thaliana]
  misc_feature (3)..(97): Homolog of NCBI NO: 30679777 NR Description: F-box protein family [Arabidopsis thaliana]
  misc_feature (115)..(370): Homolog of NCBI NO: 6862928 NR Description: hypothetical protein [Arabidopsis thaliana]
  misc_feature (15)..(97): Homolog of NCBI NO: 6862928 NR Description: hypothetical protein [Arabidopsis thaliana]
  misc_feature (25)..(341): Homolog of NCBI NO: 13161526 NR Description: S locus F-box (SLF)-S2 protein [Antirrhinum
  misc_feature (25)..(341): Homolog of NCBI NO: 13161528 NR Description: S locus F-box (SLF)-S2-like protein [Antirrhinum
  misc_feature (25)..(296): Homolog of NCBI NO: 29420801 NR Description: F-box [Prunus mume]
  misc_feature (25)..(340): Homolog of NCBI NO: 28866895 NR Description: S haplotype-specific F-box protein b [Prunus
  misc_feature (21)..(296): Homolog of NCBI NO: 15223197 NR Description: F-box protein family [Arabidopsis thaliana]

SEQ ID NO: 99665 - protein, 364 aa, Arabidopsis thaliana; identical to SEQ ID NO: 43443
  peptide (1)..(364): Ceres Seq. ID no. 13603389
  misc_feature (1)..(364): Homolog of NCBI NO: 15229536 NR Description: F-box protein family [Arabidopsis thaliana] gb|AAF30317.1~gene_id:F14O13.6~similar to unknown protein thaliana] >gi|26449693|dbj|BAC41970.1| unknown protein
  misc_feature (107)..(362): Homolog of NCBI NO: 30679777 NR Description: F-box protein family [Arabidopsis thaliana]
  misc_feature (1)..(89): Homolog of NCBI NO: 30679777 NR Description: F-box protein family [Arabidopsis thaliana]
  misc_feature (107)..(362): Homolog of NCBI NO: 6862928 NR Description: hypothetical protein [Arabidopsis thaliana]
  misc_feature (7)..(89): Homolog of NCBI NO: 6862928 NR Description: hypothetical protein [Arabidopsis thaliana]
  misc_feature (17)..(333): Homolog of NCBI NO: 13161526 NR Description: S locus F-box (SLF)-S2 protein [Antirrhinum
  misc_feature (17)..(333): Homolog of NCBI NO: 13161528 NR Description: S locus F-box (SLF)-S2-like protein [Antirrhinum
  misc_feature (17)..(288): Homolog of NCBI NO: 29420801 NR Description: F-box [Prunus mume]
  misc_feature (17)..(332): Homolog of NCBI NO: 28866895 NR Description: S haplotype-specific F-box protein b [Prunus
  misc_feature (13)..(288): Homolog of NCBI NO: 15223197 NR Description: F-box protein family [Arabidopsis thaliana]

SEQ ID NO: 99666 - protein, 357 aa, Arabidopsis thaliana; identical to SEQ ID NO: 43444
  peptide (1)..(357): Ceres Seq. ID no. 13603390
  misc_feature (1)..(357): Homolog of NCBI NO: 15229536 NR Description: F-box protein family [Arabidopsis thaliana] gb|AAF30317.1~gene_id:F14O13.6~similar to unknown protein thaliana] >gi|26449693|dbj|BAC41970.1| unknown protein
  misc_feature (100)..(355): Homolog of NCBI NO: 30679777 NR Description: F-box protein family [Arabidopsis thaliana]
  misc_feature (1)..(82): Homolog of NCBI NO: 30679777 NR Description: F-box protein family [Arabidopsis thaliana]
  misc_feature (100)..(355): Homolog of NCBI NO: 6862928 NR Description: hypothetical protein [Arabidopsis thaliana]
  misc_feature (1)..(82): Homolog of NCBI NO: 6862928 NR Description: hypothetical protein [Arabidopsis thaliana]
  misc_feature (10)..(326): Homolog of NCBI NO: 13161526 NR Description: S locus F-box (SLF)-S2 protein [Antirrhinum
  misc_feature (10)..(326): Homolog of NCBI NO: 13161528 NR Description: S locus F-box (SLF)-S2-like protein [Antirrhinum
  misc_feature (10)..(281): Homolog of NCBI NO: 29420801 NR Description: F-box [Prunus mume]
  misc_feature (10)..(325): Homolog of NCBI NO: 28866895 NR Description: S haplotype-specific F-box protein b [Prunus
  misc_feature (6)..(281): Homolog of NCBI NO: 15223197 NR Description: F-box protein family [Arabidopsis thaliana]

SEQ ID NO: 99667 - DNA, 868 bp, Arabidopsis thaliana
  misc_feature (1)..(868): Ceres Seq. ID no. 13603391
  misc_feature: MA Experiment ID: 108501 Result: Down-regulated in Transcription
  misc_feature: MA Experiment 108501 PARAMETER Experiment Name: At_ap2_floral_buds_cDNA_P Parameter: Plant Line Value: ap2 (Ler.)
  misc_feature: MA Experiment 108501 PARAMETER Experiment Name: At_ap2_floral_buds_cDNA_P Parameter: Tissue Value: Closed Flower
  misc_feature: MA Experiment ID: 20000184 Result: Down-regulated in Transcription
  misc_feature: MA Experiment 20000184 PARAMETER Experiment Name: At_Shoots__P Parameter: Age (day) Value: 7
  misc_feature: MA Experiment 20000184 PARAMETER Experiment Name: At_Shoots__P Parameter: Tissue Value: Shoots vs. Whole Plant
  misc_feature: MA Experiment ID: 20000794 Result: Up-regulated in Transcription
  misc_feature: MA Experiment 20000794 PARAMETER Experiment Name: At_Petals_P Parameter: Age (day) Value: 23-25 days
  misc_feature: MA Experiment 20000794 PARAMETER Experiment Name: At_Petals_P Parameter: Plant Line Value: WS
  misc_feature: MA Experiment 20000794 PARAMETER Experiment Name: At_Petals_P Parameter: Tissue Value: Petals vs. Whole plant
aacatatccattttgggaaaccctaaattcccaaatgtcattcgccgaggaatttgaagctaatcttgtttcgctggcccatgttttgcagaagaaatatgctctcctgcgcgatttggataaaagtttgcaagaaaaccaacgacaaaatgaacaacgctgtgaaaaagaaatagaggatataagaaggggcagagctggaaatatcacacctaatacctctcttacaaagttctcagaggaagcacttgatgaacagaaacacagtgtccggattgctgacgagaaagtcacactggctatgcaggcatatgatctggtggatatgcatgttcagcaacttgaccagtatatgaaaaaatccgacgaagtgatccgcaaagagaaagaagctgccgctgcgacattagaactggagaacaacgggaaagccgggaatgctggtgaaggtggaagaggagggcgaaaaaagacaaggctagcaacagcagcgtcaacagcagcagcatcaactgggatgacttcaagtaatatggatctggatctgcctgtggatccaaacgaaccaacttactgcatctgcaaccaagttagctttggcgagatggttgcgtgtgacaacaatgcgtgcaagattgagtggttccatttcggttgcgtcggtctgaaagaacaacccaaggggaaatggtactgcccggagtgtgctacagtaaagaagagcaggaaaggtcgatgatttgaatgttcatgtctgctaataatccaaacagcttcatcatatctactgtaatccaaacagtttagtatatcaactcatgtaagatgttaccatgttgactataaattgtagaagtcttgtttcgtt

SEQ ID NO: 99668 - protein, 245 aa, Arabidopsis thaliana
  peptide (1)..(245): Ceres Seq. ID no. 13603392
  misc_feature (191)..(238): Pfam Name: PHD-finger Pfam Description: PHD-finger
  misc_feature (12)..(245): Homolog of NCBI NO: 18404002 NR Description: PHD-finger protein -related [Arabidopsis >gi|9294670|dbj|BAB03019.1| gene_id:F14O13.20~unknown protein
  misc_feature (86)..(245): Homolog of NCBI NO: 28393138 NR Description: putative PHD-finger protein [Arabidopsis thaliana]
  misc_feature (12)..(132): Homolog of NCBI NO: 29367421 NR Description: putative PHD-finger protein [Oryza sativa
  misc_feature (131)..(245): Homolog of NCBI NO: 29367421 NR Description: putative PHD-finger protein [Oryza sativa
  misc_feature (12)..(137): Homolog of NCBI NO: 28278108 NR Description: Similar to inhibitor of growth family, member 3
  misc_feature (174)..(245): Homolog of NCBI NO: 28278108 NR Description: Similar to inhibitor of growth family, member 3
  misc_feature (12)..(137): Homolog of NCBI NO: 37682153 NR Description: inhibitor of growth family, member 3 [Danio rerio]
  misc_feature (174)..(245): Homolog of NCBI NO: 37682153 NR Description: inhibitor of growth family, member 3 [Danio rerio]
  misc_feature (126)..(245): Homolog of NCBI NO: 31542998 NR Description: inhibitor of growth family, member 3; p47 protein [Mus musculus] >gi|17390799|gb|AAH18342.1| inhibitor of family, member 3 [Mus musculus] >gi|26348763|dbj|BAC38021.1|
  misc_feature (29)..(137): Homolog of NCBI NO: 31542998 NR Description: inhibitor of growth family, member 3; p47 protein [Mus musculus] >gi|17390799|gb|AAH18342.1| inhibitor of family, member 3 [Mus musculus] >gi|26348763|dbj|BAC38021.1|
TYPFWETLNSQMSFAEEFEANLVSLAHVLQKKYALLRDLDKSLQENQRQNEQRCEKEIEDIRRGRAGNITPNTSLTKFSEEALDEQKHSVRIADEKVTLAMQAYDLVDMHVQQLDQYMKKSDEVIRKEKEAAAATLELENNGKAGNAGEGGRGGRKKTRLATAASTAAASTGMTSSNMDLDLPVDPNEPTYCICNQVSFGEMVACDNNACKIEWFHFGCVGLKEQPKGKWYCPECATVKKSRKGR

SEQ ID NO: 99669 - protein, 234 aa, Arabidopsis thaliana
  peptide (1)..(234): Ceres Seq. ID no. 13603393
  misc_feature (180)..(227): Pfam Name: PHD-finger Pfam Description: PHD-finger
  misc_feature (1)..(234): Homolog of NCBI NO: 18404002 NR Description: PHD-finger protein -related [Arabidopsis >gi|9294670|dbj|BAB03019.1| gene_id:F14O13.20~unknown protein
  misc_feature (75)..(234): Homolog of NCBI NO: 28393138 NR Description: putative PHD-finger protein [Arabidopsis thaliana]
  misc_feature (1)..(121): Homolog of NCBI NO: 29367421 NR Description: putative PHD-finger protein [Oryza sativa
  misc_feature (120)..(234): Homolog of NCBI NO: 29367421 NR Description: putative PHD-finger protein [Oryza sativa
  misc_feature (1)..(126): Homolog of NCBI NO: 28278108 NR Description: Similar to inhibitor of growth family, member 3
  misc_feature (163)..(234): Homolog of NCBI NO: 28278108 NR Description: Similar to inhibitor of growth family, member 3
  misc_feature (1)..(126): Homolog of NCBI NO: 37682153 NR Description: inhibitor of growth family, member 3 [Danio rerio]
  misc_feature (163)..(234): Homolog of NCBI NO: 37682153 NR Description: inhibitor of growth family, member 3 [Danio rerio]
  misc_feature (115)..(234): Homolog of NCBI NO: 31542998 NR Description: inhibitor of growth family, member 3; p47 protein [Mus musculus] >gi|17390799|gb|AAH18342.1| inhibitor of family, member 3 [Mus musculus] >gi|26348763|dbj|BAC38021.1|
  misc_feature (18)..(126): Homolog of NCBI NO: 31542998 NR Description: inhibitor of growth family, member 3; p47 protein [Mus musculus] >gi|17390799|gb|AAH18342.1| inhibitor of family, member 3 [Mus musculus] >gi|26348763|dbj|BAC38021.1|
MSFAEEFEANLVSLAHVLQKKYALLRDLDKSLQENQRQNEQRCEKEIEDIRRGRAGNITPNTSLTKFSEEALDEQKHSVRIADEKVTLAMQAYDLVDMHVQQLDQYMKKSDEVIRKEKEAAAATLELENNGKAGNAGEGGRGGRKKTRLATAASTAAASTGMTSSNMDLDLPVDPNEPTYCICNQVSFGEMVACDNNACKIEWFHFGCVGLKEQPKGKWYCPECATVKKSRKGR

SEQ ID NO: 99670 - protein, 145 aa, Arabidopsis thaliana
  peptide (1)..(145): Ceres Seq. ID no. 13603394
  misc_feature (91)..(138): Pfam Name: PHD-finger Pfam Description: PHD-finger
  misc_feature (1)..(145): Homolog of NCBI NO: 18404002 NR Description: PHD-finger protein -related [Arabidopsis >gi|9294670|dbj|BAB03019.1| gene_id:F14O13.20~unknown protein
  misc_feature (1)..(145): Homolog of NCBI NO: 28393138 NR Description: putative PHD-finger protein [Arabidopsis thaliana]
  misc_feature (1)..(32): Homolog of NCBI NO: 29367421 NR Description: putative PHD-finger protein [Oryza sativa
  misc_feature (31)..(145): Homolog of NCBI NO: 29367421 NR Description: putative PHD-finger protein [Oryza sativa
  misc_feature (1)..(37): Homolog of NCBI NO: 28278108 NR Description: Similar to inhibitor of growth family, member 3
  misc_feature (74)..(145): Homolog of NCBI NO: 28278108 NR Description: Similar to inhibitor of growth family, member 3
  misc_feature (1)..(37): Homolog of NCBI NO: 37682153 NR Description: inhibitor of growth family, member 3 [Danio rerio]
  misc_feature (74)..(145): Homolog of NCBI NO: 37682153 NR Description: inhibitor of growth family, member 3 [Danio rerio]
  misc_feature (26)..(145): Homolog of NCBI NO: 31542998 NR Description: inhibitor of growth family, member 3; p47 protein [Mus musculus] >gi|17390799|gb|AAH18342.1| inhibitor of family, member 3 [Mus musculus] >gi|26348763|dbj|BAC38021.1|
  misc_feature (1)..(37): Homolog of NCBI NO: 31542998 NR Description: inhibitor of growth family, member 3; p47 protein [Mus musculus] >gi|17390799|gb|AAH18342.1| inhibitor of family, member 3 [Mus musculus] >gi|26348763|dbj|BAC38021.1|
MQAYDLVDMHVQQLDQYMKKSDEVIRKEKEAAAATLELENNGKAGNAGEGGRGGRKKTRLATAASTAAASTGMTSSNMDLDLPVDPNEPTYCICNQVSFGEMVACDNNACKIEWFHFGCVGLKEQPKGKWYCPECATVKKSRKGR

SEQ ID NO: 99671 - DNA, 886 bp, Arabidopsis thaliana
  misc_feature (1)..(886): Ceres Seq. ID no. 13603402
  misc_feature: MA Experiment ID: 20000088 Result: Down-regulated in Transcription
  misc_feature: MA Experiment 20000088 PARAMETER Experiment Name: At_100uM_ABA_Mutants_cDNA_P Parameter: Plant Line Value: Landsberg
  misc_feature: MA Experiment 20000088 PARAMETER Experiment Name: At_100uM_ABA_Mutants_cDNA_P Parameter: Timepoint (hr) Value: 6
  misc_feature: MA Experiment 20000088 PARAMETER Experiment Name: At_100uM_ABA_Mutants_cDNA_P Parameter: Tissue Value: Aerial
  misc_feature: MA Experiment 20000088 PARAMETER Experiment Name: At_100uM_ABA_Mutants_cDNA_P Parameter: Treatment Value: 100uM ABA vs. No Treatment
  misc_feature: MA Experiment ID: 20000438 Result: Up-regulated in Transcription
  misc_feature: MA Experiment 20000438 PARAMETER Experiment Name: At_Shoots__P Parameter: Age (day) Value: 14
  misc_feature: MA Experiment 20000438 PARAMETER Experiment Name: At_Shoots__P Parameter: Tissue Value: Shoots vs. Whole Plant
  misc_feature: MA Experiment ID: 20000495 Result: Down-regulated in Transcription
  misc_feature: MA Experiment 20000495 PARAMETER Experiment Name: At_Guard_Cells_P Parameter: Harvest Date Value: 8/2/2002
  misc_feature: MA Experiment 20000495 PARAMETER Experiment Name: At_Guard_Cells_P Parameter: Organism Value: A. thaliana
  misc_feature: MA Experiment 20000495 PARAMETER Experiment Name: At_Guard_Cells_P Parameter: Tissue Value: Guard Cells vs. Leaves
  misc_feature: MA Experiment ID: 20001451 Result: Down-regulated in Transcription
  misc_feature: MA Experiment 20001451 PARAMETER Experiment Name: At_Far-red-induction_P Parameter: Age (day) Value: 7
  misc_feature: MA Experiment 20001451 PARAMETER Experiment Name: At_Far-red-induction_P Parameter: Light Value: Far-red vs. White
  misc_feature: MA Experiment 20001451 PARAMETER Experiment Name: At_Far-red-induction_P Parameter: Organism Value: A. thaliana
  misc_feature: MA Experiment 20001451 PARAMETER Experiment Name: At_Far-red-induction_P Parameter: Plant Line Value: Columbia
  misc_feature: MA Experiment 20001451 PARAMETER Experiment Name: At_Far-red-induction_P Parameter: Timepoint (hr) Value: 24
  misc_feature: MA Experiment 20001451 PARAMETER Experiment Name: At_Far-red-induction_P Parameter: Tissue Value: Whole Plant
  misc_feature: MA Experiment ID: 20001557 Result: Down-regulated in Transcription
  misc_feature: MA Experiment 20001557 PARAMETER Experiment Name: At_Drought_Soil_Dry_P Parameter: Age (day) Value: 27
  misc_feature: MA Experiment 20001557 PARAMETER Experiment Name: At_Drought_Soil_Dry_P Parameter: Organism Value: A. thaliana
  misc_feature: MA Experiment 20001557 PARAMETER Experiment Name: At_Drought_Soil_Dry_P Parameter: Plant Line Value: WS
  misc_feature: MA Experiment 20001557 PARAMETER Experiment Name: At_Drought_Soil_Dry_P Parameter: Post Timepoint (hr) Value: 3
  misc_feature: MA Experiment 20001557 PARAMETER Experiment Name: At_Drought_Soil_Dry_P Parameter: Post-Treatment Value: Re-Water vs. No Drought
  misc_feature: MA Experiment 20001557 PARAMETER Experiment Name: At_Drought_Soil_Dry_P Parameter: Timepoint (day) Value: 13
  misc_feature: MA Experiment 20001557 PARAMETER Experiment Name: At_Drought_Soil_Dry_P Parameter: Treatment Value: Drought vs. No Drought
acaaacaaaacaaaaccagagatttcgttatccactgaagttcgtttgcttctgtcaaatttgccaaatcgtaaccaaaaaaagatggcagcttcttctccatctctccttctaccactaggttcagcatctagaaatggtctaaccaccaagaatccaaattcatcaagatatatagctgcaagagtcatagcttcagaaacaagagagcaaagctgtaaaatcagtaatctctctagccgtagagaagcaatgcttttggtactcggcgtctcaggaggattatcaatgagctcacttgcggcgtatgcagctggtttacctccagaagataaaccaagactctgtgaagcagaatgcgagaaagagcttgaaaatgttccaatggtaactacagagtcagggcttcagtataaggatattaaagttggtagaggcccgagtccaccggttggttttcaggttgctgctaattatgtggctatggttccatcagggcaaatattcgacagttctctggagaaaggtctaccgtatctatttcgcgttggctctggccaggtgatcaaaggacttgatgaaggaatcttgagtatgaaagctggtggcaaacgtagactctacatcccagggcctttggcgtttccaaagggtctagtttcagctccagggaggccgagagttgcgccaaacagcccggtgatatttgacgtgagcttagagttcataccaggtctcgattcagaggaagagtgaaactctgttttttcaagtgcaaattgtaatcttccatacacaattacaagattctatgtatgatatttatctcattgtactcattcattgaagaacatcacattgattaaaaacgtcagtatttttcaat

SEQ ID NO: 99672 - protein, 251 aa, Arabidopsis thaliana; identical to SEQ ID NO: 22972
  peptide (1)..(251): Ceres Seq. ID no. 13603403
  misc_feature (144)..(241): Pfam Name: FKBP-type peptidyl-prolyl cis-trans isomerase Pfam Description: FKBP-type peptidyl-prolyl cis-trans isomerase
  misc_feature (29)..(251): Homolog of NCBI NO: 15224305 NR Description: immunophilin / FKBP-type peptidyl-prolyl
  misc_feature (85)..(251): Homolog of NCBI NO: 25408885 NR Description: hypothetical protein At2g43560 [imported] -
  misc_feature (73)..(249): Homolog of NCBI NO: 38636681 NR Description: putative immunophilin / FKBP-type peptidyl-prolyl
  misc_feature (87)..(251): Homolog of NCBI NO: 18252321 NR Description: putative FKBP type peptidyl-prolyl cis-trans [Pyrus communis] >gi|18252333|gb|AAL66198.1|AF386516_1 putative
  misc_feature (104)..(240): Homolog of NCBI NO: 22298646 NR Description: FKBP-type peptidyl-prolyl cis-trans isomerase
  misc_feature (85)..(240): Homolog of NCBI NO: 16329650 NR Description: FKBP-type peptidyl-prolyl cis-trans isomerase
  misc_feature (130)..(240): Homolog of NCBI NO: 23053670 NR Description: hypothetical protein [Geobacter metallireducens]
  misc_feature (85)..(240): Homolog of NCBI NO: 23129112 NR Description: hypothetical protein [Nostoc punctiforme]
  misc_feature (130)..(240): Homolog of NCBI NO: 39997372 NR Description: FKBP-type peptidyl-prolyl cis-trans isomerase
  misc_feature (113)..(240): Homolog of NCBI NO: 23042526 NR Description: hypothetical protein [Trichodesmium erythraeum

SEQ ID NO: 99673 - protein, 223 aa, Arabidopsis thaliana; identical to SEQ ID NO: 22973
  peptide (1)..(223): Ceres Seq. ID no. 13603404
  misc_feature (116)..(213): Pfam Name: FKBP-type peptidyl-prolyl cis-trans isomerase Pfam Description: FKBP-type peptidyl-prolyl cis-trans isomerase
  misc_feature (1)..(223): Homolog of NCBI NO: 15224305 NR Description: immunophilin / FKBP-type peptidyl-prolyl
  misc_feature (57)..(223): Homolog of NCBI NO: 25408885 NR Description: hypothetical protein At2g43560 [imported] -
  misc_feature (45)..(221): Homolog of NCBI NO: 38636681 NR Description: putative immunophilin / FKBP-type peptidyl-prolyl
  misc_feature (59)..(223): Homolog of NCBI NO: 18252321 NR Description: putative FKBP type peptidyl-prolyl cis-trans [Pyrus communis] >gi|18252333|gb|AAL66198.1|AF386516_1 putative
  misc_feature (76)..(212): Homolog of NCBI NO: 22298646 NR Description: FKBP-type peptidyl-prolyl cis-trans isomerase
  misc_feature (57)..(212): Homolog of NCBI NO: 16329650 NR Description: FKBP-type peptidyl-prolyl cis-trans isomerase
  misc_feature (102)..(212): Homolog of NCBI NO: 23053670 NR Description: hypothetical protein [Geobacter metallireducens]
  misc_feature (57)..(212): Homolog of NCBI NO: 23129112 NR Description: hypothetical protein [Nostoc punctiforme]
  misc_feature (102)..(212): Homolog of NCBI NO: 39997372 NR Description: FKBP-type peptidyl-prolyl cis-trans isomerase
  misc_feature (85)..(212): Homolog of NCBI NO: 23042526 NR Description: hypothetical protein [Trichodesmium erythraeum

SEQ ID NO: 99674 - protein, 167 aa, Arabidopsis thaliana; identical to SEQ ID NO: 22974
  peptide (1)..(167): Ceres Seq. ID no. 13603405
  misc_feature (60)..(157): Pfam Name: FKBP-type peptidyl-prolyl cis-trans isomerase Pfam Description: FKBP-type peptidyl-prolyl cis-trans isomerase
  misc_feature (1)..(167): Homolog of NCBI NO: 15224305 NR Description: immunophilin / FKBP-type peptidyl-prolyl
  misc_feature (1)..(167): Homolog of NCBI NO: 25408885 NR Description: hypothetical protein At2g43560 [imported] -
  misc_feature (1)..(165): Homolog of NCBI NO: 38636681 NR Description: putative immunophilin / FKBP-type peptidyl-prolyl
  misc_feature (3)..(167): Homolog of NCBI NO: 18252321 NR Description: putative FKBP type peptidyl-prolyl cis-trans [Pyrus communis] >gi|18252333|gb|AAL66198.1|AF386516_1 putative
  misc_feature (20)..(156): Homolog of NCBI NO: 22298646 NR Description: FKBP-type peptidyl-prolyl cis-trans isomerase
  misc_feature (1)..(156): Homolog of NCBI NO: 16329650 NR Description: FKBP-type peptidyl-prolyl cis-trans isomerase
  misc_feature (46)..(156): Homolog of NCBI NO: 23053670 NR Description: hypothetical protein [Geobacter metallireducens]
  misc_feature (1)..(156): Homolog of NCBI NO: 23129112 NR Description: hypothetical protein [Nostoc punctiforme]
  misc_feature (46)..(156): Homolog of NCBI NO: 39997372 NR Description: FKBP-type peptidyl-prolyl cis-trans isomerase
  misc_feature (29)..(156): Homolog of NCBI NO: 23042526 NR Description: hypothetical protein [Trichodesmium erythraeum

SEQ ID NO: 99675 - DNA, 1487 bp, Arabidopsis thaliana
  misc_feature (1)..(1487): Ceres Seq. ID no. 13603431
  misc_feature: MA Experiment ID: 108461 Result: Down-regulated in Transcription
  misc_feature: MA Experiment 108461 PARAMETER Experiment Name: At_Germinating_Seeds_cDNA_P Parameter: Age (day) Value: 1 vs. 0
  misc_feature: MA Experiment 108461 PARAMETER Experiment Name: At_Germinating_Seeds_cDNA_P Parameter: Tissue Value: Germinating Seeds
  misc_feature: MA Experiment ID: 108462 Result: Down-regulated in Transcription
  misc_feature: MA Experiment 108462 PARAMETER Experiment Name: At_Germinating_Seeds_cDNA_P Parameter: Age (day) Value: 2 vs. 0
  misc_feature: MA Experiment 108462 PARAMETER Experiment Name: At_Germinating_Seeds_cDNA_P Parameter: Tissue Value: Germinating Seeds
  misc_feature: MA Experiment ID: 108463 Result: Down-regulated in Transcription
  misc_feature: MA Experiment 108463 PARAMETER Experiment Name: At_Germinating_Seeds_cDNA_P Parameter: Age (day) Value: 3 vs. 0
  misc_feature: MA Experiment 108463 PARAMETER Experiment Name: At_Germinating_Seeds_cDNA_P Parameter: Tissue Value: Germinating Seeds
  misc_feature: MA Experiment ID: 108464 Result: Down-regulated in Transcription
  misc_feature: MA Experiment 108464 PARAMETER Experiment Name: At_Germinating_Seeds_cDNA_P Parameter: Age (day) Value: 4 vs. 0
  misc_feature: MA Experiment 108464 PARAMETER Experiment Name: At_Germinating_Seeds_cDNA_P Parameter: Tissue Value: Germinating Seeds
gaagccgcaaagaaagcggcggtggaagctgagacatgcaacaatggcgttcgtgtcattctcttcttctccttctctctctcttacactcgcgattcaacattaatttcgttcttcttcatacacatatatagatagtgtcttcattttccaaccatgaccggtagagaaatcctccacaagatgaaggaatccgtcaaggagaaagttgggcttggtgcatctgcttcatctgcagattcagggaaaggtaagagcaagatgttgaagcagatcacacatggttttcatttggtgaaagggaaagcttttcacgagatggaagattatgtggttgccaaattcaaggaagttgatgataatgagcttggtctgtttgctatcttcgatggccatcttagccacgagattccggactacttgtgctcccatttgtttgagaacatcttgaaagagccgaatttctggcaagaacctgagaaagcgataaagaaagcttactatataacggatacaacgattctagacaaggcagatgatttgggaaaaggaggttctactgctgtgactgcgatattgatcaattgccagaagctggtggttgctaatgttggtgactctcgagctgttatttgccaaaatggtgttgcgaagccactctcagttgatcatgagccgaacatggagaaggatgaaatcgagaacagaggaggattcgtttctaactttcctggggatgttcctcgagttgatggtcaactggctgtggcaagggcatttggtgataagagtttaaagatgcatttgagttcagaaccatatgttacggtggagataattgatgatgatgcagaatttcttatcctagcaagtgatggactatggaaggtcatgtcaaaccaagaagccgttgactcaatcaagggaataaaagatgcgaaggctgcagcaaagcaccttgcagaggaggctgttgcaaggaaaagctcagacgatatctcagtcgtcgtcgtgaaatttcagtgacattagctttcggagaagagacctctgcagactgcagatccctttcatcgcaagtcttactggtcacttaaacaagtaaagagtctttgagattggaccagctaaagaaagaatcacaagtatgggcgtttcctctgtaagatgcaattatcacctctatgttactcttttctttttttccttttcaactctgtgattatctctaagtctgtttctttctgggaataaaattttaacagtgaaaaactttctttgcttctctttttttttgttgtaaatgttttttgttatacaatagggcagtgtaagaaagatgaaatagttagaattagtgggtagtgaaagagacaggacataaaaggtttcacatgccaaactgtactcatgtctcgagtctatgacctaagcttttggggttgttatttacaataacagaataaataagcgttgtcccttttttc

SEQ ID NO: 99676 - protein, 289 aa, Arabidopsis thaliana; identical to SEQ ID NO: 40326
  peptide (1)..(289): Ceres Seq. ID no. 13603432
  misc_feature (40)..(281): Pfam Name: Protein phosphatase 2C Pfam Description: Protein phosphatase 2C
  misc_feature (1)..(289): Homolog of NCBI NO: 15232538 NR Description: protein phosphatase 2C (PP2C), putative thaliana] >gi|9294253|dbj|BAB02155.1| protein phosphatase type 2C thaliana] >gi|26450048|dbj|BAC42144.1| putative protein
  misc_feature (1)..(289): Homolog of NCBI NO: 21539551 NR Description: putative protein phosphatase type 2C [Arabidopsis
  misc_feature (1)..(289): Homolog of NCBI NO: 4336436 NR Description: protein phosphatase type 2C [Lotus japonicus]
  misc_feature (1)..(288): Homolog of NCBI NO: 18417190 NR Description: protein phosphatase 2C (PP2C), putative thaliana] >gi|16604585|gb|AAL24149.1| putative protein
  misc_feature (1)..(288): Homolog of NCBI NO: 23307574 NR Description: putative protein phosphatase 2C homolog [Oryza
  misc_feature (1)..(289): Homolog of NCBI NO: 18399423 NR Description: protein phosphatase 2C (PP2C), putative thaliana] >gi|15724170|gb|AAL06477.1|AF411787_1 [Arabidopsis thaliana] >gi|18652945|dbj|BAB84701.1| protein
  misc_feature (1)..(289): Homolog of NCBI NO: 25411985 NR Description: probable protein phosphatase 2C [imported] -
  misc_feature (36)..(288): Homolog of NCBI NO: 7488280 NR Description: protein phosphatase 2C homolog F20O9.80 -
  misc_feature (23)..(289): Homolog of NCBI NO: 32488822 NR Description: OSJNBa0085I10.2 [Oryza sativa (japonica
  misc_feature (13)..(289): Homolog of NCBI NO: 18395099 NR Description: protein phosphatase 2C (PP2C), putative

SEQ ID NO: 99677 - protein, 280 aa, Arabidopsis thaliana; identical to SEQ ID NO: 40327
  peptide (1)..(280): Ceres Seq. ID no. 13603433
  misc_feature (31)..(272): Pfam Name: Protein phosphatase 2C Pfam Description: Protein phosphatase 2C
  misc_feature (1)..(280): Homolog of NCBI NO: 15232538 NR Description: protein phosphatase 2C (PP2C), putative thaliana] >gi|9294253|dbj|BAB02155.1| protein phosphatase type 2C thaliana] >gi|26450048|dbj|BAC42144.1| putative protein
  misc_feature (1)..(280): Homolog of NCBI NO: 21539551 NR Description: putative protein phosphatase type 2C [Arabidopsis
  misc_feature (1)..(280): Homolog of NCBI NO: 4336436 NR Description: protein phosphatase type 2C [Lotus japonicus]
  misc_feature (1)..(279): Homolog of NCBI NO: 18417190 NR Description: protein phosphatase 2C (PP2C), putative thaliana] >gi|16604585|gb|AAL24149.1| putative protein
  misc_feature (1)..(279): Homolog of NCBI NO: 23307574 NR Description: putative protein phosphatase 2C homolog [Oryza
  misc_feature (1)..(280): Homolog of NCBI NO: 18399423 NR Description: protein phosphatase 2C (PP2C), putative thaliana] >gi|15724170|gb|AAL06477.1|AF411787_1 [Arabidopsis thaliana] >gi|18652945|dbj|BAB84701.1| protein
  misc_feature (1)..(280): Homolog of NCBI NO: 25411985 NR Description: probable protein phosphatase 2C [imported] -
  misc_feature (27)..(279): Homolog of NCBI NO: 7488280 NR Description: protein phosphatase 2C homolog F20O9.80 -
  misc_feature (14)..(280): Homolog of NCBI NO: 32488822 NR Description: OSJNBa0085I10.2 [Oryza sativa (japonica
  misc_feature (4)..(280): Homolog of NCBI NO: 18395099 NR Description: protein phosphatase 2C (PP2C), putative

SEQ ID NO: 99678 - protein, 254 aa, Arabidopsis thaliana; identical to SEQ ID NO: 40328
  peptide (1)..(254): Ceres Seq. ID no. 13603434
  misc_feature (5)..(246): Pfam Name: Protein phosphatase 2C Pfam Description: Protein phosphatase 2C
  misc_feature (1)..(254): Homolog of NCBI NO: 15232538 NR Description: protein phosphatase 2C (PP2C), putative thaliana] >gi|9294253|dbj|BAB02155.1| protein phosphatase type 2C thaliana] >gi|26450048|dbj|BAC42144.1| putative protein
  misc_feature (1)..(254): Homolog of NCBI NO: 21539551 NR Description: putative protein phosphatase type 2C [Arabidopsis
  misc_feature (1)..(254): Homolog of NCBI NO: 4336436 NR Description: protein phosphatase type 2C [Lotus japonicus]
  misc_feature (1)..(253): Homolog of NCBI NO: 18417190 NR Description: protein phosphatase 2C (PP2C), putative thaliana] >gi|16604585|gb|AAL24149.1| putative protein
  misc_feature (1)..(253): Homolog of NCBI NO: 23307574 NR Description: putative protein phosphatase 2C homolog [Oryza
  misc_feature (1)..(254): Homolog of NCBI NO: 18399423 NR Description: protein phosphatase 2C (PP2C), putative thaliana] >gi|15724170|gb|AAL06477.1|AF411787_1 [Arabidopsis thaliana] >gi|18652945|dbj|BAB84701.1| protein
  misc_feature (1)..(254): Homolog of NCBI NO: 25411985 NR Description: probable protein phosphatase 2C [imported] -
  misc_feature (1)..(253): Homolog of NCBI NO: 7488280 NR Description: protein phosphatase 2C homolog F20O9.80 -
  misc_feature (1)..(254): Homolog of NCBI NO: 32488822 NR Description: OSJNBa0085I10.2 [Oryza sativa (japonica
  misc_feature (1)..(254): Homolog of NCBI NO: 18395099 NR Description: protein phosphatase 2C (PP2C), putative

SEQ ID NO: 99679 - DNA, 1263 bp, Arabidopsis thaliana
  misc_feature (1)..(1263): Ceres Seq. ID no. 13603447
  misc_feature: MA Experiment ID: 108434 Result: Down-regulated in Transcription
  misc_feature: MA Experiment 108434 PARAMETER Experiment Name: At_Root_Tips_cDNA_P Parameter: Tissue Value: Root Tips
  misc_feature: MA Experiment ID: 108461 Result: Up-regulated in Transcription
  misc_feature: MA Experiment 108461 PARAMETER Experiment Name: At_Germinating_Seeds_cDNA_P Parameter: Age (day) Value: 1 vs. 0
  misc_feature: MA Experiment 108461 PARAMETER Experiment Name: At_Germinating_Seeds_cDNA_P Parameter: Tissue Value: Germinating Seeds
  misc_feature: MA Experiment ID: 108462 Result: Up-regulated in Transcription
  misc_feature: MA Experiment 108462 PARAMETER Experiment Name: At_Germinating_Seeds_cDNA_P Parameter: Age (day) Value: 2 vs. 0
  misc_feature: MA Experiment 108462 PARAMETER Experiment Name: At_Germinating_Seeds_cDNA_P Parameter: Tissue Value: Germinating Seeds
  misc_feature: MA Experiment ID: 108464 Result: Up-regulated in Transcription
  misc_feature: MA Experiment 108464 PARAMETER Experiment Name: At_Germinating_Seeds_cDNA_P Parameter: Age (day) Value: 4 vs. 0
  misc_feature: MA Experiment 108464 PARAMETER Experiment Name: At_Germinating_Seeds_cDNA_P Parameter: Tissue Value: Germinating Seeds
  misc_feature: MA Experiment ID: 108488 Result: Down-regulated in Transcription
  misc_feature: MA Experiment ID: 108489 Result: Up-regulated in Transcription
  misc_feature: MA Experiment ID: 108501 Result: Down-regulated in Transcription
  misc_feature: MA Experiment 108501 PARAMETER Experiment Name: At_ap2_floral_buds_cDNA_P Parameter: Plant Line Value: ap2 (Ler.)
  misc_feature: MA Experiment 108501 PARAMETER Experiment Name: At_ap2_floral_buds_cDNA_P Parameter: Tissue Value: Closed Flower
  misc_feature: MA Experiment ID: 108561 Result: Up-regulated in Transcription
  misc_feature: MA Experiment 108561 PARAMETER Experiment Name: At_100uM_ABA_cDNA_P Parameter: Timepoint (hr) Value: 6
  misc_feature: MA Experiment 108561 PARAMETER Experiment Name: At_100uM_ABA_cDNA_P Parameter: Tissue Value: Aerial
  misc_feature: MA Experiment 108561 PARAMETER Experiment Name: At_100uM_ABA_cDNA_P Parameter: Treatment Value: 100uM ABA vs. No Treatment
  misc_feature: MA Experiment ID: 108572 Result: Up-regulated in Transcription
  misc_feature: MA Experiment 108572 PARAMETER Experiment Name: At_Drought_cDNA_P Parameter: Timepoint (hr) Value: 1
  misc_feature: MA Experiment 108572 PARAMETER Experiment Name: At_Drought_cDNA_P Parameter: Tissue Value: Aerial
  misc_feature: MA Experiment 108572 PARAMETER Experiment Name: At_Drought_cDNA_P Parameter: Treatment Value: Drought vs. No Drought
  misc_feature: MA Experiment ID: 108573 Result: Up-regulated in Transcription
  misc_feature: MA Experiment 108573 PARAMETER Experiment Name: At_Drought_cDNA_P Parameter: Timepoint (hr) Value: 6
  misc_feature: MA Experiment 108573 PARAMETER Experiment Name: At_Drought_cDNA_P Parameter: Tissue Value: Aerial
  misc_feature: MA Experiment 108573 PARAMETER Experiment Name: At_Drought_cDNA_P Parameter: Treatment Value: Drought vs. No Drought
  misc_feature: MA Experiment ID: 108585 Result: Up-regulated in Transcription
  misc_feature: MA Experiment 108585 PARAMETER Experiment Name: At_5mM_NaNP_cDNA_P Parameter: Timepoint (hr) Value: 6
  misc_feature: MA Experiment 108585 PARAMETER Experiment Name: At_5mM_NaNP_cDNA_P Parameter: Tissue Value: Aerial
  misc_feature: MA Experiment 108585 PARAMETER Experiment Name: At_5mM_NaNP_cDNA_P Parameter: Treatment Value: null
  misc_feature: MA Experiment ID: 108594 Result: Up-regulated in Transcription
  misc_feature: MA Experiment 108594 PARAMETER Experiment Name: At_Ler-rhl_Root_cDNA_P Parameter: Plant Line Value: null
  misc_feature: MA Experiment ID: 108595 Result: Up-regulated in Transcription
  misc_feature: MA Experiment 108595 PARAMETER Experiment Name: At_Ler-pi_Ovule_cDNA_P Parameter: Plant Line Value: null
  misc_feature: MA Experiment ID: 108605 Result: Up-regulated in Transcription
  misc_feature: MA Experiment 108605 PARAMETER Experiment Name: At_100uM_ABA_cDNA_P Parameter: Timepoint (hr) Value: 6
  misc_feature: MA Experiment 108605 PARAMETER Experiment Name: At_100uM_ABA_cDNA_P Parameter: Tissue Value: Aerial
  misc_feature: MA Experiment 108605 PARAMETER Experiment Name: At_100uM_ABA_cDNA_P Parameter: Treatment Value: 100uM ABA vs. No Treatment
  misc_feature: MA Experiment ID: 108607 Result: Up-regulated in Transcription
  misc_feature: MA Experiment 108607 PARAMETER Experiment Name: At_100uM_ABA_cDNA_P Parameter: Timepoint (hr) Value: 4
  misc_feature: MA Experiment 108607 PARAMETER Experiment Name: At_100uM_ABA_cDNA_P Parameter: Tissue Value: Aerial
  misc_feature: MA Experiment 108607 PARAMETER Experiment Name: At_100uM_ABA_cDNA_P Parameter: Treatment Value: 100uM ABA vs. No Treatment
  misc_feature: MA Experiment ID: 108608 Result: Up-regulated in Transcription
  misc_feature: MA Experiment 108608 PARAMETER Experiment Name: At_100uM_ABA_cDNA_P Parameter: Timepoint (hr) Value: 1
  misc_feature: MA Experiment 108608 PARAMETER Experiment Name: At_100uM_ABA_cDNA_P Parameter: Tissue Value: Aerial
  misc_feature: MA Experiment 108608 PARAMETER Experiment Name: At_100uM_ABA_cDNA_P Parameter: Treatment Value: 100uM ABA vs. No Treatment
  misc_feature: MA Experiment ID: 108668 Result: Up-regulated in Transcription
  misc_feature: MA Experiment 108668 PARAMETER Experiment Name: At_2mM_SA_cDNA_P Parameter: Plant Line Value: WS
  misc_feature: MA Experiment 108668 PARAMETER Experiment Name: At_2mM_SA_cDNA_P Parameter: Timepoint (hr) Value: 6
  misc_feature: MA Experiment 108668 PARAMETER Experiment Name: At_2mM_SA_cDNA_P Parameter: Treatment Value: 2mM SA vs. No Treatment
  misc_feature: MA Experiment ID: 20000070 Result: Up-regulated in Transcription
  misc_feature: MA Experiment 20000070 PARAMETER Experiment Name: At_100uM_ABA_Mutants_cDNA_P Parameter: Plant Line Value: CS24
  misc_feature: MA Experiment 20000070 PARAMETER Experiment Name: At_100uM_ABA_Mutants_cDNA_P Parameter: Timepoint (hr) Value: 6
  misc_feature: MA Experiment 20000070 PARAMETER Experiment Name: At_100uM_ABA_Mutants_cDNA_P Parameter: Tissue Value: Aerial
  misc_feature: MA Experiment 20000070 PARAMETER Experiment Name: At_100uM_ABA_Mutants_cDNA_P Parameter: Treatment Value: 100uM ABA vs. No Treatment
  misc_feature: MA Experiment ID: 20000071 Result: Up-regulated in Transcription
  misc_feature: MA Experiment 20000071 PARAMETER Experiment Name: At_100uM_ABA_Mutants_cDNA_P Parameter: Plant Line Value: CS8104
  misc_feature: MA Experiment 20000071 PARAMETER Experiment Name: At_100uM_ABA_Mutants_cDNA_P Parameter: Timepoint (hr) Value: 6
  misc_feature: MA Experiment 20000071 PARAMETER Experiment Name: At_100uM_ABA_Mutants_cDNA_P Parameter: Tissue Value: Aerial
  misc_feature: MA Experiment 20000071 PARAMETER Experiment Name: At_100uM_ABA_Mutants_cDNA_P Parameter: Treatment Value: 100uM ABA vs. No Treatment
  misc_feature: MA Experiment ID: 20000072 Result: Up-regulated in Transcription
  misc_feature: MA Experiment 20000072 PARAMETER Experiment Name: At_100uM_ABA_Mutants_cDNA_P Parameter: Plant Line Value: CS8105
  misc_feature: MA Experiment 20000072 PARAMETER Experiment Name: At_100uM_ABA_Mutants_cDNA_P Parameter: Timepoint (hr) Value: 6
  misc_feature: MA Experiment 20000072 PARAMETER Experiment Name: At_100uM_ABA_Mutants_cDNA_P Parameter: Tissue Value: Aerial
  misc_feature: MA Experiment 20000072 PARAMETER Experiment Name: At_100uM_ABA_Mutants_cDNA_P Parameter: Treatment Value: 100uM ABA vs. No Treatment
  misc_feature: MA Experiment ID: 20000087 Result: Up-regulated in Transcription
  misc_feature: MA Experiment 20000087 PARAMETER Experiment Name: At_100uM_ABA_Mutants_cDNA_P Parameter: Plant Line Value: WS
  misc_feature: MA Experiment 20000087 PARAMETER Experiment Name: At_100uM_ABA_Mutants_cDNA_P Parameter: Timepoint (hr) Value: 6
  misc_feature: MA Experiment 20000087 PARAMETER Experiment Name: At_100uM_ABA_Mutants_cDNA_P Parameter: Tissue Value: Aerial
  misc_feature: MA Experiment 20000087 PARAMETER Experiment Name: At_100uM_ABA_Mutants_cDNA_P Parameter: Treatment Value: 100uM ABA vs. No Treatment
  misc_feature: MA Experiment ID: 20000088 Result: Up-regulated in Transcription
  misc_feature: MA Experiment 20000088 PARAMETER Experiment Name: At_100uM_ABA_Mutants_cDNA_P Parameter: Plant Line Value: Landsberg
  misc_feature: MA Experiment 20000088 PARAMETER Experiment Name: At_100uM_ABA_Mutants_cDNA_P Parameter: Timepoint (hr) Value: 6
  misc_feature: MA Experiment 20000088 PARAMETER Experiment Name: At_100uM_ABA_Mutants_cDNA_P Parameter: Tissue Value: Aerial
  misc_feature: MA Experiment 20000088 PARAMETER Experiment Name: At_100uM_ABA_Mutants_cDNA_P Parameter: Treatment Value: 100uM ABA vs. No Treatment
  misc_feature: MA Experiment ID: 20000166 Result: Up-regulated in Transcription
  misc_feature: MA Experiment 20000166 PARAMETER Experiment Name: At_100uM_ABA_P Parameter: Age (day) Value: 14
  misc_feature: MA Experiment 20000166 PARAMETER Experiment Name: At_100uM_ABA_P Parameter: Organism Value: A. thaliana
  misc_feature: MA Experiment 20000166 PARAMETER Experiment Name: At_100uM_ABA_P Parameter: Plant Line Value: WS
  misc_feature: MA Experiment 20000166 PARAMETER Experiment Name: At_100uM_ABA_P Parameter: Timepoint (hr) Value: 1
  misc_feature: MA Experiment 20000166 PARAMETER Experiment Name: At_100uM_ABA_P Parameter: Tissue Value: Aerial
  misc_feature: MA Experiment 20000166 PARAMETER Experiment Name: At_100uM_ABA_P Parameter: Treatment Value: 100uM ABA vs. No Treatment
  misc_feature: MA Experiment ID: 20000169 Result: Up-regulated in Transcription
  misc_feature: MA Experiment 20000169 PARAMETER Experiment Name: At_100uM_ABA_P Parameter: Age (day) Value: 14
  misc_feature: MA Experiment 20000169 PARAMETER Experiment Name: At_100uM_ABA_P Parameter: Organism Value: A. thaliana
  misc_feature: MA Experiment 20000169 PARAMETER Experiment Name: At_100uM_ABA_P Parameter: Plant Line Value: WS
  misc_feature: MA Experiment 20000169 PARAMETER Experiment Name: At_100uM_ABA_P Parameter: Timepoint (hr) Value: 6
  misc_feature: MA Experiment 20000169 PARAMETER Experiment Name: At_100uM_ABA_P Parameter: Tissue Value: Aerial
  misc_feature: MA Experiment 20000169 PARAMETER Experiment Name: At_100uM_ABA_P Parameter: Treatment Value: 100uM ABA vs. No Treatment
  misc_feature: MA Experiment ID: 20000182 Result: Up-regulated in Transcription
  misc_feature: MA Experiment 20000182 PARAMETER Experiment Name: At_2mM_SA_P Parameter: Age (day) Value: 14
  misc_feature: MA Experiment 20000182 PARAMETER Experiment Name: At_2mM_SA_P Parameter: Organism Value: A. thaliana
  misc_feature: MA Experiment 20000182 PARAMETER Experiment Name: At_2mM_SA_P Parameter: Plant Line Value: WS
  misc_feature: MA Experiment 20000182 PARAMETER Experiment Name: At_2mM_SA_P Parameter: Timepoint (hr) Value: 6
  misc_feature: MA Experiment 20000182 PARAMETER Experiment Name: At_2mM_SA_P Parameter: Tissue Value: Aerial
  misc_feature: MA Experiment 20000182 PARAMETER Experiment Name: At_2mM_SA_P Parameter: Treatment Value: 2mM SA vs. No Treatment
  misc_feature: MA Experiment ID: 20000184 Result: Down-regulated in Transcription
  misc_feature: MA Experiment 20000184 PARAMETER Experiment Name: At_Shoots__P Parameter: Age (day) Value: 7
  misc_feature: MA Experiment 20000184 PARAMETER Experiment Name: At_Shoots__P Parameter: Tissue Value: Shoots vs. Whole Plant
  misc_feature: MA Experiment ID: 20000185 Result: Down-regulated in Transcription
  misc_feature: MA Experiment 20000185 PARAMETER Experiment Name: At_Roots__P Parameter: Age (day) Value: 7 vs. 21
  misc_feature: MA Experiment 20000185 PARAMETER Experiment Name: At_Roots__P Parameter: Organism Value: A. thaliana
  misc_feature: MA Experiment 20000185 PARAMETER Experiment Name: At_Roots__P Parameter: Tissue Value: Roots vs. Whole Plant
  misc_feature: MA Experiment ID: 20000224 Result: Down-regulated in Transcription
  misc_feature: MA Experiment ID: 20000234 Result: Down-regulated in Transcription
  misc_feature: MA Experiment 20000234 PARAMETER Experiment Name: At_Siliques_P Parameter: Age (day) Value: 21
  misc_feature: MA Experiment 20000234 PARAMETER Experiment Name: At_Siliques_P Parameter: Organism Value: A. thaliana
  misc_feature: MA Experiment 20000234 PARAMETER Experiment Name: At_Siliques_P Parameter: Plant Line Value: WS
  misc_feature: MA Experiment 20000234 PARAMETER Experiment Name: At_Siliques_P Parameter: Tissue Value: Less Than 5mm Siliques vs. Whole Plant
  misc_feature: MA Experiment ID: 20000235 Result: Down-regulated in Transcription
  misc_feature: MA Experiment 20000235 PARAMETER Experiment Name: At_Siliques_P Parameter: Age (day) Value: 21
  misc_feature: MA Experiment 20000235 PARAMETER Experiment Name: At_Siliques_P Parameter: Organism Value: A. thaliana
  misc_feature: MA Experiment 20000235 PARAMETER Experiment Name: At_Siliques_P Parameter: Plant Line Value: WS
  misc_feature: MA Experiment 20000235 PARAMETER Experiment Name: At_Siliques_P Parameter: Tissue Value: 5-10mm Siliques vs. Whole Plant
  misc_feature: MA Experiment ID: 20000265 Result: Down-regulated in Transcription
  misc_feature: MA Experiment 20000265 PARAMETER Experiment Name: At_Open_Flower_P Parameter: Age (day) Value: 21
  misc_feature: MA Experiment 20000265 PARAMETER Experiment Name: At_Open_Flower_P Parameter: Plant Line Value: WS
  misc_feature: MA Experiment 20000265 PARAMETER Experiment Name: At_Open_Flower_P Parameter: Tissue Value: Closed Flower vs. Whole Plant
  misc_feature: MA Experiment ID: 20000286 Result: Down-regulated in Transcription
  misc_feature: MA Experiment 20000286 PARAMETER Experiment Name: At_Open_Flower_P Parameter: Age (day) Value: 21
  misc_feature: MA Experiment 20000286 PARAMETER Experiment Name: At_Open_Flower_P Parameter: Plant Line Value: WS
  misc_feature: MA Experiment 20000286 PARAMETER Experiment Name: At_Open_Flower_P Parameter: Tissue Value: Half Open vs. Whole Plant
  misc_feature: MA Experiment ID: 20000437 Result: Up-regulated in Transcription
  misc_feature: MA Experiment 20000437 PARAMETER Experiment Name: At_Drought_P Parameter: Age (day) Value: 8
  misc_feature: MA Experiment 20000437 PARAMETER Experiment Name: At_Drought_P Parameter: Organism Value: A. thaliana
  misc_feature: MA Experiment 20000437 PARAMETER Experiment Name: At_Drought_P Parameter: Plant Line Value: WS
  misc_feature: MA Experiment 20000437 PARAMETER Experiment Name: At_Drought_P Parameter: Timepoint (hr) Value: 24
  misc_feature: MA Experiment 20000437 PARAMETER Experiment Name: At_Drought_P Parameter: Tissue Value: Whole Plant
  misc_feature: MA Experiment 20000437 PARAMETER Experiment Name: At_Drought_P Parameter: Treatment Value: Drought vs. No Drought
  misc_feature: MA Experiment ID: 20000438 Result: Down-regulated in Transcription
  misc_feature: MA Experiment 20000438 PARAMETER Experiment Name: At_Shoots__P Parameter: Age (day) Value: 14
  misc_feature: MA Experiment 20000438 PARAMETER Experiment Name: At_Shoots__P Parameter: Tissue Value: Shoots vs. Whole Plant
  misc_feature: MA Experiment ID: 20000439 Result: Down-regulated in Transcription
  misc_feature: MA Experiment 20000439 PARAMETER Experiment Name: At_Roots__P Parameter: Age (day) Value: 14 vs. 21
  misc_feature: MA Experiment 20000439 PARAMETER Experiment Name: At_Roots__P Parameter: Organism Value: A. thaliana
  misc_feature: MA Experiment 20000439 PARAMETER Experiment Name: At_Roots__P Parameter: Tissue Value: Roots vs. Whole Plant
  misc_feature: MA Experiment ID: 20000441 Result: Up-regulated in Transcription
  misc_feature: MA Experiment 20000441 PARAMETER Experiment Name: At_1uM_BR-BRZ__P Parameter: Tissue Value: Shoot Apices
  misc_feature: MA Experiment 20000441 PARAMETER Experiment Name: At_1uM_BR-BRZ__P Parameter: Treatment Value: 1uM BR vs. No Treatment
  misc_feature: MA Experiment ID: 20000443 Result: Up-regulated in Transcription
  misc_feature: MA Experiment 20000443 PARAMETER Experiment Name: At_1uM_BR-BRZ__P Parameter: Tissue Value: Shoot Apices
  misc_feature: MA Experiment 20000443 PARAMETER Experiment Name: At_1uM_BR-BRZ__P Parameter: Treatment Value: 1uM BRZ vs. No Treatment
  misc_feature: MA Experiment ID: 20000453 Result: Up-regulated in Transcription
  misc_feature: MA Experiment 20000453 PARAMETER Experiment Name: At_100uM_ABA_P Parameter: Age (day) Value: 15
  misc_feature: MA Experiment 20000453 PARAMETER Experiment Name: At_100uM_ABA_P Parameter: Organism Value: A. thaliana
  misc_feature: MA Experiment 20000453 PARAMETER Experiment Name: At_100uM_ABA_P Parameter: Plant Line Value: WS
  misc_feature: MA Experiment 20000453 PARAMETER Experiment Name: At_100uM_ABA_P Parameter: Timepoint (hr) Value: 24
  misc_feature: MA Experiment 20000453 PARAMETER Experiment Name: At_100uM_ABA_P Parameter: Tissue Value: Aerial
  misc_feature: MA Experiment 20000453 PARAMETER Experiment Name: At_100uM_ABA_P Parameter: Treatment Value: 100uM ABA vs. No Treatment
  misc_feature: MA Experiment ID: 20000460 Result: Up-regulated in Transcription
  misc_feature: MA Experiment 20000460 PARAMETER Experiment Name: At_10percent_PEG_P Parameter: Age (day) Value: 12
  misc_feature: MA Experiment 20000460 PARAMETER Experiment Name: At_10percent_PEG_P Parameter: Organism Value: A. thaliana
  misc_feature: MA Experiment 20000460 PARAMETER Experiment Name: At_10percent_PEG_P Parameter: Plant Line Value: WS
  misc_feature: MA Experiment 20000460 PARAMETER Experiment Name: At_10percent_PEG_P Parameter: Timepoint (day) Value: 12
  misc_feature: MA Experiment 20000460 PARAMETER Experiment Name: At_10percent_PEG_P Parameter: Tissue Value: Whole Plant
  misc_feature: MA Experiment 20000460 PARAMETER Experiment Name: At_10percent_PEG_P Parameter: Treatment Value: 10percent PEG vs. No Treatment
  misc_feature: MA Experiment ID: 20000495 Result: Down-regulated in Transcription
  misc_feature: MA Experiment 20000495 PARAMETER Experiment Name: At_Guard_Cells_P Parameter: Harvest Date Value: 8/2/2002
  misc_feature: MA Experiment 20000495 PARAMETER Experiment Name: At_Guard_Cells_P Parameter: Organism Value: A. thaliana
  misc_feature: MA Experiment 20000495 PARAMETER Experiment Name: At_Guard_Cells_P Parameter: Tissue Value: Guard Cells vs. Leaves
  misc_feature: MA Experiment ID: 20000709 Result: Up-regulated in Transcription
  misc_feature: MA Experiment 20000709 PARAMETER Experiment Name: At_15mM_NH4NO3_L-to-H_P Parameter: Age (hr) Value: 14
  misc_feature: MA Experiment 20000709 PARAMETER Experiment Name: At_15mM_NH4NO3_L-to-H_P Parameter: Organism Value: A. thaliana
  misc_feature: MA Experiment 20000709 PARAMETER Experiment Name: At_15mM_NH4NO3_L-to-H_P Parameter: Plant Line Value: WS
  misc_feature: MA Experiment 20000709 PARAMETER Experiment Name: At_15mM_NH4NO3_L-to-H_P Parameter: Timepoint (hr) Value: 4
  misc_feature: MA Experiment 20000709 PARAMETER Experiment Name: At_15mM_NH4NO3_L-to-H_P Parameter: Tissue Value: Aerial
  misc_feature: MA Experiment 20000709 PARAMETER Experiment Name: At_15mM_NH4NO3_L-to-H_P Parameter: Treatment Value: 15mM NH4NO3 vs. 30mM Mannitol
  misc_feature: MA Experiment ID: 20001450 Result: Up-regulated in Transcription
  misc_feature: MA Experiment 20001450 PARAMETER Experiment Name: At_Far-red-induction_P Parameter: Age (day) Value: 7
  misc_feature: MA Experiment 20001450 PARAMETER Experiment Name: At_Far-red-induction_P Parameter: Light Value: Far-red vs. White
  misc_feature: MA Experiment 20001450 PARAMETER Experiment Name: At_Far-red-induction_P Parameter: Organism Value: A. thaliana
  misc_feature: MA Experiment 20001450 PARAMETER Experiment Name: At_Far-red-induction_P Parameter: Plant Line Value: Columbia
  misc_feature: MA Experiment 20001450 PARAMETER Experiment Name: At_Far-red-induction_P Parameter: Timepoint (hr) Value: 8
  misc_feature: MA Experiment 20001450 PARAMETER Experiment Name: At_Far-red-induction_P Parameter: Tissue Value: Whole Plant
  misc_feature: MA Experiment ID: 20001451 Result: Up-regulated in Transcription
  misc_feature: MA Experiment 20001451 PARAMETER Experiment Name: At_Far-red-induction_P Parameter: Age (day) Value: 7
  misc_feature: MA Experiment 20001451 PARAMETER Experiment Name: At_Far-red-induction_P Parameter: Light Value: Far-red vs. White
  misc_feature: MA Experiment 20001451 PARAMETER Experiment Name: At_Far-red-induction_P Parameter: Organism Value: A. thaliana
  misc_feature: MA Experiment 20001451 PARAMETER Experiment Name: At_Far-red-induction_P Parameter: Plant Line Value: Columbia
  misc_feature: MA Experiment 20001451 PARAMETER Experiment Name: At_Far-red-induction_P Parameter: Timepoint (hr) Value: 24
  misc_feature: MA Experiment 20001451 PARAMETER Experiment Name: At_Far-red-induction_P Parameter: Tissue Value: Whole Plant
  misc_feature: MA Experiment ID: 20001556 Result: Up-regulated in Transcription
  misc_feature: MA Experiment 20001556 PARAMETER Experiment Name: At_Drought_Soil_Dry_P Parameter: Age (day) Value: 26
  misc_feature: MA Experiment 20001556 PARAMETER Experiment Name: At_Drought_Soil_Dry_P Parameter: Organism Value: A. thaliana
  misc_feature: MA Experiment 20001556 PARAMETER Experiment Name: At_Drought_Soil_Dry_P Parameter: Plant Line Value: WS
  misc_feature: MA Experiment 20001556 PARAMETER Experiment Name: At_Drought_Soil_Dry_P Parameter: Post Timepoint (hr) Value: None
  misc_feature: MA Experiment 20001556 PARAMETER Experiment Name: At_Drought_Soil_Dry_P Parameter: Post-Treatment Value: None
  misc_feature: MA Experiment 20001556 PARAMETER Experiment Name: At_Drought_Soil_Dry_P Parameter: Timepoint (day) Value: 12
  misc_feature: MA Experiment 20001556 PARAMETER Experiment Name: At_Drought_Soil_Dry_P Parameter: Treatment Value: Drought vs. No Drought
  misc_feature: MA Experiment ID: 20001559 Result: Up-regulated in Transcription
  misc_feature: MA Experiment 20001559 PARAMETER Experiment Name: At_Drought_Soil_Dry_P Parameter: Age (day) Value: 28
  misc_feature: MA Experiment 20001559 PARAMETER Experiment Name: At_Drought_Soil_Dry_P Parameter: Organism Value: A. thaliana
  misc_feature: MA Experiment 20001559 PARAMETER Experiment Name: At_Drought_Soil_Dry_P Parameter: Plant Line Value: WS
  misc_feature: MA Experiment 20001559 PARAMETER Experiment Name: At_Drought_Soil_Dry_P Parameter: Post Timepoint (hr) Value: 29
  misc_feature: MA Experiment 20001559 PARAMETER Experiment Name: At_Drought_Soil_Dry_P Parameter: Post-Treatment Value: Re-Water vs. No Drought
  misc_feature: MA Experiment 20001559 PARAMETER Experiment Name: At_Drought_Soil_Dry_P Parameter: Timepoint (day) Value: 14
  misc_feature: MA Experiment 20001559 PARAMETER Experiment Name: At_Drought_Soil_Dry_P Parameter: Treatment Value: Drought vs. No Drought
  misc_feature: MA Experiment ID: 20001905 Result: Up-regulated in Transcription
  misc_feature: MA Experiment 20001905 PARAMETER Experiment Name: At_Drought_Reproduction_P Parameter: Age (day) Value: 40
  misc_feature: MA Experiment 20001905 PARAMETER Experiment Name: At_Drought_Reproduction_P Parameter: Organism Value: A. thaliana
  misc_feature: MA Experiment 20001905 PARAMETER Experiment Name: At_Drought_Reproduction_P Parameter: Plant Line Value: WS
  misc_feature: MA Experiment 20001905 PARAMETER Experiment Name: At_Drought_Reproduction_P Parameter: Timepoint (day) Value: 10
  misc_feature: MA Experiment 20001905 PARAMETER Experiment Name: At_Drought_Reproduction_P Parameter: Tissue Value: Rosettes
  misc_feature: MA Experiment 20001905 PARAMETER Experiment Name: At_Drought_Reproduction_P Parameter: Treatment Value: Drought vs. No Drought
  misc_feature: MA Experiment ID: 20001906 Result: Up-regulated in Transcription
  misc_feature: MA Experiment 20001906 PARAMETER Experiment Name: At_Drought_Reproduction_P Parameter: Age (day) Value: 35
  misc_feature: MA Experiment 20001906 PARAMETER Experiment Name: At_Drought_Reproduction_P Parameter: Organism Value: A. thaliana
  misc_feature: MA Experiment 20001906 PARAMETER Experiment Name: At_Drought_Reproduction_P Parameter: Plant Line Value: WS
  misc_feature: MA Experiment 20001906 PARAMETER Experiment Name: At_Drought_Reproduction_P Parameter: Timepoint (day) Value: 5
  misc_feature: MA Experiment 20001906 PARAMETER Experiment Name: At_Drought_Reproduction_P Parameter: Tissue Value: Siliques
  misc_feature: MA Experiment 20001906 PARAMETER Experiment Name: At_Drought_Reproduction_P Parameter: Treatment Value: Drought vs. No Drought
aatctcagaatacaaaaaagaaaatcaaagaagatagttttgtgattgttttctataaaaagtgcagatattttctttgtcctagagaaagaggtgataggaaaaatgggtctccaagagcttgacccgttagcccaattgagcttaccgccgggttttcggttttatccgactgacgaagagctgatggttgaatatctctgtagaaaagccgccggtcacgacttctctctccagctcatagctgaaatcgatctctacaagtttgatccatgggttttaccaagtaaggcgttattcggtgaaaaagaatggtattttttcagcccgagggataggaagtatccaaacgggtcaagacctaatcgggttgccgggtcgggttattggaaagccaccggtacggataaagttatctcgacggagggaagaagagttggtatcaagaaagctttggtgttttacattggaaaagctccaaaaggaaccaaaaccaattggattatgcatgagtaccgtctcatcgaaccctctcgtcgaaatggaagcaccaagcttgatgattgggttttatgtcgaatatacaaaaagcaaacaagcgcacaaaaacaagcttacaataatctaatgacgagtggtcgtgaatacagcaacaatggttcgtcgacatcttcttcgtctcatcaatacgacgacgttctcgagtcgttgcatgagattgacaacagaagtttggggtttgccgccggttcatcaaacgcgctgcctcatagtcatagaccggttttaaccaatcataaaaccgggtttcagggtttagccagggagccaagttttgattgggcgaatttgattggacagaactcggtcccggaactcggactgagtcataacgttccgagtattcgttacggtgacggtggaacgcagcaacaaactgaggggattcctcggtttaataataactcggacgtctcggctaatcagggttttagtgttgacccggttaacggatttgggtactcgggtcaacaatctagtgggttcgggtttatttgattgtgtaatggtaacgtaataagaaaaacatatttttattttttgtccgtgtcagattagttaattaatatagcgtagaattcgaactctagggttagatttaggttctacgacttgtattgtatattcgtcgtcatttgtcctgacatttacatttttgtaaacttttatagctggaacttttgtattgatcaattatttatt

SEQ ID NO: 99680 - protein, 317 aa, Arabidopsis thaliana
  peptide (1)..(317): Ceres Seq. ID no. 13603448
  misc_feature (14)..(140): Pfam Name: No apical meristem (NAM) protein Pfam Description: No apical meristem (NAM) protein
  misc_feature (1)..(317): Homolog of NCBI NO: 15232604 NR Description: No apical meristem (NAM) protein family thaliana] >gi|7021735|gb|AAF35416.1| putative jasmonic acid
  misc_feature (1)..(317): Homolog of NCBI NO: 21536744 NR Description: putative jasmonic acid regulatory protein
  misc_feature (1)..(317): Homolog of NCBI NO: 15219112 NR Description: No apical meristem (NAM) protein family
  misc_feature (1)..(287): Homolog of NCBI NO: 6175246 NR Description: jasmonic acid 2 [Lycopersicon esculentum]
  misc_feature (1)..(297): Homolog of NCBI NO: 18416983 NR Description: No apical meristem (NAM) protein family thaliana] >gi|15982729|gb|AAL09817.1| unknown protein thaliana] >gi|16226943|gb|AAL16305.1|AF428375_1
  misc_feature (62)..(297): Homolog of NCBI NO: 7486254 NR Description: hypothetical protein F27G19.10 - Arabidopsis >gi|4972066|emb|CAB43873.1| putative protein [Arabidopsis >gi|7269595|emb|CAB81391.1| putative protein [Arabidopsis
  misc_feature (1)..(62): Homolog of NCBI NO: 7486254 NR Description: hypothetical protein F27G19.10 - Arabidopsis >gi|4972066|emb|CAB43873.1| putative protein [Arabidopsis >gi|7269595|emb|CAB81391.1| putative protein [Arabidopsis
  misc_feature (7)..(297): Homolog of NCBI NO: 23397295 NR Description: unknown protein [Arabidopsis thaliana]
  misc_feature (1)..(309): Homolog of NCBI NO: 31322582 NR Description: NAC-domain protein 485 [Brassica napus]
  misc_feature (1)..(195): Homolog of NCBI NO: 40786563 NR Description: putative NAC-domain protein [Oryza sativa
MGLQELDPLAQLSLPPGFRFYPTDEELMVEYLCRKAAGHDFSLQLIAEIDLYKFDPWVLPSKALFGEKEWYFFSPRDRKYPNGSRPNRVAGSGYWKATGTDKVISTEGRRVGIKKALVFYIGKAPKGTKTNWIMHEYRLIEPSRRNGSTKLDDWVLCRIYKKQTSAQKQAYNNLMTSGREYSNNGSSTSSSSHQYDDVLESLHEIDNRSLGFAAGSSNALPHSHRPVLTNHKTGFQGLAREPSFDWANLIGQNSVPELGLSHNVPSIRYGDGGTQQQTEGIPRFNNNSDVSANQGFSVDPVNGFGYSGQQSSGFGFI

SEQ ID NO: 99681 - protein, 290 aa, Arabidopsis thaliana
  peptide (1)..(290): Ceres Seq. ID no. 13603449
  misc_feature (1)..(113): Pfam Name: No apical meristem (NAM) protein Pfam Description: No apical meristem (NAM) protein
  misc_feature (1)..(290): Homolog of NCBI NO: 15232604 NR Description: No apical meristem (NAM) protein family thaliana] >gi|7021735|gb|AAF35416.1| putative jasmonic acid
  misc_feature (1)..(290): Homolog of NCBI NO: 21536744 NR Description: putative jasmonic acid regulatory protein
  misc_feature (1)..(290): Homolog of NCBI NO: 15219112 NR Description: No apical meristem (NAM) protein family
  misc_feature (1)..(260): Homolog of NCBI NO: 6175246 NR Description: jasmonic acid 2 [Lycopersicon esculentum]
  misc_feature (1)..(270): Homolog of NCBI NO: 18416983 NR Description: No apical meristem (NAM) protein family thaliana] >gi|15982729|gb|AAL09817.1| unknown protein thaliana] >gi|16226943|gb|AAL16305.1|AF428375_1
  misc_feature (35)..(270): Homolog of NCBI NO: 7486254 NR Description: hypothetical protein F27G19.10 - Arabidopsis >gi|4972066|emb|CAB43873.1| putative protein [Arabidopsis >gi|7269595|emb|CAB81391.1| putative protein [Arabidopsis
  misc_feature (1)..(35): Homolog of NCBI NO: 7486254 NR Description: hypothetical protein F27G19.10 - Arabidopsis >gi|4972066|emb|CAB43873.1| putative protein [Arabidopsis >gi|7269595|emb|CAB81391.1| putative protein [Arabidopsis
  misc_feature (1)..(270): Homolog of NCBI NO: 23397295 NR Description: unknown protein [Arabidopsis thaliana]
  misc_feature (1)..(282): Homolog of NCBI NO: 31322582 NR Description: NAC-domain protein 485 [Brassica napus]
  misc_feature (1)..(168): Homolog of NCBI NO: 40786563 NR Description: putative NAC-domain protein [Oryza sativa
MVEYLCRKAAGHDFSLQLIAEIDLYKFDPWVLPSKALFGEKEWYFFSPRDRKYPNGSRPNRVAGSGYWKATGTDKVISTEGRRVGIKKALVFYIGKAPKGTKTNWIMHEYRLIEPSRRNGSTKLDDWVLCRIYKKQTSAQKQAYNNLMTSGREYSNNGSSTSSSSHQYDDVLESLHEIDNRSLGFAAGSSNALPHSHRPVLTNHKTGFQGLAREPSFDWANLIGQNSVPELGLSHNVPSIRYGDGGTQQQTEGIPRFNNNSDVSANQGFSVDPVNGFGYSGQQSSGFGFI

SEQ ID NO: 99682 - protein, 184 aa, Arabidopsis thaliana; identical to SEQ ID NO: 39803
  peptide (1)..(184): Ceres Seq. ID no. 13603450
  misc_feature (1)..(184): Homolog of NCBI NO: 15232604 NR Description: No apical meristem (NAM) protein family thaliana] >gi|7021735|gb|AAF35416.1| putative jasmonic acid
  misc_feature (1)..(184): Homolog of NCBI NO: 21536744 NR Description: putative jasmonic acid regulatory protein
  misc_feature (1)..(184): Homolog of NCBI NO: 15219112 NR Description: No apical meristem (NAM) protein family
  misc_feature (1)..(154): Homolog of NCBI NO: 6175246 NR Description: jasmonic acid 2 [Lycopersicon esculentum]
  misc_feature (1)..(164): Homolog of NCBI NO: 18416983 NR Description: No apical meristem (NAM) protein family thaliana] >gi|15982729|gb|AAL09817.1| unknown protein thaliana] >gi|16226943|gb|AAL16305.1|AF428375_1
  misc_feature (1)..(164): Homolog of NCBI NO: 7486254 NR Description: hypothetical protein F27G19.10 - Arabidopsis >gi|4972066|emb|CAB43873.1| putative protein [Arabidopsis >gi|7269595|emb|CAB81391.1| putative protein [Arabidopsis
  misc_feature (1)..(164): Homolog of NCBI NO: 23397295 NR Description: unknown protein [Arabidopsis thaliana]
  misc_feature (1)..(176): Homolog of NCBI NO: 31322582 NR Description: NAC-domain protein 485 [Brassica napus]
  misc_feature (1)..(62): Homolog of NCBI NO: 40786563 NR Description: putative NAC-domain protein [Oryza sativa
  misc_feature (1)..(69): Homolog of NCBI NO: 21105748 NR Description: nam-like protein 10 [Petunia x hybrida]

SEQ ID NO: 99683 - DNA, 939 bp, Arabidopsis thaliana
  misc_feature (1)..(939): Ceres Seq. ID no. 13603451
  misc_feature: MA Experiment ID: 108434 Result: Up-regulated in Transcription
  misc_feature: MA Experiment 108434 PARAMETER Experiment Name: At_Root_Tips_cDNA_P Parameter: Tissue Value: Root Tips
  misc_feature: MA Experiment ID: 108461 Result: Up-regulated in Transcription
  misc_feature: MA Experiment 108461 PARAMETER Experiment Name: At_Germinating_Seeds_cDNA_P Parameter: Age (day) Value: 1 vs. 0
  misc_feature: MA Experiment 108461 PARAMETER Experiment Name: At_Germinating_Seeds_cDNA_P Parameter: Tissue Value: Germinating Seeds
  misc_feature: MA Experiment ID: 108463 Result: Up-regulated in Transcription
  misc_feature: MA Experiment 108463 PARAMETER Experiment Name: At_Germinating_Seeds_cDNA_P Parameter: Age (day) Value: 3 vs. 0
  misc_feature: MA Experiment 108463 PARAMETER Experiment Name: At_Germinating_Seeds_cDNA_P Parameter: Tissue Value: Germinating Seeds
  misc_feature: MA Experiment ID: 108464 Result: Up-regulated in Transcription
  misc_feature: MA Experiment 108464 PARAMETER Experiment Name: At_Germinating_Seeds_cDNA_P Parameter: Age (day) Value: 4 vs. 0
  misc_feature: MA Experiment 108464 PARAMETER Experiment Name: At_Germinating_Seeds_cDNA_P Parameter: Tissue Value: Germinating Seeds
  misc_feature: MA Experiment ID: 108473 Result: Down-regulated in Transcription
  misc_feature: MA Experiment 108473 PARAMETER Experiment Name: At_Drought_Flowers_cDNA_P Parameter: Timepoint (hr) Value: 7 d
  misc_feature: MA Experiment 108473 PARAMETER Experiment Name: At_Drought_Flowers_cDNA_P Parameter: Tissue Value: Flower
  misc_feature: MA Experiment 108473 PARAMETER Experiment Name: At_Drought_Flowers_cDNA_P Parameter: Treatment Value: Drought vs. No Drought
  misc_feature: MA Experiment ID: 108474 Result: Down-regulated in Transcription
  misc_feature: MA Experiment 108474 PARAMETER Experiment Name: At_Drought_Flowers_cDNA_P Parameter: Timepoint (hr) Value: null
  misc_feature: MA Experiment 108474 PARAMETER Experiment Name: At_Drought_Flowers_cDNA_P Parameter: Treatment Value: Drought vs. No Drought
  misc_feature: MA Experiment ID: 108561 Result: Down-regulated in Transcription
  misc_feature: MA Experiment 108561 PARAMETER Experiment Name: At_100uM_ABA_cDNA_P Parameter: Timepoint (hr) Value: 6
  misc_feature: MA Experiment 108561 PARAMETER Experiment Name: At_100uM_ABA_cDNA_P Parameter: Tissue Value: Aerial
  misc_feature: MA Experiment 108561 PARAMETER Experiment Name: At_100uM_ABA_cDNA_P Parameter: Treatment Value: 100uM ABA vs. No Treatment
  misc_feature: MA Experiment ID: 108574 Result: Up-regulated in Transcription
  misc_feature: MA Experiment 108574 PARAMETER Experiment Name: At_Wounding__cDNA_P Parameter: Timepoint (hr) Value: 1
  misc_feature: MA Experiment 108574 PARAMETER Experiment Name: At_Wounding__cDNA_P Parameter: Tissue Value: Aerial
  misc_feature: MA Experiment 108574 PARAMETER Experiment Name: At_Wounding__cDNA_P Parameter: Treatment Value: Wounding vs. No Wounding
  misc_feature: MA Experiment ID: 108577 Result: Down-regulated in Transcription
  misc_feature: MA Experiment 108577 PARAMETER Experiment Name: At_42deg_Heat_cDNA_P Parameter: Temperature (deg C) Value: 42 vs. 22
  misc_feature: MA Experiment 108577 PARAMETER Experiment Name: At_42deg_Heat_cDNA_P Parameter: Timepoint (hr) Value: 6
  misc_feature: MA Experiment 108577 PARAMETER Experiment Name: At_42deg_Heat_cDNA_P Parameter: Tissue Value: Aerial
  misc_feature: MA Experiment ID: 108579 Result: Up-regulated in Transcription
  misc_feature: MA Experiment 108579 PARAMETER Experiment Name: At_4deg_Cold_cDNA_P Parameter: Temperature (deg C) Value: 4 vs. 22
  misc_feature: MA Experiment 108579 PARAMETER Experiment Name: At_4deg_Cold_cDNA_P Parameter: Timepoint (hr) Value: 6
  misc_feature: MA Experiment 108579 PARAMETER Experiment Name: At_4deg_Cold_cDNA_P Parameter: Tissue Value: Aerial
  misc_feature: MA Experiment ID: 108595 Result: Down-regulated in Transcription
  misc_feature: MA Experiment 108595 PARAMETER Experiment Name: At_Ler-pi_Ovule_cDNA_P Parameter: Plant Line Value: null
  misc_feature: MA Experiment ID: 20000069 Result: Down-regulated in Transcription
  misc_feature: MA Experiment 20000069 PARAMETER Experiment Name: At_100uM_ABA_Mutants_cDNA_P Parameter: Plant Line Value: CS23
  misc_feature: MA Experiment 20000069 PARAMETER Experiment Name: At_100uM_ABA_Mutants_cDNA_P Parameter: Timepoint (hr) Value: 6
  misc_feature: MA Experiment 20000069 PARAMETER Experiment Name: At_100uM_ABA_Mutants_cDNA_P Parameter: Tissue Value: Aerial
  misc_feature: MA Experiment 20000069 PARAMETER Experiment Name: At_100uM_ABA_Mutants_cDNA_P Parameter: Treatment Value: 100uM ABA vs. No Treatment
  misc_feature: MA Experiment ID: 20000070 Result: Down-regulated in Transcription
  misc_feature: MA Experiment 20000070 PARAMETER Experiment Name: At_100uM_ABA_Mutants_cDNA_P Parameter: Plant Line Value: CS24
  misc_feature: MA Experiment 20000070 PARAMETER Experiment Name: At_100uM_ABA_Mutants_cDNA_P Parameter: Timepoint (hr) Value: 6
  misc_feature: MA Experiment 20000070 PARAMETER Experiment Name: At_100uM_ABA_Mutants_cDNA_P Parameter: Tissue Value: Aerial
  misc_feature: MA Experiment 20000070 PARAMETER Experiment Name: At_100uM_ABA_Mutants_cDNA_P Parameter: Treatment Value: 100uM ABA vs. No Treatment
  misc_feature: MA Experiment ID: 20000087 Result: Down-regulated in Transcription
  misc_feature: MA Experiment 20000087 PARAMETER Experiment Name: At_100uM_ABA_Mutants_cDNA_P Parameter: Plant Line Value: WS
  misc_feature: MA Experiment 20000087 PARAMETER Experiment Name: At_100uM_ABA_Mutants_cDNA_P Parameter: Timepoint (hr) Value: 6
  misc_feature: MA Experiment 20000087 PARAMETER Experiment Name: At_100uM_ABA_Mutants_cDNA_P Parameter: Tissue Value: Aerial
  misc_feature: MA Experiment 20000087 PARAMETER Experiment Name: At_100uM_ABA_Mutants_cDNA_P Parameter: Treatment Value: 100uM ABA vs. No Treatment
  misc_feature: MA Experiment ID: 20000180 Result: Up-regulated in Transcription
  misc_feature: MA Experiment 20000180 PARAMETER Experiment Name: At_Germinating_Seeds_P Parameter: Age (hr) Value: 24 vs. 0
  misc_feature: MA Experiment 20000180 PARAMETER Experiment Name: At_Germinating_Seeds_P Parameter: Tissue Value: Germinating Seeds
  misc_feature: MA Experiment ID: 20000185 Result: Down-regulated in Transcription
  misc_feature: MA Experiment 20000185 PARAMETER Experiment Name: At_Roots__P Parameter: Age (day) Value: 7 vs. 21
  misc_feature: MA Experiment 20000185 PARAMETER Experiment Name: At_Roots__P Parameter: Organism Value: A. thaliana
  misc_feature: MA Experiment 20000185 PARAMETER Experiment Name: At_Roots__P Parameter: Tissue Value: Roots vs. Whole Plant
  misc_feature: MA Experiment ID: 20000439 Result: Down-regulated in Transcription
  misc_feature: MA Experiment 20000439 PARAMETER Experiment Name: At_Roots__P Parameter: Age (day) Value: 14 vs. 21
  misc_feature: MA Experiment 20000439 PARAMETER Experiment Name: At_Roots__P Parameter: Organism Value: A. thaliana
  misc_feature: MA Experiment 20000439 PARAMETER Experiment Name: At_Roots__P Parameter: Tissue Value: Roots vs. Whole Plant
  misc_feature: MA Experiment ID: 20000444 Result: Up-regulated in Transcription
  misc_feature: MA Experiment 20000444 PARAMETER Experiment Name: At_100uM_NAA__P Parameter: Age (day) Value: 14
  misc_feature: MA Experiment 20000444 PARAMETER Experiment Name: At_100uM_NAA__P Parameter: Organism Value: A. thaliana
  misc_feature: MA Experiment 20000444 PARAMETER Experiment Name: At_100uM_NAA__P Parameter: Plant Line Value: WS
  misc_feature: MA Experiment 20000444 PARAMETER Experiment Name: At_100uM_NAA__P Parameter: Timepoint (hr) Value: 1
  misc_feature: MA Experiment 20000444 PARAMETER Experiment Name: At_100uM_NAA__P Parameter: Tissue Value: Aerial
  misc_feature: MA Experiment 20000444 PARAMETER Experiment Name: At_100uM_NAA__P Parameter: Treatment Value: 100uM NAA vs. No Treatment
  misc_feature: MA Experiment ID: 20000445 Result: Up-regulated in Transcription
  misc_feature: MA Experiment 20000445 PARAMETER Experiment Name: At_100uM_NAA__P Parameter: Age (day) Value: 14
  misc_feature: MA Experiment 20000445 PARAMETER Experiment Name: At_100uM_NAA__P Parameter: Organism Value: A. thaliana
  misc_feature: MA Experiment 20000445 PARAMETER Experiment Name: At_100uM_NAA__P Parameter: Plant Line Value: WS
  misc_feature: MA Experiment 20000445 PARAMETER Experiment Name: At_100uM_NAA__P Parameter: Timepoint (hr) Value: 6
  misc_feature: MA Experiment 20000445 PARAMETER Experiment Name: At_100uM_NAA__P Parameter: Tissue Value: Aerial
  misc_feature: MA Experiment 20000445 PARAMETER Experiment Name: At_100uM_NAA__P Parameter: Treatment Value: 100uM NAA vs. No Treatment
  misc_feature: MA Experiment ID: 20000453 Result: Down-regulated in Transcription
  misc_feature: MA Experiment 20000453 PARAMETER Experiment Name: At_100uM_ABA_P Parameter: Age (day) Value: 15
  misc_feature: MA Experiment 20000453 PARAMETER Experiment Name: At_100uM_ABA_P Parameter: Organism Value: A. thaliana
  misc_feature: MA Experiment 20000453 PARAMETER Experiment Name: At_100uM_ABA_P Parameter: Plant Line Value: WS
  misc_feature: MA Experiment 20000453 PARAMETER Experiment Name: At_100uM_ABA_P Parameter: Timepoint (hr) Value: 24
  misc_feature: MA Experiment 20000453 PARAMETER Experiment Name: At_100uM_ABA_P Parameter: Tissue Value: Aerial
  misc_feature: MA Experiment 20000453 PARAMETER Experiment Name: At_100uM_ABA_P Parameter: Treatment Value: 100uM ABA vs. No Treatment
  misc_feature: MA Experiment ID: 20000495 Result: Down-regulated in Transcription
  misc_feature: MA Experiment 20000495 PARAMETER Experiment Name: At_Guard_Cells_P Parameter: Harvest Date Value: 8/2/2002
  misc_feature: MA Experiment 20000495 PARAMETER Experiment Name: At_Guard_Cells_P Parameter: Organism Value: A. thaliana
  misc_feature: MA Experiment 20000495 PARAMETER Experiment Name: At_Guard_Cells_P Parameter: Tissue Value: Guard Cells vs. Leaves
  misc_feature: MA Experiment ID: 20000496 Result: Down-regulated in Transcription
  misc_feature: MA Experiment 20000496 PARAMETER Experiment Name: At_Guard_Cells_P Parameter: Harvest Date Value: 7/19/2002
  misc_feature: MA Experiment 20000496 PARAMETER Experiment Name: At_Guard_Cells_P Parameter: Organism Value: Canola
  misc_feature: MA Experiment 20000496 PARAMETER Experiment Name: At_Guard_Cells_P Parameter: Tissue Value: Guard Cells vs. Leaves
  misc_feature: MA Experiment ID: 20000606 Result: Up-regulated in Transcription
  misc_feature: MA Experiment 20000606 PARAMETER Experiment Name: At_CS8548_Mutant_P Parameter: Age (day) Value: 14
  misc_feature: MA Experiment 20000606 PARAMETER Experiment Name: At_CS8548_Mutant_P Parameter: Plant Line Value: CS8548 vs. wt
  misc_feature: MA Experiment 20000606 PARAMETER Experiment Name: At_CS8548_Mutant_P Parameter: Tissue Value: Whole Plant
  misc_feature: MA Experiment ID: 20001248 Result: Up-regulated in Transcription
  misc_feature: MA Experiment 20001248 PARAMETER Experiment Name: At_Far-red-induction_P Parameter: Age (day) Value: 7
  misc_feature: MA Experiment 20001248 PARAMETER Experiment Name: At_Far-red-induction_P Parameter: Light Value: Far-red vs. White
  misc_feature: MA Experiment 20001248 PARAMETER Experiment Name: At_Far-red-induction_P Parameter: Organism Value: A. thaliana
  misc_feature: MA Experiment 20001248 PARAMETER Experiment Name: At_Far-red-induction_P Parameter: Plant Line Value: Columbia
  misc_feature: MA Experiment 20001248 PARAMETER Experiment Name: At_Far-red-induction_P Parameter: Timepoint (hr) Value: 4
  misc_feature: MA Experiment 20001248 PARAMETER Experiment Name: At_Far-red-induction_P Parameter: Tissue Value: Whole Plant
  misc_feature: MA Experiment ID: 20001450 Result: Up-regulated in Transcription
  misc_feature: MA Experiment 20001450 PARAMETER Experiment Name: At_Far-red-induction_P Parameter: Age (day) Value: 7
  misc_feature: MA Experiment 20001450 PARAMETER Experiment Name: At_Far-red-induction_P Parameter: Light Value: Far-red vs. White
  misc_feature: MA Experiment 20001450 PARAMETER Experiment Name: At_Far-red-induction_P Parameter: Organism Value: A. thaliana
  misc_feature: MA Experiment 20001450 PARAMETER Experiment Name: At_Far-red-induction_P Parameter: Plant Line Value: Columbia
  misc_feature: MA Experiment 20001450 PARAMETER Experiment Name: At_Far-red-induction_P Parameter: Timepoint (hr) Value: 8
  misc_feature: MA Experiment 20001450 PARAMETER Experiment Name: At_Far-red-induction_P Parameter: Tissue Value: Whole Plant
  misc_feature: MA Experiment ID: 20001554 Result: Down-regulated in Transcription
  misc_feature: MA Experiment 20001554 PARAMETER Experiment Name: At_Drought_Soil_Dry_P Parameter: Age (day) Value: 21
  misc_feature: MA Experiment 20001554 PARAMETER Experiment Name: At_Drought_Soil_Dry_P Parameter: Organism Value: A. thaliana
  misc_feature: MA Experiment 20001554 PARAMETER Experiment Name: At_Drought_Soil_Dry_P Parameter: Plant Line Value: WS
  misc_feature: MA Experiment 20001554 PARAMETER Experiment Name: At_Drought_Soil_Dry_P Parameter: Post Timepoint (hr) Value: None
  misc_feature: MA Experiment 20001554 PARAMETER Experiment Name: At_Drought_Soil_Dry_P Parameter: Post-Treatment Value: None
  misc_feature: MA Experiment 20001554 PARAMETER Experiment Name: At_Drought_Soil_Dry_P Parameter: Timepoint (day) Value: 7
  misc_feature: MA Experiment 20001554 PARAMETER Experiment Name: At_Drought_Soil_Dry_P Parameter: Treatment Value: Drought vs. No Drought
  misc_feature: MA Experiment ID: 20001555 Result: Down-regulated in Transcription
  misc_feature: MA Experiment 20001555 PARAMETER Experiment Name: At_Drought_Soil_Dry_P Parameter: Age (day) Value: 24
  misc_feature: MA Experiment 20001555 PARAMETER Experiment Name: At_Drought_Soil_Dry_P Parameter: Organism Value: A. thaliana
  misc_feature: MA Experiment 20001555 PARAMETER Experiment Name: At_Drought_Soil_Dry_P Parameter: Plant Line Value: WS
  misc_feature: MA Experiment 20001555 PARAMETER Experiment Name: At_Drought_Soil_Dry_P Parameter: Post Timepoint (hr) Value: None
  misc_feature: MA Experiment 20001555 PARAMETER Experiment Name: At_Drought_Soil_Dry_P Parameter: Post-Treatment Value: None
  misc_feature: MA Experiment 20001555 PARAMETER Experiment Name: At_Drought_Soil_Dry_P Parameter: Timepoint (day) Value: 10
  misc_feature: MA Experiment 20001555 PARAMETER Experiment Name: At_Drought_Soil_Dry_P Parameter: Treatment Value: Drought vs. No Drought
  misc_feature: MA Experiment ID: 20001556 Result: Down-regulated in Transcription
  misc_feature: MA Experiment 20001556 PARAMETER Experiment Name: At_Drought_Soil_Dry_P Parameter: Age (day) Value: 26
  misc_feature: MA Experiment 20001556 PARAMETER Experiment Name: At_Drought_Soil_Dry_P Parameter: Organism Value: A. thaliana
  misc_feature: MA Experiment 20001556 PARAMETER Experiment Name: At_Drought_Soil_Dry_P Parameter: Plant Line Value: WS
  misc_feature: MA Experiment 20001556 PARAMETER Experiment Name: At_Drought_Soil_Dry_P Parameter: Post Timepoint (hr) Value: None
  misc_feature: MA Experiment 20001556 PARAMETER Experiment Name: At_Drought_Soil_Dry_P Parameter: Post-Treatment Value: None
  misc_feature: MA Experiment 20001556 PARAMETER Experiment Name: At_Drought_Soil_Dry_P Parameter: Timepoint (day) Value: 12
  misc_feature: MA Experiment 20001556 PARAMETER Experiment Name: At_Drought_Soil_Dry_P Parameter: Treatment Value: Drought vs. No Drought
  misc_feature: MA Experiment ID: 20001558 Result: Down-regulated in Transcription
  misc_feature: MA Experiment 20001558 PARAMETER Experiment Name: At_Drought_Soil_Dry_P Parameter: Age (day) Value: 27
  misc_feature: MA Experiment 20001558 PARAMETER Experiment Name: At_Drought_Soil_Dry_P Parameter: Organism Value: A. thaliana
  misc_feature: MA Experiment 20001558 PARAMETER Experiment Name: At_Drought_Soil_Dry_P Parameter: Plant Line Value: WS
  misc_feature: MA Experiment 20001558 PARAMETER Experiment Name: At_Drought_Soil_Dry_P Parameter: Post Timepoint (hr) Value: 6
  misc_feature: MA Experiment 20001558 PARAMETER Experiment Name: At_Drought_Soil_Dry_P Parameter: Post-Treatment Value: Re-Water vs. No Drought
  misc_feature: MA Experiment 20001558 PARAMETER Experiment Name: At_Drought_Soil_Dry_P Parameter: Timepoint (day) Value: 13
  misc_feature: MA Experiment 20001558 PARAMETER Experiment Name: At_Drought_Soil_Dry_P Parameter: Treatment Value: Drought vs. No Drought
  misc_feature: MA Experiment ID: 20001768 Result: Up-regulated in Transcription
  misc_feature: MA Experiment 20001768 PARAMETER Experiment Name: At_Far-red-enriched-adult_P Parameter: Age (day) Value: 28
  misc_feature: MA Experiment 20001768 PARAMETER Experiment Name: At_Far-red-enriched-adult_P Parameter: Light Value: Far-red enriched vs. White
  misc_feature: MA Experiment 20001768 PARAMETER Experiment Name: At_Far-red-enriched-adult_P Parameter: Organism Value: A. thaliana
  misc_feature: MA Experiment 20001768 PARAMETER Experiment Name: At_Far-red-enriched-adult_P Parameter: Plant Line Value: Columbia
  misc_feature: MA Experiment 20001768 PARAMETER Experiment Name: At_Far-red-enriched-adult_P Parameter: Timepoint (hr) Value: 1
  misc_feature: MA Experiment 20001768 PARAMETER Experiment Name: At_Far-red-enriched-adult_P Parameter: Tissue Value: Aerial
  misc_feature: MA Experiment ID: 20001772 Result: Up-regulated in Transcription
  misc_feature: MA Experiment 20001772 PARAMETER Experiment Name: At_Far-red-enriched-adult_P Parameter: Age (day) Value: 29
  misc_feature: MA Experiment 20001772 PARAMETER Experiment Name: At_Far-red-enriched-adult_P Parameter: Light Value: Far-red enriched vs. White
  misc_feature: MA Experiment 20001772 PARAMETER Experiment Name: At_Far-red-enriched-adult_P Parameter: Organism Value: A. thaliana
  misc_feature: MA Experiment 20001772 PARAMETER Experiment Name: At_Far-red-enriched-adult_P Parameter: Plant Line Value: Columbia
  misc_feature: MA Experiment 20001772 PARAMETER Experiment Name: At_Far-red-enriched-adult_P Parameter: Timepoint (hr) Value: 24
  misc_feature: MA Experiment 20001772 PARAMETER Experiment Name: At_Far-red-enriched-adult_P Parameter: Tissue Value: Aerial
  misc_feature: MA Experiment ID: 20001773 Result: Up-regulated in Transcription
  misc_feature: MA Experiment 20001773 PARAMETER Experiment Name: At_Far-red-enriched-adult_P Parameter: Age (day) Value: 30
  misc_feature: MA Experiment 20001773 PARAMETER Experiment Name: At_Far-red-enriched-adult_P Parameter: Light Value: Far-red enriched vs. White
  misc_feature: MA Experiment 20001773 PARAMETER Experiment Name: At_Far-red-enriched-adult_P Parameter: Organism Value: A. thaliana
  misc_feature: MA Experiment 20001773 PARAMETER Experiment Name: At_Far-red-enriched-adult_P Parameter: Plant Line Value: Columbia
  misc_feature: MA Experiment 20001773 PARAMETER Experiment Name: At_Far-red-enriched-adult_P Parameter: Timepoint (hr) Value: 48
  misc_feature: MA Experiment 20001773 PARAMETER Experiment Name: At_Far-red-enriched-adult_P Parameter: Tissue Value: Aerial
  misc_feature: MA Experiment ID: 20001904 Result: Down-regulated in Transcription
  misc_feature: MA Experiment 20001904 PARAMETER Experiment Name: At_Drought_Reproduction_P Parameter: Age (day) Value: 37
  misc_feature: MA Experiment 20001904 PARAMETER Experiment Name: At_Drought_Reproduction_P Parameter: Organism Value: A. thaliana
  misc_feature: MA Experiment 20001904 PARAMETER Experiment Name: At_Drought_Reproduction_P Parameter: Plant Line Value: WS
  misc_feature: MA Experiment 20001904 PARAMETER Experiment Name: At_Drought_Reproduction_P Parameter: Timepoint (day) Value: 7
  misc_feature: MA Experiment 20001904 PARAMETER Experiment Name: At_Drought_Reproduction_P Parameter: Tissue Value: Rosettes
  misc_feature: MA Experiment 20001904 PARAMETER Experiment Name: At_Drought_Reproduction_P Parameter: Treatment Value: Drought vs. No Drought
  misc_feature: MA Experiment ID: 20001905 Result: Down-regulated in Transcription
  misc_feature: MA Experiment 20001905 PARAMETER Experiment Name: At_Drought_Reproduction_P Parameter: Age (day) Value: 40
  misc_feature: MA Experiment 20001905 PARAMETER Experiment Name: At_Drought_Reproduction_P Parameter: Organism Value: A. thaliana
  misc_feature: MA Experiment 20001905 PARAMETER Experiment Name: At_Drought_Reproduction_P Parameter: Plant Line Value: WS
  misc_feature: MA Experiment 20001905 PARAMETER Experiment Name: At_Drought_Reproduction_P Parameter: Timepoint (day) Value: 10
  misc_feature: MA Experiment 20001905 PARAMETER Experiment Name: At_Drought_Reproduction_P Parameter: Tissue Value: Rosettes
  misc_feature: MA Experiment 20001905 PARAMETER Experiment Name: At_Drought_Reproduction_P Parameter: Treatment Value: Drought vs. No Drought
  misc_feature: MA Experiment ID: 20001906 Result: Down-regulated in Transcription
  misc_feature: MA Experiment 20001906 PARAMETER Experiment Name: At_Drought_Reproduction_P Parameter: Age (day) Value: 35
  misc_feature: MA Experiment 20001906 PARAMETER Experiment Name: At_Drought_Reproduction_P Parameter: Organism Value: A. thaliana
  misc_feature: MA Experiment 20001906 PARAMETER Experiment Name: At_Drought_Reproduction_P Parameter: Plant Line Value: WS
  misc_feature: MA Experiment 20001906 PARAMETER Experiment Name: At_Drought_Reproduction_P Parameter: Timepoint (day) Value: 5
  misc_feature: MA Experiment 20001906 PARAMETER Experiment Name: At_Drought_Reproduction_P Parameter: Tissue Value: Siliques
  misc_feature: MA Experiment 20001906 PARAMETER Experiment Name: At_Drought_Reproduction_P Parameter: Treatment Value: Drought vs. No Drought
  misc_feature: MA Experiment ID: 20001907 Result: Down-regulated in Transcription
  misc_feature: MA Experiment 20001907 PARAMETER Experiment Name: At_Drought_Reproduction_P Parameter: Age (day) Value: 37
  misc_feature: MA Experiment 20001907 PARAMETER Experiment Name: At_Drought_Reproduction_P Parameter: Organism Value: A. thaliana
  misc_feature: MA Experiment 20001907 PARAMETER Experiment Name: At_Drought_Reproduction_P Parameter: Plant Line Value: WS
  misc_feature: MA Experiment 20001907 PARAMETER Experiment Name: At_Drought_Reproduction_P Parameter: Timepoint (day) Value: 7
  misc_feature: MA Experiment 20001907 PARAMETER Experiment Name: At_Drought_Reproduction_P Parameter: Tissue Value: Siliques
  misc_feature: MA Experiment 20001907 PARAMETER Experiment Name: At_Drought_Reproduction_P Parameter: Treatment Value: Drought vs. No Drought
  misc_feature: MA Experiment ID: 20001910 Result: Down-regulated in Transcription
  misc_feature: MA Experiment 20001910 PARAMETER Experiment Name: At_Drought_Reproduction_P Parameter: Age (day) Value: 37
  misc_feature: MA Experiment 20001910 PARAMETER Experiment Name: At_Drought_Reproduction_P Parameter: Organism Value: A. thaliana
  misc_feature: MA Experiment 20001910 PARAMETER Experiment Name: At_Drought_Reproduction_P Parameter: Plant Line Value: WS
  misc_feature: MA Experiment 20001910 PARAMETER Experiment Name: At_Drought_Reproduction_P Parameter: Timepoint (day) Value: 7
  misc_feature: MA Experiment 20001910 PARAMETER Experiment Name: At_Drought_Reproduction_P Parameter: Tissue Value: Flowers
  misc_feature: MA Experiment 20001910 PARAMETER Experiment Name: At_Drought_Reproduction_P Parameter: Treatment Value: Drought vs. No Drought
  misc_feature: MA Experiment ID: 20001911 Result: Down-regulated in Transcription
  misc_feature: MA Experiment 20001911 PARAMETER Experiment Name: At_Drought_Reproduction_P Parameter: Age (day) Value: 40
  misc_feature: MA Experiment 20001911 PARAMETER Experiment Name: At_Drought_Reproduction_P Parameter: Organism Value: A. thaliana
  misc_feature: MA Experiment 20001911 PARAMETER Experiment Name: At_Drought_Reproduction_P Parameter: Plant Line Value: WS
  misc_feature: MA Experiment 20001911 PARAMETER Experiment Name: At_Drought_Reproduction_P Parameter: Timepoint (day) Value: 10
  misc_feature: MA Experiment 20001911 PARAMETER Experiment Name: At_Drought_Reproduction_P Parameter: Tissue Value: Flowers
  misc_feature: MA Experiment 20001911 PARAMETER Experiment Name: At_Drought_Reproduction_P Parameter: Treatment Value: Drought vs. No Drought
tttcataattgtatcaaattgtgagaggaaaaaaagaagttcaagaaatggagaaggaaggactcgggcttgagataacggagctgagattggggcttccggggagagatgtggcagagaagatgatgaagaagagagctttcacggagatgaatatgacgtcgtcgggtagtaatagtgatcaatgtgaaagcggcgtcgtttcatctggtggtgacgctgagaaggttaatgattcgccggcggcgaaaagccaggtggtggggtggccaccggtttgttcttaccggaagaaaaacagctgtaaggaagcttcgaccacgaaagtggggttagggtatgtgaaagtgagcatggatggtgtgccttatttgaggaagatggatcttggttcgagccaaggctatgatgatctagcctttgctcttgataagctcttcggtttccgtggcatcggtgtggccttgaaagatggtgacaactgcgaatacgttaccatatacgaagacaaagatggagactggatgctcgccggtgatgtaccttgggggatgtttctagagtcatgcaagaggttgagaataatgaaaagatcggatgctaccgggtttgggctgcagcctagaggagtagacgagtgatgatgacttgaacaagaagcaaggagctggttcattaatttaatcttaaacttgatcatcaagatcctttagaacatttttcctattcatgttatataaatatatatgttatagtatattattttgcaacaaaatttcatgttatggttttgcataattatcttcagaaagacagctatatatatatacactacttgtttcttgagtgttgagttaaaacattaatctgtttcaaaatttattgttatttcggatctatatatgtgtgtagaaacatatgtaataagtatccattatt

SEQ ID NO: 99684 - protein, 197 aa, Arabidopsis thaliana; identical to SEQ ID NO: 38104
  peptide (1)..(197): Ceres Seq. ID no. 13603452
  misc_feature (6)..(191): Pfam Name: AUX/IAA family Pfam Description: AUX/IAA family
  misc_feature (1)..(197): Homolog of NCBI NO: 15232612 NR Description: auxin-responsive protein IAA19 (Indoleacetic
  misc_feature (1)..(197): Homolog of NCBI NO: 21618019 NR Description: early auxin-induced protein IAA19 [Arabidopsis
  misc_feature (53)..(197): Homolog of NCBI NO: 2618727 NR Description: IAA19 [Arabidopsis thaliana]
  misc_feature (1)..(194): Homolog of NCBI NO: 114733 NR Description: AUXIN-INDUCED PROTEIN AUX22 >gi|81758|pir||B28993
  misc_feature (1)..(191): Homolog of NCBI NO: 15219101 NR Description: auxin-responsive protein IAA6 (Indoleacetic
  misc_feature (1)..(191): Homolog of NCBI NO: 21553490 NR Description: putative IAA6 protein [Arabidopsis thaliana]
  misc_feature (1)..(191): Homolog of NCBI NO: 1363486 NR Description: auxin-induced protein IAA6 - Arabidopsis thaliana
  misc_feature (1)..(194): Homolog of NCBI NO: 416640 NR Description: Auxin-induced protein 22A (Indole-3-acetic acid
  misc_feature (43)..(194): Homolog of NCBI NO: 11131101 NR Description: Auxin-induced protein 22C (Indole-3-acetic acid
  misc_feature (46)..(194): Homolog of NCBI NO: 1352058 NR Description: AUXIN-INDUCED PROTEIN IAA6 >gi|629634|pir||S39078

SEQ ID NO: 99685 - protein, 172 aa, Arabidopsis thaliana; identical to SEQ ID NO: 38105
  peptide (1)..(172): Ceres Seq. ID no. 13603453
  misc_feature (1)..(166): Pfam Name: AUX/IAA family Pfam Description: AUX/IAA family
  misc_feature (1)..(172): Homolog of NCBI NO: 15232612 NR Description: auxin-responsive protein IAA19 (Indoleacetic
  misc_feature (1)..(172): Homolog of NCBI NO: 21618019 NR Description: early auxin-induced protein IAA19 [Arabidopsis
  misc_feature (28)..(172): Homolog of NCBI NO: 2618727 NR Description: IAA19 [Arabidopsis thaliana]
  misc_feature (1)..(169): Homolog of NCBI NO: 114733 NR Description: AUXIN-INDUCED PROTEIN AUX22 >gi|81758|pir||B28993
  misc_feature (1)..(166): Homolog of NCBI NO: 15219101 NR Description: auxin-responsive protein IAA6 (Indoleacetic
  misc_feature (1)..(166): Homolog of NCBI NO: 21553490 NR Description: putative IAA6 protein [Arabidopsis thaliana]
  misc_feature (1)..(166): Homolog of NCBI NO: 1363486 NR Description: auxin-induced protein IAA6 - Arabidopsis thaliana
  misc_feature (1)..(169): Homolog of NCBI NO: 416640 NR Description: Auxin-induced protein 22A (Indole-3-acetic acid
  misc_feature (18)..(169): Homolog of NCBI NO: 11131101 NR Description: Auxin-induced protein 22C (Indole-3-acetic acid
  misc_feature (21)..(169): Homolog of NCBI NO: 1352058 NR Description: AUXIN-INDUCED PROTEIN IAA6 >gi|629634|pir||S39078

SEQ ID NO: 99686 - protein, 171 aa, Arabidopsis thaliana; identical to SEQ ID NO: 38106
  peptide (1)..(171): Ceres Seq. ID no. 13603454
  misc_feature (1)..(165): Pfam Name: AUX/IAA family Pfam Description: AUX/IAA family
  misc_feature (1)..(171): Homolog of NCBI NO: 15232612 NR Description: auxin-responsive protein IAA19 (Indoleacetic
  misc_feature (1)..(171): Homolog of NCBI NO: 21618019 NR Description: early auxin-induced protein IAA19 [Arabidopsis
  misc_feature (27)..(171): Homolog of NCBI NO: 2618727 NR Description: IAA19 [Arabidopsis thaliana]
  misc_feature (1)..(168): Homolog of NCBI NO: 114733 NR Description: AUXIN-INDUCED PROTEIN AUX22 >gi|81758|pir||B28993
  misc_feature (1)..(165): Homolog of NCBI NO: 15219101 NR Description: auxin-responsive protein IAA6 (Indoleacetic
  misc_feature (1)..(165): Homolog of NCBI NO: 21553490 NR Description: putative IAA6 protein [Arabidopsis thaliana]
  misc_feature (1)..(165): Homolog of NCBI NO: 1363486 NR Description: auxin-induced protein IAA6 - Arabidopsis thaliana
  misc_feature (1)..(168): Homolog of NCBI NO: 416640 NR Description: Auxin-induced protein 22A (Indole-3-acetic acid
  misc_feature (17)..(168): Homolog of NCBI NO: 11131101 NR Description: Auxin-induced protein 22C (Indole-3-acetic acid
  misc_feature (20)..(168): Homolog of NCBI NO: 1352058 NR Description: AUXIN-INDUCED PROTEIN IAA6 >gi|629634|pir||S39078

SEQ ID NO: 99687 - DNA, 2143 bp, Arabidopsis thaliana
  misc_feature (1)..(2143): Ceres Seq. ID no. 13603455
  misc_feature: MA Experiment ID: 20000235 Result: Down-regulated in Transcription
  misc_feature: MA Experiment 20000235 PARAMETER Experiment Name: At_Siliques_P Parameter: Age (day) Value: 21
  misc_feature: MA Experiment 20000235 PARAMETER Experiment Name: At_Siliques_P Parameter: Organism Value: A. thaliana
  misc_feature: MA Experiment 20000235 PARAMETER Experiment Name: At_Siliques_P Parameter: Plant Line Value: WS
  misc_feature: MA Experiment 20000235 PARAMETER Experiment Name: At_Siliques_P Parameter: Tissue Value: 5-10mm Siliques vs. Whole Plant
  misc_feature: MA Experiment ID: 20001559 Result: Up-regulated in Transcription
  misc_feature: MA Experiment 20001559 PARAMETER Experiment Name: At_Drought_Soil_Dry_P Parameter: Age (day) Value: 28
  misc_feature: MA Experiment 20001559 PARAMETER Experiment Name: At_Drought_Soil_Dry_P Parameter: Organism Value: A. thaliana
  misc_feature: MA Experiment 20001559 PARAMETER Experiment Name: At_Drought_Soil_Dry_P Parameter: Plant Line Value: WS
  misc_feature: MA Experiment 20001559 PARAMETER Experiment Name: At_Drought_Soil_Dry_P Parameter: Post Timepoint (hr) Value: 29
  misc_feature: MA Experiment 20001559 PARAMETER Experiment Name: At_Drought_Soil_Dry_P Parameter: Post-Treatment Value: Re-Water vs. No Drought
  misc_feature: MA Experiment 20001559 PARAMETER Experiment Name: At_Drought_Soil_Dry_P Parameter: Timepoint (day) Value: 14
  misc_feature: MA Experiment 20001559 PARAMETER Experiment Name: At_Drought_Soil_Dry_P Parameter: Treatment Value: Drought vs. No Drought
gagccgctgagaatttggtccccttggcacgtataaaccctagcagagacattaaaccctgaaagtaattagggatcactgttctccggctccggcgaaaaaatccctcgaaatcgatcctaacctcaattgattgaaggaagttatgtattcgctttcgaggattctccaaaggagtcaaagatataactttgcaccttcttcgtttggtgcggtcagtaaattagaagtatcaagtggtggtgataaagaacgggtctttaaatcatttggattgatttatagcaaacctcaaggtttagtcagactttattccgcaagagatgtgttttcacggttctttggcatccacaagctttcttctatagctgatgctaaagataaaggagatgaggtagttagggaagaggagctgtctgaatcagaggaggcggttcctgtttctggggatgtaccagagggagttgttgatgatgattctttgttcgagcctgaacttggtagtgacaatgatgatcttgaaattgaagagaagcattcgaaagatggtgggaaaccaactaagaaaagaggtcaatctgagctgtacgaatccattgttgcttataaatcagtgaaacatgttcttgaaaaatgggtcaaagaaggaaaagatttgagtcaagctgaggttactcttgctatacacaatctgcgtaaacgcaaatcctatgctatgtgtttgcagttgtgggagtggttgggagctaatacgcagtttgagttcacagaggcaaattatgcttctcagttggatttggtggccaaggtacatagtttacaaaaagctgaaatctttttgaaagatattccagaatcttctaggggagaagtagtatacagaaccctgctggcaaattgtgtacttaagcatcatgtaaataaagctgaagacattttcaacaaaatgaaagagctaaaatttccaacaagtgtgtttgcttgcaaccagctgcttctcctctacagtatgcatgatagaaagaagataagtgatgttttgttgctaatggagagagaaaacatcaagccgagtcgtgctacctatcattttttaatcaatagtaaaggtttagccggagacataactggaatggagaagatcgtggagacaattaaggaagaaggcatcgaactagatcctgaactgcagtctattctggctaagtactacataagagcggggcttaaagaaagagcacaagaccttatgaaggagatagaagggaaaggtttgcaacaaactccatgggtgtgccggtcattactcccactttatgcagacataggagacagtgacaatgtgagaagactgagtaggtttgttgatcaaaatccgagatacgataattgcatttctgccattaaagcatggggaaagctgaaggaagtcgaagaagcagaggcagtgtttgagagacttgtggagaaatacaaaattttccctatgatgccatattttgccctcatggagatatacacagagaacaagatgctagcaaaaggcagagatctggttaaaagaatgggaaatgcagggattgcgattgggccgtcgacatggcacgcgcttgtgaagctatacatcaaagcaggagaagttggaaaagctgagttgatattgaacagagctacaaaggataataagatgagacctatgttcactacttacatggcgattcttgaagaatatgcaaaaagaggcgatgttcataacacagagaaggtattcatgaaaatgaaaagggcaagctatgcagctcagcttatgcagtatgaaaccgtgctcctggcttatatcaacgccaaaactcctgcttacgggatgattgagaggatgaaggcagacaatgtgttcccgaacaagagtctagctgcgaaactggctcaggttaatccgtttaaaaagtgtccagtgtctgttttacttgacatataacgataatcatcttatgtattgagctgttaagtgtttgttctggttgcttccaagctaggaaataataaacagaggattcgtttttcttccaaagtttctcatttttgagtttgtgttcctgtggttttttgtaagtgacataaactggaataaaattgaactgga

SEQ ID NO: 99688 - protein, 610 aa, Arabidopsis thaliana; identical to SEQ ID NO: 26610
  peptide (1)..(610): Ceres Seq. ID no. 13603456
  misc_feature (243)..(277): Pfam Name: PPR repeat Pfam Description: PPR repeat
  misc_feature (1)..(609): Homolog of NCBI NO: 15220095 NR Description: DNA binding protein, putative [Arabidopsis
  misc_feature (25)..(609): Homolog of NCBI NO: 15218196 NR Description: DNA-binding protein, putative [Arabidopsis >gi|5103846|gb|AAD39676.1|AC007591_41 F9L1.43 [Arabidopsis
  misc_feature (75)..(609): Homolog of NCBI NO: 6958202 NR Description: DNA-binding protein [Triticum aestivum]
  misc_feature (75)..(609): Homolog of NCBI NO: 34903362 NR Description: unnamed protein product [Oryza sativa (japonica group)] >gi|6498438|dbj|BAA87841.1| unnamed protein product
  misc_feature (99)..(593): Homolog of NCBI NO: 34900334 NR Description: P0592C06.16 [Oryza sativa (japonica
  misc_feature (240)..(593): Homolog of NCBI NO: 34394024 NR Description: putative DNA-binding protein [Oryza sativa
  misc_feature (144)..(600): Homolog of NCBI NO: 34905294 NR Description: putative DNA-binding protein [Oryza sativa
  misc_feature (132)..(597): Homolog of NCBI NO: 15219808 NR Description: pentatricopeptide (PPR) repeat-containing protein
  misc_feature (115)..(583): Homolog of NCBI NO: 15235508 NR Description: pentatricopeptide (PPR) repeat-containing protein
  misc_feature (115)..(583): Homolog of NCBI NO: 17064738 NR Description: Unknown protein [Arabidopsis thaliana]

SEQ ID NO: 99689 - protein, 420 aa, Arabidopsis thaliana; identical to SEQ ID NO: 26611
  peptide (1)..(420): Ceres Seq. ID no. 13603457
  misc_feature (53)..(87): Pfam Name: PPR repeat Pfam Description: PPR repeat
  misc_feature (1)..(419): Homolog of NCBI NO: 15220095 NR Description: DNA binding protein, putative [Arabidopsis
  misc_feature (1)..(419): Homolog of NCBI NO: 15218196 NR Description: DNA-binding protein, putative [Arabidopsis >gi|5103846|gb|AAD39676.1|AC007591_41 F9L1.43 [Arabidopsis
  misc_feature (1)..(419): Homolog of NCBI NO: 6958202 NR Description: DNA-binding protein [Triticum aestivum]
  misc_feature (1)..(419): Homolog of NCBI NO: 34903362 NR Description: unnamed protein product [Oryza sativa (japonica group)] >gi|6498438|dbj|BAA87841.1| unnamed protein product
  misc_feature (1)..(403): Homolog of NCBI NO: 34900334 NR Description: P0592C06.16 [Oryza sativa (japonica
  misc_feature (50)..(403): Homolog of NCBI NO: 34394024 NR Description: putative DNA-binding protein [Oryza sativa
  misc_feature (1)..(410): Homolog of NCBI NO: 34905294 NR Description: putative DNA-binding protein [Oryza sativa
  misc_feature (1)..(407): Homolog of NCBI NO: 15219808 NR Description: pentatricopeptide (PPR) repeat-containing protein
  misc_feature (1)..(393): Homolog of NCBI NO: 15235508 NR Description: pentatricopeptide (PPR) repeat-containing protein
  misc_feature (1)..(393): Homolog of NCBI NO: 17064738 NR Description: Unknown protein [Arabidopsis thaliana]

SEQ ID NO: 99690 - protein, 343 aa, Arabidopsis thaliana; identical to SEQ ID NO: 26612
  peptide (1)..(343): Ceres Seq. ID no. 13603458
  misc_feature (1)..(342): Homolog of NCBI NO: 15220095 NR Description: DNA binding protein, putative [Arabidopsis
  misc_feature (1)..(342): Homolog of NCBI NO: 15218196 NR Description: DNA-binding protein, putative [Arabidopsis >gi|5103846|gb|AAD39676.1|AC007591_41 F9L1.43 [Arabidopsis
  misc_feature (1)..(342): Homolog of NCBI NO: 6958202 NR Description: DNA-binding protein [Triticum aestivum]
  misc_feature (1)..(342): Homolog of NCBI NO: 34903362 NR Description: unnamed protein product [Oryza sativa (japonica group)] >gi|6498438|dbj|BAA87841.1| unnamed protein product
  misc_feature (1)..(326): Homolog of NCBI NO: 34900334 NR Description: P0592C06.16 [Oryza sativa (japonica
  misc_feature (1)..(326): Homolog of NCBI NO: 34394024 NR Description: putative DNA-binding protein [Oryza sativa
  misc_feature (1)..(333): Homolog of NCBI NO: 34905294 NR Description: putative DNA-binding protein [Oryza sativa
  misc_feature (1)..(330): Homolog of NCBI NO: 15219808 NR Description: pentatricopeptide (PPR) repeat-containing protein
  misc_feature (1)..(316): Homolog of NCBI NO: 15235508 NR Description: pentatricopeptide (PPR) repeat-containing protein
  misc_feature (1)..(316): Homolog of NCBI NO: 17064738 NR Description: Unknown protein [Arabidopsis thaliana]

SEQ ID NO: 99691 - DNA, 1540 bp, Arabidopsis thaliana
  misc_feature (1)..(1540): Ceres Seq. ID no. 13603459
  misc_feature: MA Experiment ID: 108434 Result: Up-regulated in Transcription
  misc_feature: MA Experiment 108434 PARAMETER Experiment Name: At_Root_Tips_cDNA_P Parameter: Tissue Value: Root Tips
  misc_feature: MA Experiment ID: 108577 Result: Down-regulated in Transcription
  misc_feature: MA Experiment 108577 PARAMETER Experiment Name: At_42deg_Heat_cDNA_P Parameter: Temperature (deg C) Value: 42 vs. 22
  misc_feature: MA Experiment 108577 PARAMETER Experiment Name: At_42deg_Heat_cDNA_P Parameter: Timepoint (hr) Value: 6
  misc_feature: MA Experiment 108577 PARAMETER Experiment Name: At_42deg_Heat_cDNA_P Parameter: Tissue Value: Aerial
  misc_feature: MA Experiment ID: 20000111 Result: Down-regulated in Transcription
  misc_feature: MA Experiment 20000111 PARAMETER Experiment Name: At_42deg_Heat_cDNA_P Parameter: Temperature (deg C) Value: 42 vs. 22
  misc_feature: MA Experiment 20000111 PARAMETER Experiment Name: At_42deg_Heat_cDNA_P Parameter: Timepoint (hr) Value: 6
  misc_feature: MA Experiment 20000111 PARAMETER Experiment Name: At_42deg_Heat_cDNA_P Parameter: Tissue Value: Aerial
  misc_feature: MA Experiment ID: 20000113 Result: Down-regulated in Transcription
  misc_feature: MA Experiment 20000113 PARAMETER Experiment Name: At_42deg_Heat_cDNA_P Parameter: Temperature (deg C) Value: 42 vs. 22
  misc_feature: MA Experiment 20000113 PARAMETER Experiment Name: At_42deg_Heat_cDNA_P Parameter: Timepoint (hr) Value: 8
  misc_feature: MA Experiment 20000113 PARAMETER Experiment Name: At_42deg_Heat_cDNA_P Parameter: Tissue Value: Aerial
  misc_feature: MA Experiment ID: 20000171 Result: Down-regulated in Transcription
  misc_feature: MA Experiment 20000171 PARAMETER Experiment Name: At_42deg_Heat_P Parameter: Age (day) Value: 14
  misc_feature: MA Experiment 20000171 PARAMETER Experiment Name: At_42deg_Heat_P Parameter: Organism Value: A. thaliana
  misc_feature: MA Experiment 20000171 PARAMETER Experiment Name: At_42deg_Heat_P Parameter: Plant Line Value: WS
  misc_feature: MA Experiment 20000171 PARAMETER Experiment Name: At_42deg_Heat_P Parameter: Temperature (deg C) Value: 42 vs. 22
  misc_feature: MA Experiment 20000171 PARAMETER Experiment Name: At_42deg_Heat_P Parameter: Timepoint (hr) Value: 1
  misc_feature: MA Experiment 20000171 PARAMETER Experiment Name: At_42deg_Heat_P Parameter: Tissue Value: Aerial
  misc_feature: MA Experiment ID: 20000173 Result: Down-regulated in Transcription
  misc_feature: MA Experiment 20000173 PARAMETER Experiment Name: At_42deg_Heat_P Parameter: Age (day) Value: 14
  misc_feature: MA Experiment 20000173 PARAMETER Experiment Name: At_42deg_Heat_P Parameter: Organism Value: A. thaliana
  misc_feature: MA Experiment 20000173 PARAMETER Experiment Name: At_42deg_Heat_P Parameter: Plant Line Value: WS
  misc_feature: MA Experiment 20000173 PARAMETER Experiment Name: At_42deg_Heat_P Parameter: Temperature (deg C) Value: 42 vs. 22
  misc_feature: MA Experiment 20000173 PARAMETER Experiment Name: At_42deg_Heat_P Parameter: Timepoint (hr) Value: 6
  misc_feature: MA Experiment 20000173 PARAMETER Experiment Name: At_42deg_Heat_P Parameter: Tissue Value: Aerial
  misc_feature: MA Experiment ID: 20000179 Result: Up-regulated in Transcription
  misc_feature: MA Experiment 20000179 PARAMETER Experiment Name: At_Germinating_Seeds_P Parameter: Age (hr) Value: 6 vs. 0
  misc_feature: MA Experiment 20000179 PARAMETER Experiment Name: At_Germinating_Seeds_P Parameter: Tissue Value: Germinating Seeds
  misc_feature: MA Experiment ID: 20000180 Result: Up-regulated in Transcription
  misc_feature: MA Experiment 20000180 PARAMETER Experiment Name: At_Germinating_Seeds_P Parameter: Age (hr) Value: 24 vs. 0
  misc_feature: MA Experiment 20000180 PARAMETER Experiment Name: At_Germinating_Seeds_P Parameter: Tissue Value: Germinating Seeds
actttcttcttcgattagccacttttttttcttttgtaattttcctttcttttttttttcttttgaattttcgggaagcagcatttccactggagctgcaaaatcttcctatcaaaattatagatcgatccaagttttagattcgagaattattttctccaaattagatttatatatcaaaaggaatcgaaaatagacagcaatttttgttttgtcggatcgtattgaatcagctgtgaattttagcgccaatttaaccactgaatcgtttgattagaagctaagatttggtcttacgatcgatctaagtagggttcttcttcttaagtgtgtgttttgttaaaattagtaaagagagatggagaagaagaaagtcgcgactccgctagtgtgccatggccattcgagacctgttgtggatttgttctacagtccaatcactcctgatggtttcttcctcatcagcgcaagtaaagattctcaaccaatgttgagaaatggggaaactggagattggattggtacatttgaaggtcataaaggtgctgtgtggagttcttgtcttgataacaatgctttacgtgcagcttctgcatctgctgatttttcagcgaagctttgggatgctttgactggggatgtcttgcattcttttgagcacaagcatattgttcgagcatgcgccttctctcaggatacgaaatatctaatcacaggaggatttgagaaaattcttcgtgttttcgacttgaatcgcttggatgcacctcctacagaaattgataaatctcctggttctatcagaacactaacatggcttcacggtgatcaaacaatattaagttcttgcactgatattggtggtgtgaggttatgggatgtgaggagtggcaaaatagtgcaaactctagaaaccaagtctcctgtcaccagtgctgaagtgagtcaagatggacggtatataacaactgccgatgggtcaactgttaaattttgggatgcaaatcattttggactagtgaaaagttacgacatgccctgcaatatcgaatctgcatcgcttgagccaaaatctggcaacaaattcgttgctggtggagaagatatgtgggttcgactctttgatttccacaccggaaaggagattggatgcaacaagggacatcatggtccggttcactgtgtgagatttgcaccaacaggtgagtcttatgcttcagggtctgaagatggtacaatcagaatttggcaaactggaccggtgaatcctgaagagatcagcgagtcaaagccgaagcagagtgtggatgaggttgctcgtaagattgaaggctttcacattaacaaggaaggaaaaaccgcagagaaaccatctgatgcttaaaccaagaaaagaaccaagaaaaatggctgcttctctttgtcttcttactgtgtttttacttccagactgaatatacggaaattcaaaacaagtgtttgaaaaacagtcgttgtcaatcttcattcgagtcaagtttatggatgtggctgaaaattt

SEQ ID NO: 99692 - protein, 341 aa, Arabidopsis thaliana; identical to SEQ ID NO: 38690
  peptide (1)..(341): Ceres Seq. ID no. 13603460
  misc_feature (1)..(341): Homolog of NCBI NO: 18400838 NR Description: transducin / WD-40 repeat protein family
  misc_feature (1)..(340): Homolog of NCBI NO: 30695318 NR Description: transducin / WD-40 repeat protein family
  misc_feature (6)..(336): Homolog of NCBI NO: 18394249 NR Description: transducin / WD-40 repeat protein family thaliana] >gi|5103845|gb|AAD39675.1|AC007591_40 Strong similarity
  misc_feature (1)..(263): Homolog of NCBI NO: 15219076 NR Description: unknown protein; protein id: At1g52730.1
  misc_feature (8)..(299): Homolog of NCBI NO: 29437263 NR Description: Similar to serine/threonine kinase receptor
  misc_feature (8)..(299): Homolog of NCBI NO: 12667270 NR Description: serine-threonine kinase receptor-associated
  misc_feature (8)..(337): Homolog of NCBI NO: 6755682 NR Description: serine/threonine kinase receptor associated
  misc_feature (8)..(340): Homolog of NCBI NO: 4519417 NR Description: WD-40 repeat protein [Homo sapiens]
  misc_feature (8)..(340): Homolog of NCBI NO: 12643951 NR Description: UNR-interacting protein (WD-40 repeat protein
  misc_feature (8)..(340): Homolog of NCBI NO: 20149592 NR Description: unr-interacting protein [Homo sapiens]

SEQ ID NO: 99693 - protein, 298 aa, Arabidopsis thaliana; identical to SEQ ID NO: 38691
  peptide (1)..(298): Ceres Seq. ID no. 13603461
  misc_feature (1)..(298): Homolog of NCBI NO: 18400838 NR Description: transducin / WD-40 repeat protein family
  misc_feature (1)..(297): Homolog of NCBI NO: 30695318 NR Description: transducin / WD-40 repeat protein family
  misc_feature (1)..(293): Homolog of NCBI NO: 18394249 NR Description: transducin / WD-40 repeat protein family thaliana] >gi|5103845|gb|AAD39675.1|AC007591_40 Strong similarity
  misc_feature (1)..(220): Homolog of NCBI NO: 15219076 NR Description: unknown protein; protein id: At1g52730.1
  misc_feature (1)..(256): Homolog of NCBI NO: 29437263 NR Description: Similar to serine/threonine kinase receptor
  misc_feature (1)..(256): Homolog of NCBI NO: 12667270 NR Description: serine-threonine kinase receptor-associated
  misc_feature (1)..(294): Homolog of NCBI NO: 6755682 NR Description: serine/threonine kinase receptor associated
  misc_feature (1)..(297): Homolog of NCBI NO: 4519417 NR Description: WD-40 repeat protein [Homo sapiens]
  misc_feature (1)..(297): Homolog of NCBI NO: 12643951 NR Description: UNR-interacting protein (WD-40 repeat protein
  misc_feature (1)..(297): Homolog of NCBI NO: 20149592 NR Description: unr-interacting protein [Homo sapiens]

SEQ ID NO: 99694 - DNA, 912 bp, Arabidopsis thaliana
  misc_feature (1)..(912): Ceres Seq. ID no. 13603462
  misc_feature: MA Experiment ID: 108434 Result: Up-regulated in Transcription
  misc_feature: MA Experiment 108434 PARAMETER Experiment Name: At_Root_Tips_cDNA_P Parameter: Tissue Value: Root Tips
  misc_feature: MA Experiment ID: 108435 Result: Up-regulated in Transcription
  misc_feature: MA Experiment 108435 PARAMETER Experiment Name: At_stm_Mutants_cDNA_P Parameter: Plant Line Value: wt Landsburg vs stm
  misc_feature: MA Experiment 108435 PARAMETER Experiment Name: At_stm_Mutants_cDNA_P Parameter: Tissue Value: Shoot Apical Meristem Region
  misc_feature: MA Experiment ID: 108464 Result: Down-regulated in Transcription
  misc_feature: MA Experiment 108464 PARAMETER Experiment Name: At_Germinating_Seeds_cDNA_P Parameter: Age (day) Value: 4 vs. 0
  misc_feature: MA Experiment 108464 PARAMETER Experiment Name: At_Germinating_Seeds_cDNA_P Parameter: Tissue Value: Germinating Seeds
  misc_feature: MA Experiment ID: 108576 Result: Down-regulated in Transcription
  misc_feature: MA Experiment 108576 PARAMETER Experiment Name: At_42deg_Heat_cDNA_P Parameter: Temperature (deg C) Value: 42 vs. 22
  misc_feature: MA Experiment 108576 PARAMETER Experiment Name: At_42deg_Heat_cDNA_P Parameter: Timepoint (hr) Value: 1
  misc_feature: MA Experiment 108576 PARAMETER Experiment Name: At_42deg_Heat_cDNA_P Parameter: Tissue Value: Aerial
  misc_feature: MA Experiment ID: 108577 Result: Down-regulated in Transcription
  misc_feature: MA Experiment 108577 PARAMETER Experiment Name: At_42deg_Heat_cDNA_P Parameter: Temperature (deg C) Value: 42 vs. 22
  misc_feature: MA Experiment 108577 PARAMETER Experiment Name: At_42deg_Heat_cDNA_P Parameter: Timepoint (hr) Value: 6
  misc_feature: MA Experiment 108577 PARAMETER Experiment Name: At_42deg_Heat_cDNA_P Parameter: Tissue Value: Aerial
  misc_feature: MA Experiment ID: 108594 Result: Down-regulated in Transcription
  misc_feature: MA Experiment 108594 PARAMETER Experiment Name: At_Ler-rhl_Root_cDNA_P Parameter: Plant Line Value: null
  misc_feature: MA Experiment ID: 108668 Result: Down-regulated in Transcription
  misc_feature: MA Experiment 108668 PARAMETER Experiment Name: At_2mM_SA_cDNA_P Parameter: Plant Line Value: WS
  misc_feature: MA Experiment 108668 PARAMETER Experiment Name: At_2mM_SA_cDNA_P Parameter: Timepoint (hr) Value: 6
  misc_feature: MA Experiment 108668 PARAMETER Experiment Name: At_2mM_SA_cDNA_P Parameter: Treatment Value: 2mM SA vs. No Treatment
  misc_feature: MA Experiment ID: 20000069 Result: Down-regulated in Transcription
  misc_feature: MA Experiment 20000069 PARAMETER Experiment Name: At_100uM_ABA_Mutants_cDNA_P Parameter: Plant Line Value: CS23
  misc_feature: MA Experiment 20000069 PARAMETER Experiment Name: At_100uM_ABA_Mutants_cDNA_P Parameter: Timepoint (hr) Value: 6
  misc_feature: MA Experiment 20000069 PARAMETER Experiment Name: At_100uM_ABA_Mutants_cDNA_P Parameter: Tissue Value: Aerial
  misc_feature: MA Experiment 20000069 PARAMETER Experiment Name: At_100uM_ABA_Mutants_cDNA_P Parameter: Treatment Value: 100uM ABA vs. No Treatment
  misc_feature: MA Experiment ID: 20000093 Result: Down-regulated in Transcription
  misc_feature: MA Experiment 20000093 PARAMETER Experiment Name: At_42deg_Heat_cDNA_P Parameter: Temperature (deg C) Value: 42 vs. 22
  misc_feature: MA Experiment 20000093 PARAMETER Experiment Name: At_42deg_Heat_cDNA_P Parameter: Timepoint (hr) Value: 0.5
  misc_feature: MA Experiment 20000093 PARAMETER Experiment Name: At_42deg_Heat_cDNA_P Parameter: Tissue Value: Aerial
  misc_feature: MA Experiment ID: 20000111 Result: Down-regulated in Transcription
  misc_feature: MA Experiment 20000111 PARAMETER Experiment Name: At_42deg_Heat_cDNA_P Parameter: Temperature (deg C) Value: 42 vs. 22
  misc_feature: MA Experiment 20000111 PARAMETER Experiment Name: At_42deg_Heat_cDNA_P Parameter: Timepoint (hr) Value: 6
  misc_feature: MA Experiment 20000111 PARAMETER Experiment Name: At_42deg_Heat_cDNA_P Parameter: Tissue Value: Aerial
  misc_feature: MA Experiment ID: 20000113 Result: Down-regulated in Transcription
  misc_feature: MA Experiment 20000113 PARAMETER Experiment Name: At_42deg_Heat_cDNA_P Parameter: Temperature (deg C) Value: 42 vs. 22
  misc_feature: MA Experiment 20000113 PARAMETER Experiment Name: At_42deg_Heat_cDNA_P Parameter: Timepoint (hr) Value: 8
  misc_feature: MA Experiment 20000113 PARAMETER Experiment Name: At_42deg_Heat_cDNA_P Parameter: Tissue Value: Aerial
  misc_feature: MA Experiment ID: 20000144 Result: Down-regulated in Transcription
  misc_feature: MA Experiment 20000144 PARAMETER Experiment Name: At_42deg_Heat_cDNA_P Parameter: Temperature (deg C) Value: 42 vs. 22
  misc_feature: MA Experiment 20000144 PARAMETER Experiment Name: At_42deg_Heat_cDNA_P Parameter: Timepoint (hr) Value: 1
  misc_feature: MA Experiment 20000144 PARAMETER Experiment Name: At_42deg_Heat_cDNA_P Parameter: Tissue Value: Aerial
  misc_feature: MA Experiment ID: 20000173 Result: Down-regulated in Transcription
  misc_feature: MA Experiment 20000173 PARAMETER Experiment Name: At_42deg_Heat_P Parameter: Age (day) Value: 14
  misc_feature: MA Experiment 20000173 PARAMETER Experiment Name: At_42deg_Heat_P Parameter: Organism Value: A. thaliana
  misc_feature: MA Experiment 20000173 PARAMETER Experiment Name: At_42deg_Heat_P Parameter: Plant Line Value: WS
  misc_feature: MA Experiment 20000173 PARAMETER Experiment Name: At_42deg_Heat_P Parameter: Temperature (deg C) Value: 42 vs. 22
  misc_feature: MA Experiment 20000173 PARAMETER Experiment Name: At_42deg_Heat_P Parameter: Timepoint (hr) Value: 6
  misc_feature: MA Experiment 20000173 PARAMETER Experiment Name: At_42deg_Heat_P Parameter: Tissue Value: Aerial
  misc_feature: MA Experiment ID: 20000182 Result: Down-regulated in Transcription
  misc_feature: MA Experiment 20000182 PARAMETER Experiment Name: At_2mM_SA_P Parameter: Age (day) Value: 14
  misc_feature: MA Experiment 20000182 PARAMETER Experiment Name: At_2mM_SA_P Parameter: Organism Value: A. thaliana
  misc_feature: MA Experiment 20000182 PARAMETER Experiment Name: At_2mM_SA_P Parameter: Plant Line Value: WS
  misc_feature: MA Experiment 20000182 PARAMETER Experiment Name: At_2mM_SA_P Parameter: Timepoint (hr) Value: 6
  misc_feature: MA Experiment 20000182 PARAMETER Experiment Name: At_2mM_SA_P Parameter: Tissue Value: Aerial
  misc_feature: MA Experiment 20000182 PARAMETER Experiment Name: At_2mM_SA_P Parameter: Treatment Value: 2mM SA vs. No Treatment
  misc_feature: MA Experiment ID: 20000234 Result: Up-regulated in Transcription
  misc_feature: MA Experiment 20000234 PARAMETER Experiment Name: At_Siliques_P Parameter: Age (day) Value: 21
  misc_feature: MA Experiment 20000234 PARAMETER Experiment Name: At_Siliques_P Parameter: Organism Value: A. thaliana
  misc_feature: MA Experiment 20000234 PARAMETER Experiment Name: At_Siliques_P Parameter: Plant Line Value: WS
  misc_feature: MA Experiment 20000234 PARAMETER Experiment Name: At_Siliques_P Parameter: Tissue Value: Less Than 5mm Siliques vs. Whole Plant
  misc_feature: MA Experiment ID: 20000265 Result: Up-regulated in Transcription
  misc_feature: MA Experiment 20000265 PARAMETER Experiment Name: At_Open_Flower_P Parameter: Age (day) Value: 21
  misc_feature: MA Experiment 20000265 PARAMETER Experiment Name: At_Open_Flower_P Parameter: Plant Line Value: WS
  misc_feature: MA Experiment 20000265 PARAMETER Experiment Name: At_Open_Flower_P Parameter: Tissue Value: Closed Flower vs. Whole Plant
  misc_feature: MA Experiment ID: 20000495 Result: Up-regulated in Transcription
  misc_feature: MA Experiment 20000495 PARAMETER Experiment Name: At_Guard_Cells_P Parameter: Harvest Date Value: 8/2/2002
  misc_feature: MA Experiment 20000495 PARAMETER Experiment Name: At_Guard_Cells_P Parameter: Organism Value: A. thaliana
  misc_feature: MA Experiment 20000495 PARAMETER Experiment Name: At_Guard_Cells_P Parameter: Tissue Value: Guard Cells vs. Leaves
  misc_feature: MA Experiment ID: 20000496 Result: Up-regulated in Transcription
  misc_feature: MA Experiment 20000496 PARAMETER Experiment Name: At_Guard_Cells_P Parameter: Harvest Date Value: 7/19/2002
  misc_feature: MA Experiment 20000496 PARAMETER Experiment Name: At_Guard_Cells_P Parameter: Organism Value: Canola
  misc_feature: MA Experiment 20000496 PARAMETER Experiment Name: At_Guard_Cells_P Parameter: Tissue Value: Guard Cells vs. Leaves
  misc_feature: MA Experiment ID: 20000794 Result: Down-regulated in Transcription
  misc_feature: MA Experiment 20000794 PARAMETER Experiment Name: At_Petals_P Parameter: Age (day) Value: 23-25 days
  misc_feature: MA Experiment 20000794 PARAMETER Experiment Name: At_Petals_P Parameter: Plant Line Value: WS
  misc_feature: MA Experiment 20000794 PARAMETER Experiment Name: At_Petals_P Parameter: Tissue Value: Petals vs. Whole plant
  misc_feature: MA Experiment ID: 20001248 Result: Down-regulated in Transcription
  misc_feature: MA Experiment 20001248 PARAMETER Experiment Name: At_Far-red-induction_P Parameter: Age (day) Value: 7
  misc_feature: MA Experiment 20001248 PARAMETER Experiment Name: At_Far-red-induction_P Parameter: Light Value: Far-red vs. White
  misc_feature: MA Experiment 20001248 PARAMETER Experiment Name: At_Far-red-induction_P Parameter: Organism Value: A. thaliana
  misc_feature: MA Experiment 20001248 PARAMETER Experiment Name: At_Far-red-induction_P Parameter: Plant Line Value: Columbia
  misc_feature: MA Experiment 20001248 PARAMETER Experiment Name: At_Far-red-induction_P Parameter: Timepoint (hr) Value: 4
  misc_feature: MA Experiment 20001248 PARAMETER Experiment Name: At_Far-red-induction_P Parameter: Tissue Value: Whole Plant
  misc_feature: MA Experiment ID: 20001450 Result: Down-regulated in Transcription
  misc_feature: MA Experiment 20001450 PARAMETER Experiment Name: At_Far-red-induction_P Parameter: Age (day) Value: 7
  misc_feature: MA Experiment 20001450 PARAMETER Experiment Name: At_Far-red-induction_P Parameter: Light Value: Far-red vs. White
  misc_feature: MA Experiment 20001450 PARAMETER Experiment Name: At_Far-red-induction_P Parameter: Organism Value: A. thaliana
  misc_feature: MA Experiment 20001450 PARAMETER Experiment Name: At_Far-red-induction_P Parameter: Plant Line Value: Columbia
  misc_feature: MA Experiment 20001450 PARAMETER Experiment Name: At_Far-red-induction_P Parameter: Timepoint (hr) Value: 8
  misc_feature: MA Experiment 20001450 PARAMETER Experiment Name: At_Far-red-induction_P Parameter: Tissue Value: Whole Plant
  misc_feature: MA Experiment ID: 20001451 Result: Down-regulated in Transcription
  misc_feature: MA Experiment 20001451 PARAMETER Experiment Name: At_Far-red-induction_P Parameter: Age (day) Value: 7
  misc_feature: MA Experiment 20001451 PARAMETER Experiment Name: At_Far-red-induction_P Parameter: Light Value: Far-red vs. White
  misc_feature: MA Experiment 20001451 PARAMETER Experiment Name: At_Far-red-induction_P Parameter: Organism Value: A. thaliana
  misc_feature: MA Experiment 20001451 PARAMETER Experiment Name: At_Far-red-induction_P Parameter: Plant Line Value: Columbia
  misc_feature: MA Experiment 20001451 PARAMETER Experiment Name: At_Far-red-induction_P Parameter: Timepoint (hr) Value: 24
  misc_feature: MA Experiment 20001451 PARAMETER Experiment Name: At_Far-red-induction_P Parameter: Tissue Value: Whole Plant
  misc_feature: MA Experiment ID: 20001555 Result: Down-regulated in Transcription
  misc_feature: MA Experiment 20001555 PARAMETER Experiment Name: At_Drought_Soil_Dry_P Parameter: Age (day) Value: 24
  misc_feature: MA Experiment 20001555 PARAMETER Experiment Name: At_Drought_Soil_Dry_P Parameter: Organism Value: A. thaliana
  misc_feature: MA Experiment 20001555 PARAMETER Experiment Name: At_Drought_Soil_Dry_P Parameter: Plant Line Value: WS
  misc_feature: MA Experiment 20001555 PARAMETER Experiment Name: At_Drought_Soil_Dry_P Parameter: Post Timepoint (hr) Value: None
  misc_feature: MA Experiment 20001555 PARAMETER Experiment Name: At_Drought_Soil_Dry_P Parameter: Post-Treatment Value: None
  misc_feature: MA Experiment 20001555 PARAMETER Experiment Name: At_Drought_Soil_Dry_P Parameter: Timepoint (day) Value: 10
  misc_feature: MA Experiment 20001555 PARAMETER Experiment Name: At_Drought_Soil_Dry_P Parameter: Treatment Value: Drought vs. No Drought
  misc_feature: MA Experiment ID: 20001556 Result: Down-regulated in Transcription
  misc_feature: MA Experiment 20001556 PARAMETER Experiment Name: At_Drought_Soil_Dry_P Parameter: Age (day) Value: 26
  misc_feature: MA Experiment 20001556 PARAMETER Experiment Name: At_Drought_Soil_Dry_P Parameter: Organism Value: A. thaliana
  misc_feature: MA Experiment 20001556 PARAMETER Experiment Name: At_Drought_Soil_Dry_P Parameter: Plant Line Value: WS
  misc_feature: MA Experiment 20001556 PARAMETER Experiment Name: At_Drought_Soil_Dry_P Parameter: Post Timepoint (hr) Value: None
  misc_feature: MA Experiment 20001556 PARAMETER Experiment Name: At_Drought_Soil_Dry_P Parameter: Post-Treatment Value: None
  misc_feature: MA Experiment 20001556 PARAMETER Experiment Name: At_Drought_Soil_Dry_P Parameter: Timepoint (day) Value: 12
  misc_feature: MA Experiment 20001556 PARAMETER Experiment Name: At_Drought_Soil_Dry_P Parameter: Treatment Value: Drought vs. No Drought
  misc_feature: MA Experiment ID: 20001560 Result: Up-regulated in Transcription
  misc_feature: MA Experiment 20001560 PARAMETER Experiment Name: At_Drought_Soil_Dry_P Parameter: Age (day) Value: 28
  misc_feature: MA Experiment 20001560 PARAMETER Experiment Name: At_Drought_Soil_Dry_P Parameter: Organism Value: A. thaliana
  misc_feature: MA Experiment 20001560 PARAMETER Experiment Name: At_Drought_Soil_Dry_P Parameter: Plant Line Value: WS
  misc_feature: MA Experiment 20001560 PARAMETER Experiment Name: At_Drought_Soil_Dry_P Parameter: Post Timepoint (hr) Value: None
  misc_feature: MA Experiment 20001560 PARAMETER Experiment Name: At_Drought_Soil_Dry_P Parameter: Post-Treatment Value: None
  misc_feature: MA Experiment 20001560 PARAMETER Experiment Name: At_Drought_Soil_Dry_P Parameter: Timepoint (day) Value: 14
  misc_feature: MA Experiment 20001560 PARAMETER Experiment Name: At_Drought_Soil_Dry_P Parameter: Treatment Value: Drought vs. No Drought
  misc_feature: MA Experiment ID: 20001911 Result: Down-regulated in Transcription
  misc_feature: MA Experiment 20001911 PARAMETER Experiment Name: At_Drought_Reproduction_P Parameter: Age (day) Value: 40
  misc_feature: MA Experiment 20001911 PARAMETER Experiment Name: At_Drought_Reproduction_P Parameter: Organism Value: A. thaliana
  misc_feature: MA Experiment 20001911 PARAMETER Experiment Name: At_Drought_Reproduction_P Parameter: Plant Line Value: WS
  misc_feature: MA Experiment 20001911 PARAMETER Experiment Name: At_Drought_Reproduction_P Parameter: Timepoint (day) Value: 10
  misc_feature: MA Experiment 20001911 PARAMETER Experiment Name: At_Drought_Reproduction_P Parameter: Tissue Value: Flowers
  misc_feature: MA Experiment 20001911 PARAMETER Experiment Name: At_Drought_Reproduction_P Parameter: Treatment Value: Drought vs. No Drought
tcgcatcactctttcaaagcctcgtgtcttgatttctttcaccaaactcatataatcacatatctctccaagttcatcaagaaaataatataaacacacacatacaagaactgaagaatgagcagacccggagattggaactgcaggtcatgcagccatctcaacttccagcgccgtgactcttgccagcgatgcggtgactctcgttccggccccggtggagttggtggcttagactttggtaatttcggtggcagagccatgtctgctttcggattcaccaccggctccgacgttcgtcccggtgattggtactgcaccgtgggaaactgcgggacacacaacttcgccagtcgctccacctgcttcaaatgcggcactttcaaggacgagaccggcgctggaggcggaggtggtggcatcggcggtccggccatgtttgacgccgacattatgcggtctagagtccccggtaacggtggtcgctctagctggaaatccggcgactggatttgcactaggattggttgcaatgagcataactttgcaagcagaatggaatgcttcaggtgcaatgcaccaagggacttcagcaacagaacctctttctaagttatacaaactgcttttgaagtagccttgtctccaatttcttaggcaccgtttcgatcaatggaaaggagaagcaggagcaaaagagagaattaaaagatgataattttgttagatgttgcaatgagagccaatattgtaactttagctgtcgtgcttttggatgtattatccatttttattaagatttcttttcattttctccttaattcgtaatttttcttttgcagtttctttttaagagttttattattctaatcattgtacgctgcatgtctttcttaaaagaagattctcttc

SEQ ID NO: 99695 - protein, 164 aa, Arabidopsis thaliana
  peptide (1)..(164): Ceres Seq. ID no. 13603463
  misc_feature (61)..(92): Pfam Name: Zn-finger in Ran binding protein and others Pfam Description: Zn-finger in Ran binding protein and others
  misc_feature (1)..(164): Homolog of NCBI NO: 15232662 NR Description: zinc finger protein -related [Arabidopsis
  misc_feature (1)..(164): Homolog of NCBI NO: 21595771 NR Description: putative zinc finger protein [Arabidopsis
  misc_feature (3)..(157): Homolog of NCBI NO: 28849863 NR Description: zinc finger transcription factor ZFP30 [Oryza
  misc_feature (1)..(164): Homolog of NCBI NO: 15239445 NR Description: expressed protein [Arabidopsis thaliana] unknown protein [Arabidopsis thaliana]
  misc_feature (53)..(160): Homolog of NCBI NO: 5803246 NR Description: ESTs AU077984(C62969),D41648(S4289), correspond to a region of the predicted gene.~Similar to putative
  misc_feature (53)..(160): Homolog of NCBI NO: 5679336 NR Description: putative zinc finger protein [Oryza sativa]
  misc_feature (3)..(104): Homolog of NCBI NO: 5803246 NR Description: ESTs AU077984(C62969),D41648(S4289), correspond to a region of the predicted gene.~Similar to putative
  misc_feature (3)..(104): Homolog of NCBI NO: 5679336 NR Description: putative zinc finger protein [Oryza sativa]
  misc_feature (1)..(65): Homolog of NCBI NO: 27368046 NR Description: zinc finger protein [Gossypium hirsutum]
  misc_feature (41)..(158): Homolog of NCBI NO: 15225776 NR Description: second messenger-dependent protein kinase [Arabidopsis thaliana] >gi|25387151|pir||G84663 hypothetical
MSRPGDWNCRSCSHLNFQRRDSCQRCGDSRSGPGGVGGLDFGNFGGRAMSAFGFTTGSDVRPGDWYCTVGNCGTHNFASRSTCFKCGTFKDETGAGGGGGGIGGPAMFDADIMRSRVPGNGGRSSWKSGDWICTRIGCNEHNFASRMECFRCNAPRDFSNRTSF

SEQ ID NO: 99696 - protein, 116 aa, Arabidopsis thaliana
  peptide (1)..(116): Ceres Seq. ID no. 13603464
  misc_feature (13)..(44): Pfam Name: Zn-finger in Ran binding protein and others Pfam Description: Zn-finger in Ran binding protein and others
  misc_feature (1)..(116): Homolog of NCBI NO: 15232662 NR Description: zinc finger protein -related [Arabidopsis
  misc_feature (1)..(116): Homolog of NCBI NO: 21595771 NR Description: putative zinc finger protein [Arabidopsis
  misc_feature (1)..(109): Homolog of NCBI NO: 28849863 NR Description: zinc finger transcription factor ZFP30 [Oryza
  misc_feature (1)..(116): Homolog of NCBI NO: 15239445 NR Description: expressed protein [Arabidopsis thaliana] unknown protein [Arabidopsis thaliana]
  misc_feature (5)..(112): Homolog of NCBI NO: 5803246 NR Description: ESTs AU077984(C62969),D41648(S4289), correspond to a region of the predicted gene.~Similar to putative
  misc_feature (5)..(112): Homolog of NCBI NO: 5679336 NR Description: putative zinc finger protein [Oryza sativa]
  misc_feature (1)..(56): Homolog of NCBI NO: 5803246 NR Description: ESTs AU077984(C62969),D41648(S4289), correspond to a region of the predicted gene.~Similar to putative
  misc_feature (1)..(56): Homolog of NCBI NO: 5679336 NR Description: putative zinc finger protein [Oryza sativa]
  misc_feature (1)..(17): Homolog of NCBI NO: 27368046 NR Description: zinc finger protein [Gossypium hirsutum]
  misc_feature (1)..(110): Homolog of NCBI NO: 15225776 NR Description: second messenger-dependent protein kinase [Arabidopsis thaliana] >gi|25387151|pir||G84663 hypothetical
MSAFGFTTGSDVRPGDWYCTVGNCGTHNFASRSTCFKCGTFKDETGAGGGGGGIGGPAMFDADIMRSRVPGNGGRSSWKSGDWICTRIGCNEHNFASRMECFRCNAPRDFSNRTSF

SEQ ID NO: 99697 - DNA, 1089 bp, Arabidopsis thaliana
  misc_feature (1)..(1089): Ceres Seq. ID no. 13603471
  misc_feature: MA Experiment ID: 108434 Result: Up-regulated in Transcription
  misc_feature: MA Experiment 108434 PARAMETER Experiment Name: At_Root_Tips_cDNA_P Parameter: Tissue Value: Root Tips
  misc_feature: MA Experiment ID: 20000180 Result: Up-regulated in Transcription
  misc_feature: MA Experiment 20000180 PARAMETER Experiment Name: At_Germinating_Seeds_P Parameter: Age (hr) Value: 24 vs. 0
  misc_feature: MA Experiment 20000180 PARAMETER Experiment Name: At_Germinating_Seeds_P Parameter: Tissue Value: Germinating Seeds
acaattactgcctttgcctgttacttgttctgctccgtcgctcagataggatctcaacaagacaccacaaaccctaaatttcgtcaactccacagcgactcgattcgatcaaggaaatggcgtacgcttctcgttttctctccagatctaagcagctacaggggggtctggtcattttgcagcagcaacatgctattccagtccgagcttttgctaaggaagctgctcgtccaacctttaaaggagatgagatgttgaagggtgtcttttttgatatcaagaacaaattccaggctgctgttgatattctccgtaaggaaaagatcacccttgatccagaggacccagctgccgtaaaacagtatgcaaatgtaatgaagaccatcaggcaaaaggcagacatgttctcagaatctcagcgcattaaacatgacattgatactgagactcaagacattccagatgctcgtgcatacttgttgaagttgcaggaaattcgcaccaggagggggcttactgatgagcttggtgctgaggccatgatgttcgaggctttggagaaagtcgagaaggacataaagaagcctctcctgagaagtgacaagaaaggaatggatcttttggttgcagagtttgagaaaggcaacaaaaagcttgggattaggaaagaagatcttcctaagtacgaagaaaatttggagctcagcatggccaaagcacagttggatgagctgaagagtgatgctgttgaagctatggaatctcagaaaaagaaggaggaattccaggatgaggaaatgccggacgtgaagtctctagacatccgtaacttcatctaaggtttgatccttagaaacatttgatttgttgtaagaaaaggcaaagatctctcacttgattgtctttgaaagagaagatcgttcccttgctgctgttttggtttggcgttcaataaggtctctcacctggatttgagtctaactctctctgtggttattacgcttgagattcttagacacaaacgttgtttcatgtttttttgataatggtgatcactggaatttgagataattaataaaagttgtgatg

SEQ ID NO: 99698 - protein, 240 aa, Arabidopsis thaliana; identical to SEQ ID NO: 21830
  peptide (1)..(240): Ceres Seq. ID no. 13603472
  misc_feature (1)..(240): Homolog of NCBI NO: 15227104 NR Description: ATP synthase -related [Arabidopsis thaliana] Probable ATP synthase 24 kDa subunit, mitochondrial precursor
  misc_feature (1)..(240): Homolog of NCBI NO: 21592716 NR Description: putative ATP synthase [Arabidopsis thaliana]
  misc_feature (1)..(220): Homolog of NCBI NO: 30681554 NR Description: ATP synthase -related [Arabidopsis thaliana]

SEQ ID NO: 99699 - protein, 195 aa, Arabidopsis thaliana; identical to SEQ ID NO: 21831
  peptide (1)..(195): Ceres Seq. ID no. 13603473
  misc_feature (1)..(195): Homolog of NCBI NO: 15227104 NR Description: ATP synthase -related [Arabidopsis thaliana] Probable ATP synthase 24 kDa subunit, mitochondrial precursor
  misc_feature (1)..(195): Homolog of NCBI NO: 21592716 NR Description: putative ATP synthase [Arabidopsis thaliana]
  misc_feature (1)..(175): Homolog of NCBI NO: 30681554 NR Description: ATP synthase -related [Arabidopsis thaliana]

SEQ ID NO: 99700 - protein, 154 aa, Arabidopsis thaliana; identical to SEQ ID NO: 21832
  peptide (1)..(154): Ceres Seq. ID no. 13603474
  misc_feature (1)..(154): Homolog of NCBI NO: 15227104 NR Description: ATP synthase -related [Arabidopsis thaliana] Probable ATP synthase 24 kDa subunit, mitochondrial precursor
  misc_feature (1)..(154): Homolog of NCBI NO: 21592716 NR Description: putative ATP synthase [Arabidopsis thaliana]
  misc_feature (1)..(134): Homolog of NCBI NO: 30681554 NR Description: ATP synthase -related [Arabidopsis thaliana]

SEQ ID NO: 99701 - DNA, 944 bp, Arabidopsis thaliana
  misc_feature (1)..(944): Ceres Seq. ID no. 13603475
  misc_feature: MA Experiment ID: 108474 Result: Down-regulated in Transcription
  misc_feature: MA Experiment 108474 PARAMETER Experiment Name: At_Drought_Flowers_cDNA_P Parameter: Timepoint (hr) Value: null
  misc_feature: MA Experiment 108474 PARAMETER Experiment Name: At_Drought_Flowers_cDNA_P Parameter: Treatment Value: Drought vs. No Drought
  misc_feature: MA Experiment ID: 20000069 Result: Up-regulated in Transcription
  misc_feature: MA Experiment 20000069 PARAMETER Experiment Name: At_100uM_ABA_Mutants_cDNA_P Parameter: Plant Line Value: CS23
  misc_feature: MA Experiment 20000069 PARAMETER Experiment Name: At_100uM_ABA_Mutants_cDNA_P Parameter: Timepoint (hr) Value: 6
  misc_feature: MA Experiment 20000069 PARAMETER Experiment Name: At_100uM_ABA_Mutants_cDNA_P Parameter: Tissue Value: Aerial
  misc_feature: MA Experiment 20000069 PARAMETER Experiment Name: At_100uM_ABA_Mutants_cDNA_P Parameter: Treatment Value: 100uM ABA vs. No Treatment
  misc_feature: MA Experiment ID: 20000072 Result: Up-regulated in Transcription
  misc_feature: MA Experiment 20000072 PARAMETER Experiment Name: At_100uM_ABA_Mutants_cDNA_P Parameter: Plant Line Value: CS8105
  misc_feature: MA Experiment 20000072 PARAMETER Experiment Name: At_100uM_ABA_Mutants_cDNA_P Parameter: Timepoint (hr) Value: 6
  misc_feature: MA Experiment 20000072 PARAMETER Experiment Name: At_100uM_ABA_Mutants_cDNA_P Parameter: Tissue Value: Aerial
  misc_feature: MA Experiment 20000072 PARAMETER Experiment Name: At_100uM_ABA_Mutants_cDNA_P Parameter: Treatment Value: 100uM ABA vs. No Treatment
  misc_feature: MA Experiment ID: 20000286 Result: Up-regulated in Transcription
  misc_feature: MA Experiment 20000286 PARAMETER Experiment Name: At_Open_Flower_P Parameter: Age (day) Value: 21
  misc_feature: MA Experiment 20000286 PARAMETER Experiment Name: At_Open_Flower_P Parameter: Plant Line Value: WS
  misc_feature: MA Experiment 20000286 PARAMETER Experiment Name: At_Open_Flower_P Parameter: Tissue Value: Half Open vs. Whole Plant
  misc_feature: MA Experiment ID: 20000794 Result: Up-regulated in Transcription
  misc_feature: MA Experiment 20000794 PARAMETER Experiment Name: At_Petals_P Parameter: Age (day) Value: 23-25 days
  misc_feature: MA Experiment 20000794 PARAMETER Experiment Name: At_Petals_P Parameter: Plant Line Value: WS
  misc_feature: MA Experiment 20000794 PARAMETER Experiment Name: At_Petals_P Parameter: Tissue Value: Petals vs. Whole plant
  misc_feature: MA Experiment ID: 20001905 Result: Up-regulated in Transcription
  misc_feature: MA Experiment 20001905 PARAMETER Experiment Name: At_Drought_Reproduction_P Parameter: Age (day) Value: 40
  misc_feature: MA Experiment 20001905 PARAMETER Experiment Name: At_Drought_Reproduction_P Parameter: Organism Value: A. thaliana
  misc_feature: MA Experiment 20001905 PARAMETER Experiment Name: At_Drought_Reproduction_P Parameter: Plant Line Value: WS
  misc_feature: MA Experiment 20001905 PARAMETER Experiment Name: At_Drought_Reproduction_P Parameter: Timepoint (day) Value: 10
  misc_feature: MA Experiment 20001905 PARAMETER Experiment Name: At_Drought_Reproduction_P Parameter: Tissue Value: Rosettes
  misc_feature: MA Experiment 20001905 PARAMETER Experiment Name: At_Drought_Reproduction_P Parameter: Treatment Value: Drought vs. No Drought
  misc_feature: MA Experiment ID: 20001906 Result: Up-regulated in Transcription
  misc_feature: MA Experiment 20001906 PARAMETER Experiment Name: At_Drought_Reproduction_P Parameter: Age (day) Value: 35
  misc_feature: MA Experiment 20001906 PARAMETER Experiment Name: At_Drought_Reproduction_P Parameter: Organism Value: A. thaliana
  misc_feature: MA Experiment 20001906 PARAMETER Experiment Name: At_Drought_Reproduction_P Parameter: Plant Line Value: WS
  misc_feature: MA Experiment 20001906 PARAMETER Experiment Name: At_Drought_Reproduction_P Parameter: Timepoint (day) Value: 5
  misc_feature: MA Experiment 20001906 PARAMETER Experiment Name: At_Drought_Reproduction_P Parameter: Tissue Value: Siliques
  misc_feature: MA Experiment 20001906 PARAMETER Experiment Name: At_Drought_Reproduction_P Parameter: Treatment Value: Drought vs. No Drought
aagatcatcaagaccaatctcgtagacttcttgtctctgtccaaaaaccataaagaaactttattggcataaaaagagaacaatctcgtagattcttgagcttctgacaatggattctttgaagaatagaacattgcttaaggtcattgttcttggagatagcggggtaggcaaaacttcattgatgaatcaatatgtgtacaagaaatttaacaagcaatataaggctacgatcggagcagatttcgtcaccaaagagcttcatatagatgaaaaatctgtcactttacagatatgggataccgctggacaagagagatttcaaagtctaggggccgcgttctatagaggtgctgattgttgcgttcttgtctacgacgtgaacaatctcaaatcttttgaaactctcaataactggcacacagagttcctcaaacaggcaaatcctatggaaccggagacatttccctttgttttgatcgggaacaagaccgatgtagatggcggaaacagccgagttgtttcaaataagagagccatcgagtggtgtggctcaaagggaaacataccgtaccatgaaacctctgcgaaggaagataccaatatcgatgaagcttttttgagtgttgcacacattgctctctctaatgaacgtaaacaaagcaatgacatatatcctagaggccagtatcatgactctgttacggatattattgatccagatcagtcaagaggttgtgcttgctgattccatgtttgacatatctgatcaaataatatcgagtcccagctctttcatttgcagtccttgtttttggtaactttttttctatttattggtttaataatatcatttatagaggtttattaacgacaaaaaacagttgatacatactactttctgagtgttttgattcatgtaaagcattaattaatttctattt

SEQ ID NO: 99702 - protein, 212 aa, Arabidopsis thaliana; identical to SEQ ID NO: 41666
  peptide (1)..(212): Ceres Seq. ID no. 13603476
  misc_feature (11)..(179): Pfam Name: Ras family Pfam Description: Ras family
  misc_feature (1)..(181): Homolog of NCBI NO: 25294161 NR Description: probable RAS type GTP-binding protein [imported]
  misc_feature (1)..(212): Homolog of NCBI NO: 18399819 NR Description: GTP-binding protein, putative [Arabidopsis
  misc_feature (3)..(212): Homolog of NCBI NO: 3914559 NR Description: RAS-RELATED PROTEIN RAB7
  misc_feature (3)..(212): Homolog of NCBI NO: 3914558 NR Description: RAS-RELATED PROTEIN RAB7 >gi|629657|pir||S39567
  misc_feature (3)..(212): Homolog of NCBI NO: 1370182 NR Description: RAB7A [Lotus japonicus]
  misc_feature (3)..(212): Homolog of NCBI NO: 541949 NR Description: rab7 protein - Soybean
  misc_feature (5)..(212): Homolog of NCBI NO: 15234026 NR Description: GTP-binding protein, putative [Arabidopsis
  misc_feature (3)..(212): Homolog of NCBI NO: 7438410 NR Description: GTP-binding protein Rab7c - common tobacco
  misc_feature (3)..(212): Homolog of NCBI NO: 15219943 NR Description: Ras-related GTP-binding protein (Rab7)
  misc_feature (5)..(212): Homolog of NCBI NO: 7438424 NR Description: rab7 protein homolog F17A8.70 - Arabidopsis

SEQ ID NO: 99703 - protein, 187 aa, Arabidopsis thaliana; identical to SEQ ID NO: 41667
  peptide (1)..(187): Ceres Seq. ID no. 13603477
  misc_feature (1)..(154): Pfam Name: Ras family Pfam Description: Ras family
  misc_feature (1)..(156): Homolog of NCBI NO: 25294161 NR Description: probable RAS type GTP-binding protein [imported]
  misc_feature (1)..(187): Homolog of NCBI NO: 18399819 NR Description: GTP-binding protein, putative [Arabidopsis
  misc_feature (1)..(187): Homolog of NCBI NO: 3914559 NR Description: RAS-RELATED PROTEIN RAB7
  misc_feature (1)..(187): Homolog of NCBI NO: 3914558 NR Description: RAS-RELATED PROTEIN RAB7 >gi|629657|pir||S39567
  misc_feature (1)..(187): Homolog of NCBI NO: 1370182 NR Description: RAB7A [Lotus japonicus]
  misc_feature (1)..(187): Homolog of NCBI NO: 541949 NR Description: rab7 protein - Soybean
  misc_feature (1)..(187): Homolog of NCBI NO: 15234026 NR Description: GTP-binding protein, putative [Arabidopsis
  misc_feature (1)..(187): Homolog of NCBI NO: 7438410 NR Description: GTP-binding protein Rab7c - common tobacco
  misc_feature (1)..(187): Homolog of NCBI NO: 15219943 NR Description: Ras-related GTP-binding protein (Rab7)
  misc_feature (1)..(187): Homolog of NCBI NO: 7438424 NR Description: rab7 protein homolog F17A8.70 - Arabidopsis

SEQ ID NO: 99704 - DNA, 747 bp, Arabidopsis thaliana
  misc_feature (1)..(747): Ceres Seq. ID no. 13603487
  misc_feature: MA Experiment ID: 108462 Result: Up-regulated in Transcription
  misc_feature: MA Experiment 108462 PARAMETER Experiment Name: At_Germinating_Seeds_cDNA_P Parameter: Age (day) Value: 2 vs. 0
  misc_feature: MA Experiment 108462 PARAMETER Experiment Name: At_Germinating_Seeds_cDNA_P Parameter: Tissue Value: Germinating Seeds
  misc_feature: MA Experiment ID: 108464 Result: Up-regulated in Transcription
  misc_feature: MA Experiment 108464 PARAMETER Experiment Name: At_Germinating_Seeds_cDNA_P Parameter: Age (day) Value: 4 vs. 0
  misc_feature: MA Experiment 108464 PARAMETER Experiment Name: At_Germinating_Seeds_cDNA_P Parameter: Tissue Value: Germinating Seeds
  misc_feature: MA Experiment ID: 108474 Result: Down-regulated in Transcription
  misc_feature: MA Experiment 108474 PARAMETER Experiment Name: At_Drought_Flowers_cDNA_P Parameter: Timepoint (hr) Value: null
  misc_feature: MA Experiment 108474 PARAMETER Experiment Name: At_Drought_Flowers_cDNA_P Parameter: Treatment Value: Drought vs. No Drought
  misc_feature: MA Experiment ID: 108573 Result: Down-regulated in Transcription
  misc_feature: MA Experiment 108573 PARAMETER Experiment Name: At_Drought_cDNA_P Parameter: Timepoint (hr) Value: 6
  misc_feature: MA Experiment 108573 PARAMETER Experiment Name: At_Drought_cDNA_P Parameter: Tissue Value: Aerial
  misc_feature: MA Experiment 108573 PARAMETER Experiment Name: At_Drought_cDNA_P Parameter: Treatment Value: Drought vs. No Drought
  misc_feature: MA Experiment ID: 108577 Result: Down-regulated in Transcription
  misc_feature: MA Experiment 108577 PARAMETER Experiment Name: At_42deg_Heat_cDNA_P Parameter: Temperature (deg C) Value: 42 vs. 22
  misc_feature: MA Experiment 108577 PARAMETER Experiment Name: At_42deg_Heat_cDNA_P Parameter: Timepoint (hr) Value: 6
  misc_feature: MA Experiment 108577 PARAMETER Experiment Name: At_42deg_Heat_cDNA_P Parameter: Tissue Value: Aerial
  misc_feature: MA Experiment ID: 20000179 Result: Up-regulated in Transcription
  misc_feature: MA Experiment 20000179 PARAMETER Experiment Name: At_Germinating_Seeds_P Parameter: Age (hr) Value: 6 vs. 0
  misc_feature: MA Experiment 20000179 PARAMETER Experiment Name: At_Germinating_Seeds_P Parameter: Tissue Value: Germinating Seeds
  misc_feature: MA Experiment ID: 20000180 Result: Up-regulated in Transcription
  misc_feature: MA Experiment 20000180 PARAMETER Experiment Name: At_Germinating_Seeds_P Parameter: Age (hr) Value: 24 vs. 0
  misc_feature: MA Experiment 20000180 PARAMETER Experiment Name: At_Germinating_Seeds_P Parameter: Tissue Value: Germinating Seeds
  misc_feature: MA Experiment ID: 20000184 Result: Up-regulated in Transcription
  misc_feature: MA Experiment 20000184 PARAMETER Experiment Name: At_Shoots__P Parameter: Age (day) Value: 7
  misc_feature: MA Experiment 20000184 PARAMETER Experiment Name: At_Shoots__P Parameter: Tissue Value: Shoots vs. Whole Plant
  misc_feature: MA Experiment ID: 20000185 Result: Up-regulated in Transcription
  misc_feature: MA Experiment 20000185 PARAMETER Experiment Name: At_Roots__P Parameter: Age (day) Value: 7 vs. 21
  misc_feature: MA Experiment 20000185 PARAMETER Experiment Name: At_Roots__P Parameter: Organism Value: A. thaliana
  misc_feature: MA Experiment 20000185 PARAMETER Experiment Name: At_Roots__P Parameter: Tissue Value: Roots vs. Whole Plant
  misc_feature: MA Experiment ID: 20000227 Result: Up-regulated in Transcription
  misc_feature: MA Experiment 20000227 PARAMETER Experiment Name: At_Root-Tips-vs-Tops_P Parameter: Tissue Value: Root Tips vs. Root Tops
  misc_feature: MA Experiment ID: 20000234 Result: Up-regulated in Transcription
  misc_feature: MA Experiment 20000234 PARAMETER Experiment Name: At_Siliques_P Parameter: Age (day) Value: 21
  misc_feature: MA Experiment 20000234 PARAMETER Experiment Name: At_Siliques_P Parameter: Organism Value: A. thaliana
  misc_feature: MA Experiment 20000234 PARAMETER Experiment Name: At_Siliques_P Parameter: Plant Line Value: WS
  misc_feature: MA Experiment 20000234 PARAMETER Experiment Name: At_Siliques_P Parameter: Tissue Value: Less Than 5mm Siliques vs. Whole Plant
  misc_feature: MA Experiment ID: 20000235 Result: Up-regulated in Transcription
  misc_feature: MA Experiment 20000235 PARAMETER Experiment Name: At_Siliques_P Parameter: Age (day) Value: 21
  misc_feature: MA Experiment 20000235 PARAMETER Experiment Name: At_Siliques_P Parameter: Organism Value: A. thaliana
  misc_feature: MA Experiment 20000235 PARAMETER Experiment Name: At_Siliques_P Parameter: Plant Line Value: WS
  misc_feature: MA Experiment 20000235 PARAMETER Experiment Name: At_Siliques_P Parameter: Tissue Value: 5-10mm Siliques vs. Whole Plant
  misc_feature: MA Experiment ID: 20000438 Result: Up-regulated in Transcription
  misc_feature: MA Experiment 20000438 PARAMETER Experiment Name: At_Shoots__P Parameter: Age (day) Value: 14
  misc_feature: MA Experiment 20000438 PARAMETER Experiment Name: At_Shoots__P Parameter: Tissue Value: Shoots vs. Whole Plant
  misc_feature: MA Experiment ID: 20000439 Result: Up-regulated in Transcription
  misc_feature: MA Experiment 20000439 PARAMETER Experiment Name: At_Roots__P Parameter: Age (day) Value: 14 vs. 21
  misc_feature: MA Experiment 20000439 PARAMETER Experiment Name: At_Roots__P Parameter: Organism Value: A. thaliana
  misc_feature: MA Experiment 20000439 PARAMETER Experiment Name: At_Roots__P Parameter: Tissue Value: Roots vs. Whole Plant
  misc_feature: MA Experiment ID: 20000495 Result: Up-regulated in Transcription
  misc_feature: MA Experiment 20000495 PARAMETER Experiment Name: At_Guard_Cells_P Parameter: Harvest Date Value: 8/2/2002
  misc_feature: MA Experiment 20000495 PARAMETER Experiment Name: At_Guard_Cells_P Parameter: Organism Value: A. thaliana
  misc_feature: MA Experiment 20000495 PARAMETER Experiment Name: At_Guard_Cells_P Parameter: Tissue Value: Guard Cells vs. Leaves
  misc_feature: MA Experiment ID: 20000527 Result: Down-regulated in Transcription
  misc_feature: MA Experiment 20000527 PARAMETER Experiment Name: At_10percent_PEG_P Parameter: Age (day) Value: 20
  misc_feature: MA Experiment 20000527 PARAMETER Experiment Name: At_10percent_PEG_P Parameter: Organism Value: A. thaliana
  misc_feature: MA Experiment 20000527 PARAMETER Experiment Name: At_10percent_PEG_P Parameter: Plant Line Value: WS
  misc_feature: MA Experiment 20000527 PARAMETER Experiment Name: At_10percent_PEG_P Parameter: Timepoint (day) Value: 20
  misc_feature: MA Experiment 20000527 PARAMETER Experiment Name: At_10percent_PEG_P Parameter: Tissue Value: Whole Plant
  misc_feature: MA Experiment 20000527 PARAMETER Experiment Name: At_10percent_PEG_P Parameter: Treatment Value: 10percent PEG vs. No Treatment
  misc_feature: MA Experiment ID: 20000794 Result: Down-regulated in Transcription
  misc_feature: MA Experiment 20000794 PARAMETER Experiment Name: At_Petals_P Parameter: Age (day) Value: 23-25 days
  misc_feature: MA Experiment 20000794 PARAMETER Experiment Name: At_Petals_P Parameter: Plant Line Value: WS
  misc_feature: MA Experiment 20000794 PARAMETER Experiment Name: At_Petals_P Parameter: Tissue Value: Petals vs. Whole plant
  misc_feature: MA Experiment ID: 20001451 Result: Up-regulated in Transcription
  misc_feature: MA Experiment 20001451 PARAMETER Experiment Name: At_Far-red-induction_P Parameter: Age (day) Value: 7
  misc_feature: MA Experiment 20001451 PARAMETER Experiment Name: At_Far-red-induction_P Parameter: Light Value: Far-red vs. White
  misc_feature: MA Experiment 20001451 PARAMETER Experiment Name: At_Far-red-induction_P Parameter: Organism Value: A. thaliana
  misc_feature: MA Experiment 20001451 PARAMETER Experiment Name: At_Far-red-induction_P Parameter: Plant Line Value: Columbia
  misc_feature: MA Experiment 20001451 PARAMETER Experiment Name: At_Far-red-induction_P Parameter: Timepoint (hr) Value: 24
  misc_feature: MA Experiment 20001451 PARAMETER Experiment Name: At_Far-red-induction_P Parameter: Tissue Value: Whole Plant
  misc_feature: MA Experiment ID: 20001555 Result: Down-regulated in Transcription
  misc_feature: MA Experiment 20001555 PARAMETER Experiment Name: At_Drought_Soil_Dry_P Parameter: Age (day) Value: 24
  misc_feature: MA Experiment 20001555 PARAMETER Experiment Name: At_Drought_Soil_Dry_P Parameter: Organism Value: A. thaliana
  misc_feature: MA Experiment 20001555 PARAMETER Experiment Name: At_Drought_Soil_Dry_P Parameter: Plant Line Value: WS
  misc_feature: MA Experiment 20001555 PARAMETER Experiment Name: At_Drought_Soil_Dry_P Parameter: Post Timepoint (hr) Value: None
  misc_feature: MA Experiment 20001555 PARAMETER Experiment Name: At_Drought_Soil_Dry_P Parameter: Post-Treatment Value: None
  misc_feature: MA Experiment 20001555 PARAMETER Experiment Name: At_Drought_Soil_Dry_P Parameter: Timepoint (day) Value: 10
  misc_feature: MA Experiment 20001555 PARAMETER Experiment Name: At_Drought_Soil_Dry_P Parameter: Treatment Value: Drought vs. No Drought
  misc_feature: MA Experiment ID: 20001560 Result: Up-regulated in Transcription
  misc_feature: MA Experiment 20001560 PARAMETER Experiment Name: At_Drought_Soil_Dry_P Parameter: Age (day) Value: 28
  misc_feature: MA Experiment 20001560 PARAMETER Experiment Name: At_Drought_Soil_Dry_P Parameter: Organism Value: A. thaliana
  misc_feature: MA Experiment 20001560 PARAMETER Experiment Name: At_Drought_Soil_Dry_P Parameter: Plant Line Value: WS
  misc_feature: MA Experiment 20001560 PARAMETER Experiment Name: At_Drought_Soil_Dry_P Parameter: Post Timepoint (hr) Value: None
  misc_feature: MA Experiment 20001560 PARAMETER Experiment Name: At_Drought_Soil_Dry_P Parameter: Post-Treatment Value: None
  misc_feature: MA Experiment 20001560 PARAMETER Experiment Name: At_Drought_Soil_Dry_P Parameter: Timepoint (day) Value: 14
  misc_feature: MA Experiment 20001560 PARAMETER Experiment Name: At_Drought_Soil_Dry_P Parameter: Treatment Value: Drought vs. No Drought
  misc_feature: MA Experiment ID: 20001911 Result: Down-regulated in Transcription
  misc_feature: MA Experiment 20001911 PARAMETER Experiment Name: At_Drought_Reproduction_P Parameter: Age (day) Value: 40
  misc_feature: MA Experiment 20001911 PARAMETER Experiment Name: At_Drought_Reproduction_P Parameter: Organism Value: A. thaliana
  misc_feature: MA Experiment 20001911 PARAMETER Experiment Name: At_Drought_Reproduction_P Parameter: Plant Line Value: WS
  misc_feature: MA Experiment 20001911 PARAMETER Experiment Name: At_Drought_Reproduction_P Parameter: Timepoint (day) Value: 10
  misc_feature: MA Experiment 20001911 PARAMETER Experiment Name: At_Drought_Reproduction_P Parameter: Tissue Value: Flowers
  misc_feature: MA Experiment 20001911 PARAMETER Experiment Name: At_Drought_Reproduction_P Parameter: Treatment Value: Drought vs. No Drought
agcattttcaacatttctattaatatttccatagactagatctctctttcttatacatccatatcaccgatgatgcctcgccgtgacgtcctcttcctctcactcctcctcgtcatcgccaccgtctccgctgtcgcattagccgacgatgaagcagattgtgtctacacattcttccttagaaccggatcaaccttcaaagccggtacagattcgatcataagcgctagagtctacgacaaatacggagactacatcgggatccgaaacctagaagcatggggtggtttaatgggaccaggttacaactactacgagaggggtaatctcgacattttcagtgggaaagcaccatgtcttccgagcccagtctgttcattaaatctgacctctgacggctccggtgaccaccacggttggtatgttaactacgtggaagtcacgacagccggagttcatgcaaagtgctcgtaccaaagctttgatgttgagcaatggcttgcgtccgatacatcgccgtatgagctcagtgctgttcggaataactgtccagtttcgcttagggaaagtgtcggtcgggtcgggtctgagatccggaagactctctcttggatcgtgtgagagtagtgaatgaaatgtcaaatgtgtatgtgtgtgtgtaacttggagagttgttctttgttgtcttgtgaacgtgtgatggcaataatgaaaatgattcgatcgaataaaagttccgttctttgt

SEQ ID NO: 99705 - protein, 183 aa, Arabidopsis thaliana; identical to SEQ ID NO: 29707
  peptide (1)..(183): Ceres Seq. ID no. 13603488
  misc_feature (31)..(155): Pfam Name: PLAT/LH2 domain Pfam Description: PLAT/LH2 domain
  misc_feature (1)..(183): Homolog of NCBI NO: 18399899 NR Description: expressed protein [Arabidopsis thaliana]
  misc_feature (2)..(183): Homolog of NCBI NO: 21553555 NR Description: dehydration stress-induced protein [Arabidopsis
  misc_feature (10)..(183): Homolog of NCBI NO: 12667247 NR Description: dehydration stress-induced protein [Brassica
  misc_feature (2)..(183): Homolog of NCBI NO: 15236014 NR Description: expressed protein [Arabidopsis thaliana]
  misc_feature (2)..(128): Homolog of NCBI NO: 15982879 NR Description: AT4g39730/T19P19_120 [Arabidopsis thaliana]
  misc_feature (21)..(160): Homolog of NCBI NO: 32492140 NR Description: OSJNBa0036B21.4 [Oryza sativa (japonica
  misc_feature (12)..(160): Homolog of NCBI NO: 7542598 NR Description: TMV-induced protein I [Capsicum annuum]
  misc_feature (26)..(163): Homolog of NCBI NO: 32492139 NR Description: OSJNBa0036B21.2 [Oryza sativa (japonica
  misc_feature (10)..(160): Homolog of NCBI NO: 10241929 NR Description: elicitor inducible protein [Nicotiana tabacum]
  misc_feature (31)..(160): Homolog of NCBI NO: 21740887 NR Description: OSJNBa0036B21.1 [Oryza sativa (japonica

SEQ ID NO: 99706 - protein, 182 aa, Arabidopsis thaliana; identical to SEQ ID NO: 29708
  peptide (1)..(182): Ceres Seq. ID no. 13603489
  misc_feature (30)..(154): Pfam Name: PLAT/LH2 domain Pfam Description: PLAT/LH2 domain
  misc_feature (1)..(182): Homolog of NCBI NO: 18399899 NR Description: expressed protein [Arabidopsis thaliana]
  misc_feature (1)..(182): Homolog of NCBI NO: 21553555 NR Description: dehydration stress-induced protein [Arabidopsis
  misc_feature (9)..(182): Homolog of NCBI NO: 12667247 NR Description: dehydration stress-induced protein [Brassica
  misc_feature (1)..(182): Homolog of NCBI NO: 15236014 NR Description: expressed protein [Arabidopsis thaliana]
  misc_feature (1)..(127): Homolog of NCBI NO: 15982879 NR Description: AT4g39730/T19P19_120 [Arabidopsis thaliana]
  misc_feature (20)..(159): Homolog of NCBI NO: 32492140 NR Description: OSJNBa0036B21.4 [Oryza sativa (japonica
  misc_feature (11)..(159): Homolog of NCBI NO: 7542598 NR Description: TMV-induced protein I [Capsicum annuum]
  misc_feature (25)..(162): Homolog of NCBI NO: 32492139 NR Description: OSJNBa0036B21.2 [Oryza sativa (japonica
  misc_feature (9)..(159): Homolog of NCBI NO: 10241929 NR Description: elicitor inducible protein [Nicotiana tabacum]
  misc_feature (30)..(159): Homolog of NCBI NO: 21740887 NR Description: OSJNBa0036B21.1 [Oryza sativa (japonica

SEQ ID NO: 99707 - protein, 109 aa, Arabidopsis thaliana; identical to SEQ ID NO: 29709
  peptide (1)..(109): Ceres Seq. ID no. 13603490
  misc_feature (1)..(81): Pfam Name: PLAT/LH2 domain Pfam Description: PLAT/LH2 domain
  misc_feature (1)..(109): Homolog of NCBI NO: 18399899 NR Description: expressed protein [Arabidopsis thaliana]
  misc_feature (1)..(109): Homolog of NCBI NO: 21553555 NR Description: dehydration stress-induced protein [Arabidopsis
  misc_feature (1)..(109): Homolog of NCBI NO: 12667247 NR Description: dehydration stress-induced protein [Brassica
  misc_feature (1)..(109): Homolog of NCBI NO: 15236014 NR Description: expressed protein [Arabidopsis thaliana]
  misc_feature (1)..(54): Homolog of NCBI NO: 15982879 NR Description: AT4g39730/T19P19_120 [Arabidopsis thaliana]
  misc_feature (1)..(86): Homolog of NCBI NO: 32492140 NR Description: OSJNBa0036B21.4 [Oryza sativa (japonica
  misc_feature (1)..(86): Homolog of NCBI NO: 7542598 NR Description: TMV-induced protein I [Capsicum annuum]
  misc_feature (1)..(89): Homolog of NCBI NO: 32492139 NR Description: OSJNBa0036B21.2 [Oryza sativa (japonica
  misc_feature (1)..(86): Homolog of NCBI NO: 10241929 NR Description: elicitor inducible protein [Nicotiana tabacum]
  misc_feature (1)..(86): Homolog of NCBI NO: 21740887 NR Description: OSJNBa0036B21.1 [Oryza sativa (japonica

SEQ ID NO: 99708 - DNA, 1138 bp, Arabidopsis thaliana
  misc_feature (1)..(1138): Ceres Seq. ID no. 13603491
  misc_feature: MA Experiment ID: 108434 Result: Up-regulated in Transcription
  misc_feature: MA Experiment 108434 PARAMETER Experiment Name: At_Root_Tips_cDNA_P Parameter: Tissue Value: Root Tips
  misc_feature: MA Experiment ID: 20000069 Result: Down-regulated in Transcription
  misc_feature: MA Experiment 20000069 PARAMETER Experiment Name: At_100uM_ABA_Mutants_cDNA_P Parameter: Plant Line Value: CS23
  misc_feature: MA Experiment 20000069 PARAMETER Experiment Name: At_100uM_ABA_Mutants_cDNA_P Parameter: Timepoint (hr) Value: 6
  misc_feature: MA Experiment 20000069 PARAMETER Experiment Name: At_100uM_ABA_Mutants_cDNA_P Parameter: Tissue Value: Aerial
  misc_feature: MA Experiment 20000069 PARAMETER Experiment Name: At_100uM_ABA_Mutants_cDNA_P Parameter: Treatment Value: 100uM ABA vs. No Treatment
  misc_feature: MA Experiment ID: 20000070 Result: Down-regulated in Transcription
  misc_feature: MA Experiment 20000070 PARAMETER Experiment Name: At_100uM_ABA_Mutants_cDNA_P Parameter: Plant Line Value: CS24
  misc_feature: MA Experiment 20000070 PARAMETER Experiment Name: At_100uM_ABA_Mutants_cDNA_P Parameter: Timepoint (hr) Value: 6
  misc_feature: MA Experiment 20000070 PARAMETER Experiment Name: At_100uM_ABA_Mutants_cDNA_P Parameter: Tissue Value: Aerial
  misc_feature: MA Experiment 20000070 PARAMETER Experiment Name: At_100uM_ABA_Mutants_cDNA_P Parameter: Treatment Value: 100uM ABA vs. No Treatment
  misc_feature: MA Experiment ID: 20000179 Result: Up-regulated in Transcription
  misc_feature: MA Experiment 20000179 PARAMETER Experiment Name: At_Germinating_Seeds_P Parameter: Age (hr) Value: 6 vs. 0
  misc_feature: MA Experiment 20000179 PARAMETER Experiment Name: At_Germinating_Seeds_P Parameter: Tissue Value: Germinating Seeds
atgtcctcttcgctccattgctcggaatcacagaaaaaggtgagattaaggaggagcgaaacatgacgaatccacttaattccaccgccgctaatcgctctaaccagccgtcttctgatggaatcagcgacggtcaaatcaccaatgaggaagctgaatcactaattaacaagaagaactgttcagggcacaagctaaaagaagtaactgatagtgacacattctctgacaatggtaaagatgattcagataccaagaaaagattccattaccatcaggatcagcggaggatgagtttgacatcgattgtggcggtggagtctccttcatcgagcaacgctccctctagaaaaaccattgatcttggccatggaagcgacctcatttacattcagaggtttcttccatttcaacaatcttggactttcttcgattatctcgacaagcatattccttggaccaggcctactattcgtgtctttggtcgatcttgcctccagccgagagatacttgttatgttgcaagtagcggattgactgcgttggtgtacagtggatatcgacctacctcctattcgtgggatgatttcccacctctcaaggagattctggatgctatttacaaggtgcttcctggaagcagattcaacagcttgctcttaaatagatacaaaggtgccagtgattatgtggcttggcatgcagatgatgaaaagatttatggtccaactccagaaattgcttcagtctcgtttggatgtgaacgtgattttgtgttgaagaaaaagaaagatgaagaatcttcccaagggaaaacaggagacagtggaccagctaagaagaggttaaagagaagcagcagagaggatcaacaaagtttgacattgaaacatggatcgttgctggtgatgagaggatacactcaaagagactggattcattctgtgccaaagcgtgcaaaggcagagggcactcgtatcaacctcacattcaggcttgttttgtaaattgagcatcatatgcaagaaggtgggcttgatcttggtctccattgacatattctaagcttctcatcttaattctctataaacatcaattggtgtagacatttcaagaagcaaattggacgggaagattg

SEQ ID NO: 99709 - protein, 334 aa, Arabidopsis thaliana
  peptide (1)..(334): Ceres Seq. ID no. 13603492
  misc_feature (214)..(334): Pfam Name: 2OG-Fe(II) oxygenase superfamily Pfam Description: 2OG-Fe(II) oxygenase superfamily
  misc_feature (21)..(334): Homolog of NCBI NO: 18399917 NR Description: oxidoreductase, 2OG-Fe(II) oxygenase family thaliana] >gi|20198150|gb|AAD23616.2| expressed protein
  misc_feature (21)..(334): Homolog of NCBI NO: 25412094 NR Description: hypothetical protein At2g22260 [imported] -
  misc_feature (112)..(260): Homolog of NCBI NO: 27367984 NR Description: Alkylated DNA repair protein [Vibrio vulnificus >gi|27359557|gb|AAO08501.1|AE016813_253 Alkylated DNA repair
  misc_feature (295)..(334): Homolog of NCBI NO: 27367984 NR Description: Alkylated DNA repair protein [Vibrio vulnificus >gi|27359557|gb|AAO08501.1|AE016813_253 Alkylated DNA repair
  misc_feature (127)..(264): Homolog of NCBI NO: 15601714 NR Description: hypothetical protein [Vibrio cholerae]
  misc_feature (276)..(334): Homolog of NCBI NO: 15601714 NR Description: hypothetical protein [Vibrio cholerae]
  misc_feature (127)..(260): Homolog of NCBI NO: 28900052 NR Description: hypothetical protein [Vibrio parahaemolyticus
  misc_feature (295)..(334): Homolog of NCBI NO: 28900052 NR Description: hypothetical protein [Vibrio parahaemolyticus
  misc_feature (112)..(267): Homolog of NCBI NO: 23026729 NR Description: hypothetical protein [Microbulbifer degradans
  misc_feature (293)..(333): Homolog of NCBI NO: 23026729 NR Description: hypothetical protein [Microbulbifer degradans
VLFAPLLGITEKGEIKEERNMTNPLNSTAANRSNQPSSDGISDGQITNEEAESLINKKNCSGHKLKEVTDSDTFSDNGKDDSDTKKRFHYHQDQRRMSLTSIVAVESPSSSNAPSRKTIDLGHGSDLIYIQRFLPFQQSWTFFDYLDKHIPWTRPTIRVFGRSCLQPRDTCYVASSGLTALVYSGYRPTSYSWDDFPPLKEILDAIYKVLPGSRFNSLLLNRYKGASDYVAWHADDEKIYGPTPEIASVSFGCERDFVLKKKKDEESSQGKTGDSGPAKKRLKRSSREDQQSLTLKHGSLLVMRGYTQRDWIHSVPKRAKAEGTRINLTFRLVL

SEQ ID NO: 99710 - protein, 314 aa, Arabidopsis thaliana
  peptide (1)..(314): Ceres Seq. ID no. 13603493
  misc_feature (194)..(314): Pfam Name: 2OG-Fe(II) oxygenase superfamily Pfam Description: 2OG-Fe(II) oxygenase superfamily
  misc_feature (1)..(314): Homolog of NCBI NO: 18399917 NR Description: oxidoreductase, 2OG-Fe(II) oxygenase family thaliana] >gi|20198150|gb|AAD23616.2| expressed protein
  misc_feature (1)..(314): Homolog of NCBI NO: 25412094 NR Description: hypothetical protein At2g22260 [imported] -
  misc_feature (92)..(240): Homolog of NCBI NO: 27367984 NR Description: Alkylated DNA repair protein [Vibrio vulnificus >gi|27359557|gb|AAO08501.1|AE016813_253 Alkylated DNA repair
  misc_feature (275)..(314): Homolog of NCBI NO: 27367984 NR Description: Alkylated DNA repair protein [Vibrio vulnificus >gi|27359557|gb|AAO08501.1|AE016813_253 Alkylated DNA repair
  misc_feature (107)..(244): Homolog of NCBI NO: 15601714 NR Description: hypothetical protein [Vibrio cholerae]
  misc_feature (256)..(314): Homolog of NCBI NO: 15601714 NR Description: hypothetical protein [Vibrio cholerae]
  misc_feature (107)..(240): Homolog of NCBI NO: 28900052 NR Description: hypothetical protein [Vibrio parahaemolyticus
  misc_feature (275)..(314): Homolog of NCBI NO: 28900052 NR Description: hypothetical protein [Vibrio parahaemolyticus
  misc_feature (92)..(247): Homolog of NCBI NO: 23026729 NR Description: hypothetical protein [Microbulbifer degradans
  misc_feature (273)..(313): Homolog of NCBI NO: 23026729 NR Description: hypothetical protein [Microbulbifer degradans
MTNPLNSTAANRSNQPSSDGISDGQITNEEAESLINKKNCSGHKLKEVTDSDTFSDNGKDDSDTKKRFHYHQDQRRMSLTSIVAVESPSSSNAPSRKTIDLGHGSDLIYIQRFLPFQQSWTFFDYLDKHIPWTRPTIRVFGRSCLQPRDTCYVASSGLTALVYSGYRPTSYSWDDFPPLKEILDAIYKVLPGSRFNSLLLNRYKGASDYVAWHADDEKIYGPTPEIASVSFGCERDFVLKKKKDEESSQGKTGDSGPAKKRLKRSSREDQQSLTLKHGSLLVMRGYTQRDWIHSVPKRAKAEGTRINLTFRLVL

SEQ ID NO: 99711 - protein, 238 aa, Arabidopsis thaliana
  peptide (1)..(238): Ceres Seq. ID no. 13603494
  misc_feature (118)..(238): Pfam Name: 2OG-Fe(II) oxygenase superfamily Pfam Description: 2OG-Fe(II) oxygenase superfamily
  misc_feature (1)..(238): Homolog of NCBI NO: 18399917 NR Description: oxidoreductase, 2OG-Fe(II) oxygenase family thaliana] >gi|20198150|gb|AAD23616.2| expressed protein
  misc_feature (1)..(238): Homolog of NCBI NO: 25412094 NR Description: hypothetical protein At2g22260 [imported] -
  misc_feature (16)..(164): Homolog of NCBI NO: 27367984 NR Description: Alkylated DNA repair protein [Vibrio vulnificus >gi|27359557|gb|AAO08501.1|AE016813_253 Alkylated DNA repair
  misc_feature (199)..(238): Homolog of NCBI NO: 27367984 NR Description: Alkylated DNA repair protein [Vibrio vulnificus >gi|27359557|gb|AAO08501.1|AE016813_253 Alkylated DNA repair
  misc_feature (31)..(168): Homolog of NCBI NO: 15601714 NR Description: hypothetical protein [Vibrio cholerae]
  misc_feature (180)..(238): Homolog of NCBI NO: 15601714 NR Description: hypothetical protein [Vibrio cholerae]
  misc_feature (31)..(164): Homolog of NCBI NO: 28900052 NR Description: hypothetical protein [Vibrio parahaemolyticus
  misc_feature (199)..(238): Homolog of NCBI NO: 28900052 NR Description: hypothetical protein [Vibrio parahaemolyticus
  misc_feature (16)..(171): Homolog of NCBI NO: 23026729 NR Description: hypothetical protein [Microbulbifer degradans
  misc_feature (197)..(237): Homolog of NCBI NO: 23026729 NR Description: hypothetical protein [Microbulbifer degradans
MSLTSIVAVESPSSSNAPSRKTIDLGHGSDLIYIQRFLPFQQSWTFFDYLDKHIPWTRPTIRVFGRSCLQPRDTCYVASSGLTALVYSGYRPTSYSWDDFPPLKEILDAIYKVLPGSRFNSLLLNRYKGASDYVAWHADDEKIYGPTPEIASVSFGCERDFVLKKKKDEESSQGKTGDSGPAKKRLKRSSREDQQSLTLKHGSLLVMRGYTQRDWIHSVPKRAKAEGTRINLTFRLVL

SEQ ID NO: 99712 - DNA, 3237 bp, Arabidopsis thaliana
  misc_feature (1)..(3237): Ceres Seq. ID no. 13603499
  misc_feature: MA Experiment ID: 108434 Result: Down-regulated in Transcription
  misc_feature: MA Experiment 108434 PARAMETER Experiment Name: At_Root_Tips_cDNA_P Parameter: Tissue Value: Root Tips
  misc_feature: MA Experiment ID: 108464 Result: Up-regulated in Transcription
  misc_feature: MA Experiment 108464 PARAMETER Experiment Name: At_Germinating_Seeds_cDNA_P Parameter: Age (day) Value: 4 vs. 0
  misc_feature: MA Experiment 108464 PARAMETER Experiment Name: At_Germinating_Seeds_cDNA_P Parameter: Tissue Value: Germinating Seeds
  misc_feature: MA Experiment ID: 108585 Result: Up-regulated in Transcription
  misc_feature: MA Experiment 108585 PARAMETER Experiment Name: At_5mM_NaNP_cDNA_P Parameter: Timepoint (hr) Value: 6
  misc_feature: MA Experiment 108585 PARAMETER Experiment Name: At_5mM_NaNP_cDNA_P Parameter: Tissue Value: Aerial
  misc_feature: MA Experiment 108585 PARAMETER Experiment Name: At_5mM_NaNP_cDNA_P Parameter: Treatment Value: null
  misc_feature: MA Experiment ID: 20000173 Result: Down-regulated in Transcription
  misc_feature: MA Experiment 20000173 PARAMETER Experiment Name: At_42deg_Heat_P Parameter: Age (day) Value: 14
  misc_feature: MA Experiment 20000173 PARAMETER Experiment Name: At_42deg_Heat_P Parameter: Organism Value: A. thaliana
  misc_feature: MA Experiment 20000173 PARAMETER Experiment Name: At_42deg_Heat_P Parameter: Plant Line Value: WS
  misc_feature: MA Experiment 20000173 PARAMETER Experiment Name: At_42deg_Heat_P Parameter: Temperature (deg C) Value: 42 vs. 22
  misc_feature: MA Experiment 20000173 PARAMETER Experiment Name: At_42deg_Heat_P Parameter: Timepoint (hr) Value: 6
  misc_feature: MA Experiment 20000173 PARAMETER Experiment Name: At_42deg_Heat_P Parameter: Tissue Value: Aerial
  misc_feature: MA Experiment ID: 20000179 Result: Down-regulated in Transcription
  misc_feature: MA Experiment 20000179 PARAMETER Experiment Name: At_Germinating_Seeds_P Parameter: Age (hr) Value: 6 vs. 0
  misc_feature: MA Experiment 20000179 PARAMETER Experiment Name: At_Germinating_Seeds_P Parameter: Tissue Value: Germinating Seeds
  misc_feature: MA Experiment ID: 20000184 Result: Down-regulated in Transcription
  misc_feature: MA Experiment 20000184 PARAMETER Experiment Name: At_Shoots__P Parameter: Age (day) Value: 7
  misc_feature: MA Experiment 20000184 PARAMETER Experiment Name: At_Shoots__P Parameter: Tissue Value: Shoots vs. Whole Plant
  misc_feature: MA Experiment ID: 20000224 Result: Up-regulated in Transcription
  misc_feature: MA Experiment ID: 20000234 Result: Down-regulated in Transcription
  misc_feature: MA Experiment 20000234 PARAMETER Experiment Name: At_Siliques_P Parameter: Age (day) Value: 21
  misc_feature: MA Experiment 20000234 PARAMETER Experiment Name: At_Siliques_P Parameter: Organism Value: A. thaliana
  misc_feature: MA Experiment 20000234 PARAMETER Experiment Name: At_Siliques_P Parameter: Plant Line Value: WS
  misc_feature: MA Experiment 20000234 PARAMETER Experiment Name: At_Siliques_P Parameter: Tissue Value: Less Than 5mm Siliques vs. Whole Plant
  misc_feature: MA Experiment ID: 20000265 Result: Down-regulated in Transcription
  misc_feature: MA Experiment 20000265 PARAMETER Experiment Name: At_Open_Flower_P Parameter: Age (day) Value: 21
  misc_feature: MA Experiment 20000265 PARAMETER Experiment Name: At_Open_Flower_P Parameter: Plant Line Value: WS
  misc_feature: MA Experiment 20000265 PARAMETER Experiment Name: At_Open_Flower_P Parameter: Tissue Value: Closed Flower vs. Whole Plant
  misc_feature: MA Experiment ID: 20000438 Result: Down-regulated in Transcription
  misc_feature: MA Experiment 20000438 PARAMETER Experiment Name: At_Shoots__P Parameter: Age (day) Value: 14
  misc_feature: MA Experiment 20000438 PARAMETER Experiment Name: At_Shoots__P Parameter: Tissue Value: Shoots vs. Whole Plant
  misc_feature: MA Experiment ID: 20001560 Result: Down-regulated in Transcription
  misc_feature: MA Experiment 20001560 PARAMETER Experiment Name: At_Drought_Soil_Dry_P Parameter: Age (day) Value: 28
  misc_feature: MA Experiment 20001560 PARAMETER Experiment Name: At_Drought_Soil_Dry_P Parameter: Organism Value: A. thaliana
  misc_feature: MA Experiment 20001560 PARAMETER Experiment Name: At_Drought_Soil_Dry_P Parameter: Plant Line Value: WS
  misc_feature: MA Experiment 20001560 PARAMETER Experiment Name: At_Drought_Soil_Dry_P Parameter: Post Timepoint (hr) Value: None
  misc_feature: MA Experiment 20001560 PARAMETER Experiment Name: At_Drought_Soil_Dry_P Parameter: Post-Treatment Value: None
  misc_feature: MA Experiment 20001560 PARAMETER Experiment Name: At_Drought_Soil_Dry_P Parameter: Timepoint (day) Value: 14
  misc_feature: MA Experiment 20001560 PARAMETER Experiment Name: At_Drought_Soil_Dry_P Parameter: Treatment Value: Drought vs. No Drought
atggcggaagcaagacgattcagcccagttcatgaattagatgttggacaaatactctcagaagcacgacatcgatggcttcgtcctcctgaaatctgtgaaattttacagaattaccaaagatttcaaatttctactgagccacctactacaccatcaagtgggtctgtttttatgtttgatcgaaaggtgctcagatacttcaggaaagacggtcacaattggaggaagaaaaaagatggaaagactgtgaaggaagctcatgagaggttgaaggcgggaagcgttgatgttctacattgttactatgcgcatggacaggacaatgaaaactttcaaagacgcagttactggttgcttcaggaagaactttcccacatagtttttgttcactacctcgaagttaagggtagtagagtttctacttcttttaaccggatgcaaaggactgaagacgcggctcggtctcctcaagaaactggggacgccttgaccagtgaacatgatggttatgcttcttgcagcttcaatcaaaatgatcatagcaatcattcacaaactactgactcagcaagtgtcaatggttttcactctccagaacttgaagatgctgaatcagcatacaatcagcatggaagttccacagcttactctcatcaagaacttcagcagcctgcaacaggaggaaaccttactggttttgatccttactatcaaatctctttgacgcccagggatagttatcaaaaagagcttcgcacaatccccgtaactgattcttcaattatggtagacaaaagcaaaactatcaacagtcctggagtaacaaatgggttaaaaaacagaaaatccattgattcccaaacctgggaagagattctgggaaattgtggttctggagttgaagccttacctttgcagcctaacagtgagcatgaagtgctggaccaaatactcgaaagctcttttacaatgcaagattttgctagtctacaagagtccatggtcaaaagccagaatcaggagttaaattcaggacttacatctgatcgtaccgtgtggttccaaggacaagatatggagctaaatgctataagcaatctagcttcgaatgaaaaagctccatatctatctacgatgaaacaacatctgttacacggtgcattgggcgaagaaggtctgaaaaagatggacagtttcaatcgctggatgagcaaagaacttggagatgttggtgttatagctgatgcaaacgagtcctttactcaatcaagttcaagaacctactgggaagaagttgagagtgaggatgggtccaatggtcacaactctaggagggacatggatggatatgttatgagtccttccctctcaaaggaacagctctttagcatcaatgacttctctccaagctgggcttatgtgggttgtgaagtggtggtttttgtcactggaaaattcttaaagactcgggaggagactgaaattggcgagtggtcttgcatgtttgggcaaacagaagttccagcagatgttatatctaatggtattctccaatgtgttgctcctatgcatgaggctggaagagttcccttttatgtaacatgttccaacagattggcatgcagtgaagtgcgtgaattcgagtataaggttgccgagtctcaagtttttgatagagaagcagatgatgagtctactattgacattcttgaggcaagatttgttaaactgttgtgctcgaaatctgaaaatacaagccctgtttctgggaatgacagtgatttgtcacaattgagcgagaagattagtttactacttttcgagaacgatgaccagttggatcagatgctcatgaatgaaatctcccaagaaaatatgaaaaacaaccttttgcaggaatttctgaaagaaagcttacactcatggcttttacaaaagatagcagaaggtggaaaaggtccaagtgttttggatgaaggtggccaaggtgtattacattttgcagcttctcttggttacaactgggccttagaaccaacaataatcgctggtgtaagcgttgattttcgcgatgtaaatggttggaccgcacttcattgggcagctttctttggcagggagaggataattggttcactcatagctcttggtgctgctcctggaactttaactgacccaaatccagatttcccatcaggaagcacaccttctgatctagcctatgctaatggtcacaaaggaattgctggttatctctcagaatatgccttaagagctcatgtttctttgctcagtctaaatgataaaaatgccgaaactgttgagatggctcctagcccatccagctcatcattgacagactcgttgacagctgtacgtaacgctactcaggcagcagctcggattcatcaggttttcagggctcagtctttccagaagaagcaactaaaagaatttggagataaaaagcttggaatgtcggaggagcgtgctctttcgatgcttgctcctaaaacacacaaatcaggaagggcacatagtgatgattccgtgcaagccgctgctattcggattcagaacaagttccgaggttacaagggaagaaaagactatttgattaccagacaaagaatcatcaaaatacaggctcatgtgagaggttatcagtttaggaaaaactacagaaagataatttggtcagtgggggtattagagaaggtgatattacgttggagacggaaaggagctggtttgcgcgggtttaagtcagaagcacttgttgagaagatgcaagacggaacagagaaagaagaagatgatgattttttcaaacaaggaagaaagcaaacagaggataggctacaaaaagctcttgcaagagtgaaatccatggttcaatatcctgaagctagagatcaataccgtagattgctaaatgttgtcaacgacatccaagaaagcaaggttgaaaaagctcttgaaaattcagaagcaacttgttttgatgatgatgatgatctgatagatattgaagcattgttggaagatgatgacacattgatgttgcctatgtcctcatctttgtggaccagttaaatcactctcaagctttgttgtgatattgtgtcacagtattattgactcattaaacttgtaaattcttgtgtaatcactcttctcatatactgtaactgcattcatgactctaatttaaatgatatatatttgaaacat

SEQ ID NO: 99713 - protein, 1032 aa, Arabidopsis thaliana; identical to SEQ ID NO: 24425
  peptide (1)..(1032): Ceres Seq. ID no. 13603500
  misc_feature (464)..(551): Pfam Name: IPT/TIG domain Pfam Description: IPT/TIG domain
  misc_feature (576)..(1032): Homolog of NCBI NO: 11545505 NR Description: calmodulin-binding protein [Arabidopsis thaliana]
  misc_feature (2)..(1021): Homolog of NCBI NO: 37533660 NR Description: putative calmodulin binding protein similar to
  misc_feature (1)..(797): Homolog of NCBI NO: 30697970 NR Description: calmodulin-binding protein [Arabidopsis thaliana]
  misc_feature (763)..(1022): Homolog of NCBI NO: 30697970 NR Description: calmodulin-binding protein [Arabidopsis thaliana]
  misc_feature (1)..(1030): Homolog of NCBI NO: 37991923 NR Description: putative calmodulin-binding transcription factor
  misc_feature (370)..(770): Homolog of NCBI NO: 15242417 NR Description: calmodulin-binding protein [Arabidopsis thaliana]
  misc_feature (766)..(1026): Homolog of NCBI NO: 15242417 NR Description: calmodulin-binding protein [Arabidopsis thaliana]
  misc_feature (1)..(169): Homolog of NCBI NO: 15242417 NR Description: calmodulin-binding protein [Arabidopsis thaliana]
  misc_feature (370)..(770): Homolog of NCBI NO: 20127124 NR Description: calmodulin-binding transcription activator
  misc_feature (781)..(1028): Homolog of NCBI NO: 20127124 NR Description: calmodulin-binding transcription activator

SEQ ID NO: 99714 - protein, 974 aa, Arabidopsis thaliana; identical to SEQ ID NO: 24426
  peptide (1)..(974): Ceres Seq. ID no. 13603501
  misc_feature (406)..(493): Pfam Name: IPT/TIG domain Pfam Description: IPT/TIG domain
  misc_feature (518)..(974): Homolog of NCBI NO: 11545505 NR Description: calmodulin-binding protein [Arabidopsis thaliana]
  misc_feature (1)..(963): Homolog of NCBI NO: 37533660 NR Description: putative calmodulin binding protein similar to
  misc_feature (1)..(739): Homolog of NCBI NO: 30697970 NR Description: calmodulin-binding protein [Arabidopsis thaliana]
  misc_feature (705)..(964): Homolog of NCBI NO: 30697970 NR Description: calmodulin-binding protein [Arabidopsis thaliana]
  misc_feature (1)..(972): Homolog of NCBI NO: 37991923 NR Description: putative calmodulin-binding transcription factor
  misc_feature (312)..(712): Homolog of NCBI NO: 15242417 NR Description: calmodulin-binding protein [Arabidopsis thaliana]
  misc_feature (708)..(968): Homolog of NCBI NO: 15242417 NR Description: calmodulin-binding protein [Arabidopsis thaliana]
  misc_feature (1)..(111): Homolog of NCBI NO: 15242417 NR Description: calmodulin-binding protein [Arabidopsis thaliana]
  misc_feature (312)..(712): Homolog of NCBI NO: 20127124 NR Description: calmodulin-binding transcription activator
  misc_feature (723)..(970): Homolog of NCBI NO: 20127124 NR Description: calmodulin-binding transcription activator

SEQ ID NO: 99715 - protein, 886 aa, Arabidopsis thaliana; identical to SEQ ID NO: 97065
  peptide (1)..(886): Ceres Seq. ID no. 13603502
  misc_feature (318)..(405): Pfam Name: IPT/TIG domain Pfam Description: IPT/TIG domain
  misc_feature (430)..(886): Homolog of NCBI NO: 11545505 NR Description: calmodulin-binding protein [Arabidopsis thaliana]
  misc_feature (1)..(875): Homolog of NCBI NO: 37533660 NR Description: putative calmodulin binding protein similar to
  misc_feature (1)..(651): Homolog of NCBI NO: 30697970 NR Description: calmodulin-binding protein [Arabidopsis thaliana]
  misc_feature (617)..(876): Homolog of NCBI NO: 30697970 NR Description: calmodulin-binding protein [Arabidopsis thaliana]
  misc_feature (1)..(884): Homolog of NCBI NO: 37991923 NR Description: putative calmodulin-binding transcription factor
  misc_feature (224)..(624): Homolog of NCBI NO: 15242417 NR Description: calmodulin-binding protein [Arabidopsis thaliana]
  misc_feature (620)..(880): Homolog of NCBI NO: 15242417 NR Description: calmodulin-binding protein [Arabidopsis thaliana]
  misc_feature (1)..(23): Homolog of NCBI NO: 15242417 NR Description: calmodulin-binding protein [Arabidopsis thaliana]
  misc_feature (224)..(624): Homolog of NCBI NO: 20127124 NR Description: calmodulin-binding transcription activator
  misc_feature (635)..(882): Homolog of NCBI NO: 20127124 NR Description: calmodulin-binding transcription activator

SEQ ID NO: 99716 - DNA, 1519 bp, Arabidopsis thaliana
  misc_feature (1)..(1519): Ceres Seq. ID no. 13603503
  misc_feature: MA Experiment ID: 20000173 Result: Up-regulated in Transcription
  misc_feature: MA Experiment 20000173 PARAMETER Experiment Name: At_42deg_Heat_P Parameter: Age (day) Value: 14
  misc_feature: MA Experiment 20000173 PARAMETER Experiment Name: At_42deg_Heat_P Parameter: Organism Value: A. thaliana
  misc_feature: MA Experiment 20000173 PARAMETER Experiment Name: At_42deg_Heat_P Parameter: Plant Line Value: WS
  misc_feature: MA Experiment 20000173 PARAMETER Experiment Name: At_42deg_Heat_P Parameter: Temperature (deg C) Value: 42 vs. 22
  misc_feature: MA Experiment 20000173 PARAMETER Experiment Name: At_42deg_Heat_P Parameter: Timepoint (hr) Value: 6
  misc_feature: MA Experiment 20000173 PARAMETER Experiment Name: At_42deg_Heat_P Parameter: Tissue Value: Aerial
  misc_feature: MA Experiment ID: 20000437 Result: Down-regulated in Transcription
  misc_feature: MA Experiment 20000437 PARAMETER Experiment Name: At_Drought_P Parameter: Age (day) Value: 8
  misc_feature: MA Experiment 20000437 PARAMETER Experiment Name: At_Drought_P Parameter: Organism Value: A. thaliana
  misc_feature: MA Experiment 20000437 PARAMETER Experiment Name: At_Drought_P Parameter: Plant Line Value: WS
  misc_feature: MA Experiment 20000437 PARAMETER Experiment Name: At_Drought_P Parameter: Timepoint (hr) Value: 24
  misc_feature: MA Experiment 20000437 PARAMETER Experiment Name: At_Drought_P Parameter: Tissue Value: Whole Plant
  misc_feature: MA Experiment 20000437 PARAMETER Experiment Name: At_Drought_P Parameter: Treatment Value: Drought vs. No Drought
  misc_feature: MA Experiment ID: 20000794 Result: Up-regulated in Transcription
  misc_feature: MA Experiment 20000794 PARAMETER Experiment Name: At_Petals_P Parameter: Age (day) Value: 23-25 days
  misc_feature: MA Experiment 20000794 PARAMETER Experiment Name: At_Petals_P Parameter: Plant Line Value: WS
  misc_feature: MA Experiment 20000794 PARAMETER Experiment Name: At_Petals_P Parameter: Tissue Value: Petals vs. Whole plant
  misc_feature: MA Experiment ID: 20001247 Result: Down-regulated in Transcription
  misc_feature: MA Experiment 20001247 PARAMETER Experiment Name: At_Far-red-induction_P Parameter: Age (day) Value: 7
  misc_feature: MA Experiment 20001247 PARAMETER Experiment Name: At_Far-red-induction_P Parameter: Light Value: Far-red vs. White
  misc_feature: MA Experiment 20001247 PARAMETER Experiment Name: At_Far-red-induction_P Parameter: Organism Value: A. thaliana
  misc_feature: MA Experiment 20001247 PARAMETER Experiment Name: At_Far-red-induction_P Parameter: Plant Line Value: Columbia
  misc_feature: MA Experiment 20001247 PARAMETER Experiment Name: At_Far-red-induction_P Parameter: Timepoint (hr) Value: 1
  misc_feature: MA Experiment 20001247 PARAMETER Experiment Name: At_Far-red-induction_P Parameter: Tissue Value: Whole Plant
  misc_feature: MA Experiment ID: 20001248 Result: Down-regulated in Transcription
  misc_feature: MA Experiment 20001248 PARAMETER Experiment Name: At_Far-red-induction_P Parameter: Age (day) Value: 7
  misc_feature: MA Experiment 20001248 PARAMETER Experiment Name: At_Far-red-induction_P Parameter: Light Value: Far-red vs. White
  misc_feature: MA Experiment 20001248 PARAMETER Experiment Name: At_Far-red-induction_P Parameter: Organism Value: A. thaliana
  misc_feature: MA Experiment 20001248 PARAMETER Experiment Name: At_Far-red-induction_P Parameter: Plant Line Value: Columbia
  misc_feature: MA Experiment 20001248 PARAMETER Experiment Name: At_Far-red-induction_P Parameter: Timepoint (hr) Value: 4
  misc_feature: MA Experiment 20001248 PARAMETER Experiment Name: At_Far-red-induction_P Parameter: Tissue Value: Whole Plant
  misc_feature: MA Experiment ID: 20001450 Result: Down-regulated in Transcription
  misc_feature: MA Experiment 20001450 PARAMETER Experiment Name: At_Far-red-induction_P Parameter: Age (day) Value: 7
  misc_feature: MA Experiment 20001450 PARAMETER Experiment Name: At_Far-red-induction_P Parameter: Light Value: Far-red vs. White
  misc_feature: MA Experiment 20001450 PARAMETER Experiment Name: At_Far-red-induction_P Parameter: Organism Value: A. thaliana
  misc_feature: MA Experiment 20001450 PARAMETER Experiment Name: At_Far-red-induction_P Parameter: Plant Line Value: Columbia
  misc_feature: MA Experiment 20001450 PARAMETER Experiment Name: At_Far-red-induction_P Parameter: Timepoint (hr) Value: 8
  misc_feature: MA Experiment 20001450 PARAMETER Experiment Name: At_Far-red-induction_P Parameter: Tissue Value: Whole Plant
  misc_feature: MA Experiment ID: 20001451 Result: Down-regulated in Transcription
  misc_feature: MA Experiment 20001451 PARAMETER Experiment Name: At_Far-red-induction_P Parameter: Age (day) Value: 7
  misc_feature: MA Experiment 20001451 PARAMETER Experiment Name: At_Far-red-induction_P Parameter: Light Value: Far-red vs. White
  misc_feature: MA Experiment 20001451 PARAMETER Experiment Name: At_Far-red-induction_P Parameter: Organism Value: A. thaliana
  misc_feature: MA Experiment 20001451 PARAMETER Experiment Name: At_Far-red-induction_P Parameter: Plant Line Value: Columbia
  misc_feature: MA Experiment 20001451 PARAMETER Experiment Name: At_Far-red-induction_P Parameter: Timepoint (hr) Value: 24
  misc_feature: MA Experiment 20001451 PARAMETER Experiment Name: At_Far-red-induction_P Parameter: Tissue Value: Whole Plant
aagaaacaagaggtaggctcttctagcgaactcctttcatacgttttctctctactctcatcgcttttcttatctctctcggagctcttccgtcgtccaccattgattacgggagtgtattgagctaaatatggctataatacaacttggaagtacatgtgttgctcaatggagtattcgtcctcaatttgcagtcagagcttattatcccagcagaatcgaatcaactcgccatcaaaattccagtagccaagtaaattgtttgggagcttcaaagtcgagtatgttctcacatgggtcattgcccttcttgtccatgacgggaatgtccagaaatatgcatcctcctcgcagaggatctcgcttcactgttagagctgatgcagattactattcggtactcggagtttcgaaaaatgcaaccaaagctgagattaaaagcgcttatcggaagctggctaggaattaccatccggatgtgaacaaggatcctggcgcagaagagaaattcaaagaaataagtaacgcatatgaggttttatcagatgatgaaaagaaatctctttacgataggtatggtgaggccggacttaaaggcgctgctggatttggcaatggggattttagtaatccgttcgatctattcgactcattattcgaaggcttcggtggtgggatgggtagaggttcaagaagcagagctgtggatggtcaagacgagtattacacgctaatcttaaacttcaaagaagcggttttcggaatggagaaagaaatagagatatcccggctcgagagctgtgggacatgtgaaggttcaggtgcaaaacctggaaccaaaccgaccaaatgcaccacgtgtggcggacaaggccaagtggtttcagcagctagaactcctctgggcgtgttccaacaagtcatgacttgctcgtcctgtaatggcactggagagatctcgacgccgtgtggtacttgctctggagacggacgcgtgaggaagacaaaacggataagtctcaaagtaccagccggggttgattcaggtagccggttgagagtgagaggagaaggcaatgccgggaagagaggcggatcaccaggcgatctgtttgttgttatagaagttatcccagacccgattttgaaacgagacgatacaaatattctctacacttgcaagatatcgtatatcgatgcgattttagggacgacactgaaagtaccaacagtggatgggacagtagatttgaaagttccagctgggacacaacctagcacgacgcttgtgatggcgaaaaaaggagttccggtattgaacaagagtaatatgagaggagatcagttggtgagagtacaagtggagatacctaagagattgagcaaagaggagaaaaaacttattgaagagcttgctgatatgagcaagaacaagactgctaatagcaccagtagatgattagaaacacgaaaattttgacattgaaattatgaatctctctatacatatacatttttc

SEQ ID NO: 99717 - protein, 442 aa, Arabidopsis thaliana
  peptide (1)..(442): Ceres Seq. ID no. 13603504
  misc_feature (307)..(429): Pfam Name: DnaJ C terminal region Pfam Description: DnaJ C terminal region
  misc_feature (1)..(442): Homolog of NCBI NO: 18399949 NR Description: DnaJ protein, putative [Arabidopsis thaliana]
  misc_feature (1)..(442): Homolog of NCBI NO: 30794072 NR Description: putative DnaJ protein [Arabidopsis thaliana]
  misc_feature (1)..(442): Homolog of NCBI NO: 21536561 NR Description: putative DnaJ protein [Arabidopsis thaliana]
  misc_feature (52)..(442): Homolog of NCBI NO: 25296019 NR Description: probable DnaJ protein [imported] - Arabidopsis
  misc_feature (1)..(439): Homolog of NCBI NO: 18420568 NR Description: DnaJ protein, putative [Arabidopsis thaliana] AT4g39960/T5J17_130 [Arabidopsis thaliana]
  misc_feature (52)..(439): Homolog of NCBI NO: 7441920 NR Description: heat shock protein T5J17.130, dnaJ-type -
  misc_feature (1)..(430): Homolog of NCBI NO: 16326131 NR Description: DNAJ homologue [Oryza sativa]
  misc_feature (55)..(442): Homolog of NCBI NO: 7441921 NR Description: heat shock protein dnaJ - garden pea
  misc_feature (39)..(442): Homolog of NCBI NO: 18412605 NR Description: DnaJ protein, putative [Arabidopsis thaliana] DnaJ protein, putative [Arabidopsis thaliana]
  misc_feature (39)..(442): Homolog of NCBI NO: 14326568 NR Description: At1g80030/F18B13_37 [Arabidopsis thaliana]
MAIIQLGSTCVAQWSIRPQFAVRAYYPSRIESTRHQNSSSQVNCLGASKSSMFSHGSLPFLSMTGMSRNMHPPRRGSRFTVRADADYYSVLGVSKNATKAEIKSAYRKLARNYHPDVNKDPGAEEKFKEISNAYEVLSDDEKKSLYDRYGEAGLKGAAGFGNGDFSNPFDLFDSLFEGFGGGMGRGSRSRAVDGQDEYYTLILNFKEAVFGMEKEIEISRLESCGTCEGSGAKPGTKPTKCTTCGGQGQVVSAARTPLGVFQQVMTCSSCNGTGEISTPCGTCSGDGRVRKTKRISLKVPAGVDSGSRLRVRGEGNAGKRGGSPGDLFVVIEVIPDPILKRDDTNILYTCKISYIDAILGTTLKVPTVDGTVDLKVPAGTQPSTTLVMAKKGVPVLNKSNMRGDQLVRVQVEIPKRLSKEEKKLIEELADMSKNKTANSTSR

SEQ ID NO: 99718 - protein, 391 aa, Arabidopsis thaliana
  peptide (1)..(391): Ceres Seq. ID no. 13603505
  misc_feature (256)..(378): Pfam Name: DnaJ C terminal region Pfam Description: DnaJ C terminal region
  misc_feature (1)..(391): Homolog of NCBI NO: 18399949 NR Description: DnaJ protein, putative [Arabidopsis thaliana]
  misc_feature (1)..(391): Homolog of NCBI NO: 30794072 NR Description: putative DnaJ protein [Arabidopsis thaliana]
  misc_feature (1)..(391): Homolog of NCBI NO: 21536561 NR Description: putative DnaJ protein [Arabidopsis thaliana]
  misc_feature (1)..(391): Homolog of NCBI NO: 25296019 NR Description: probable DnaJ protein [imported] - Arabidopsis
  misc_feature (1)..(388): Homolog of NCBI NO: 18420568 NR Description: DnaJ protein, putative [Arabidopsis thaliana] AT4g39960/T5J17_130 [Arabidopsis thaliana]
  misc_feature (1)..(388): Homolog of NCBI NO: 7441920 NR Description: heat shock protein T5J17.130, dnaJ-type -
  misc_feature (1)..(379): Homolog of NCBI NO: 16326131 NR Description: DNAJ homologue [Oryza sativa]
  misc_feature (4)..(391): Homolog of NCBI NO: 7441921 NR Description: heat shock protein dnaJ - garden pea
  misc_feature (1)..(391): Homolog of NCBI NO: 18412605 NR Description: DnaJ protein, putative [Arabidopsis thaliana] DnaJ protein, putative [Arabidopsis thaliana]
  misc_feature (1)..(391): Homolog of NCBI NO: 14326568 NR Description: At1g80030/F18B13_37 [Arabidopsis thaliana]
MFSHGSLPFLSMTGMSRNMHPPRRGSRFTVRADADYYSVLGVSKNATKAEIKSAYRKLARNYHPDVNKDPGAEEKFKEISNAYEVLSDDEKKSLYDRYGEAGLKGAAGFGNGDFSNPFDLFDSLFEGFGGGMGRGSRSRAVDGQDEYYTLILNFKEAVFGMEKEIEISRLESCGTCEGSGAKPGTKPTKCTTCGGQGQVVSAARTPLGVFQQVMTCSSCNGTGEISTPCGTCSGDGRVRKTKRISLKVPAGVDSGSRLRVRGEGNAGKRGGSPGDLFVVIEVIPDPILKRDDTNILYTCKISYIDAILGTTLKVPTVDGTVDLKVPAGTQPSTTLVMAKKGVPVLNKSNMRGDQLVRVQVEIPKRLSKEEKKLIEELADMSKNKTANSTSR

SEQ ID NO: 99719 - protein, 380 aa, Arabidopsis thaliana
  peptide (1)..(380): Ceres Seq. ID no. 13603506
  misc_feature (245)..(367): Pfam Name: DnaJ C terminal region Pfam Description: DnaJ C terminal region
  misc_feature (1)..(380): Homolog of NCBI NO: 18399949 NR Description: DnaJ protein, putative [Arabidopsis thaliana]
  misc_feature (1)..(380): Homolog of NCBI NO: 30794072 NR Description: putative DnaJ protein [Arabidopsis thaliana]
  misc_feature (1)..(380): Homolog of NCBI NO: 21536561 NR Description: putative DnaJ protein [Arabidopsis thaliana]
  misc_feature (1)..(380): Homolog of NCBI NO: 25296019 NR Description: probable DnaJ protein [imported] - Arabidopsis
  misc_feature (1)..(377): Homolog of NCBI NO: 18420568 NR Description: DnaJ protein, putative [Arabidopsis thaliana] AT4g39960/T5J17_130 [Arabidopsis thaliana]
  misc_feature (1)..(377): Homolog of NCBI NO: 7441920 NR Description: heat shock protein T5J17.130, dnaJ-type -
  misc_feature (1)..(368): Homolog of NCBI NO: 16326131 NR Description: DNAJ homologue [Oryza sativa]
  misc_feature (1)..(380): Homolog of NCBI NO: 7441921 NR Description: heat shock protein dnaJ - garden pea
  misc_feature (1)..(380): Homolog of NCBI NO: 18412605 NR Description: DnaJ protein, putative [Arabidopsis thaliana] DnaJ protein, putative [Arabidopsis thaliana]
  misc_feature (1)..(380): Homolog of NCBI NO: 14326568 NR Description: At1g80030/F18B13_37 [Arabidopsis thaliana]
MTGMSRNMHPPRRGSRFTVRADADYYSVLGVSKNATKAEIKSAYRKLARNYHPDVNKDPGAEEKFKEISNAYEVLSDDEKKSLYDRYGEAGLKGAAGFGNGDFSNPFDLFDSLFEGFGGGMGRGSRSRAVDGQDEYYTLILNFKEAVFGMEKEIEISRLESCGTCEGSGAKPGTKPTKCTTCGGQGQVVSAARTPLGVFQQVMTCSSCNGTGEISTPCGTCSGDGRVRKTKRISLKVPAGVDSGSRLRVRGEGNAGKRGGSPGDLFVVIEVIPDPILKRDDTNILYTCKISYIDAILGTTLKVPTVDGTVDLKVPAGTQPSTTLVMAKKGVPVLNKSNMRGDQLVRVQVEIPKRLSKEEKKLIEELADMSKNKTANSTSR

SEQ ID NO: 99720 - DNA, 1140 bp, Arabidopsis thaliana
  misc_feature (1)..(1140): Ceres Seq. ID no. 13603511
  misc_feature: MA Experiment ID: 108461 Result: Down-regulated in Transcription
  misc_feature: MA Experiment 108461 PARAMETER Experiment Name: At_Germinating_Seeds_cDNA_P Parameter: Age (day) Value: 1 vs. 0
  misc_feature: MA Experiment 108461 PARAMETER Experiment Name: At_Germinating_Seeds_cDNA_P Parameter: Tissue Value: Germinating Seeds
  misc_feature: MA Experiment ID: 108462 Result: Down-regulated in Transcription
  misc_feature: MA Experiment 108462 PARAMETER Experiment Name: At_Germinating_Seeds_cDNA_P Parameter: Age (day) Value: 2 vs. 0
  misc_feature: MA Experiment 108462 PARAMETER Experiment Name: At_Germinating_Seeds_cDNA_P Parameter: Tissue Value: Germinating Seeds
  misc_feature: MA Experiment ID: 108463 Result: Down-regulated in Transcription
  misc_feature: MA Experiment 108463 PARAMETER Experiment Name: At_Germinating_Seeds_cDNA_P Parameter: Age (day) Value: 3 vs. 0
  misc_feature: MA Experiment 108463 PARAMETER Experiment Name: At_Germinating_Seeds_cDNA_P Parameter: Tissue Value: Germinating Seeds
  misc_feature: MA Experiment ID: 108464 Result: Down-regulated in Transcription
  misc_feature: MA Experiment 108464 PARAMETER Experiment Name: At_Germinating_Seeds_cDNA_P Parameter: Age (day) Value: 4 vs. 0
  misc_feature: MA Experiment 108464 PARAMETER Experiment Name: At_Germinating_Seeds_cDNA_P Parameter: Tissue Value: Germinating Seeds
  misc_feature: MA Experiment ID: 108501 Result: Down-regulated in Transcription
  misc_feature: MA Experiment 108501 PARAMETER Experiment Name: At_ap2_floral_buds_cDNA_P Parameter: Plant Line Value: ap2 (Ler.)
  misc_feature: MA Experiment 108501 PARAMETER Experiment Name: At_ap2_floral_buds_cDNA_P Parameter: Tissue Value: Closed Flower
  misc_feature: MA Experiment ID: 108572 Result: Up-regulated in Transcription
  misc_feature: MA Experiment 108572 PARAMETER Experiment Name: At_Drought_cDNA_P Parameter: Timepoint (hr) Value: 1
  misc_feature: MA Experiment 108572 PARAMETER Experiment Name: At_Drought_cDNA_P Parameter: Tissue Value: Aerial
  misc_feature: MA Experiment 108572 PARAMETER Experiment Name: At_Drought_cDNA_P Parameter: Treatment Value: Drought vs. No Drought
  misc_feature: MA Experiment ID: 20000265 Result: Up-regulated in Transcription
  misc_feature: MA Experiment 20000265 PARAMETER Experiment Name: At_Open_Flower_P Parameter: Age (day) Value: 21
  misc_feature: MA Experiment 20000265 PARAMETER Experiment Name: At_Open_Flower_P Parameter: Plant Line Value: WS
  misc_feature: MA Experiment 20000265 PARAMETER Experiment Name: At_Open_Flower_P Parameter: Tissue Value: Closed Flower vs. Whole Plant
  misc_feature: MA Experiment ID: 20001555 Result: Up-regulated in Transcription
  misc_feature: MA Experiment 20001555 PARAMETER Experiment Name: At_Drought_Soil_Dry_P Parameter: Age (day) Value: 24
  misc_feature: MA Experiment 20001555 PARAMETER Experiment Name: At_Drought_Soil_Dry_P Parameter: Organism Value: A. thaliana
  misc_feature: MA Experiment 20001555 PARAMETER Experiment Name: At_Drought_Soil_Dry_P Parameter: Plant Line Value: WS
  misc_feature: MA Experiment 20001555 PARAMETER Experiment Name: At_Drought_Soil_Dry_P Parameter: Post Timepoint (hr) Value: None
  misc_feature: MA Experiment 20001555 PARAMETER Experiment Name: At_Drought_Soil_Dry_P Parameter: Post-Treatment Value: None
  misc_feature: MA Experiment 20001555 PARAMETER Experiment Name: At_Drought_Soil_Dry_P Parameter: Timepoint (day) Value: 10
  misc_feature: MA Experiment 20001555 PARAMETER Experiment Name: At_Drought_Soil_Dry_P Parameter: Treatment Value: Drought vs. No Drought
  misc_feature: MA Experiment ID: 20001904 Result: Up-regulated in Transcription
  misc_feature: MA Experiment 20001904 PARAMETER Experiment Name: At_Drought_Reproduction_P Parameter: Age (day) Value: 37
  misc_feature: MA Experiment 20001904 PARAMETER Experiment Name: At_Drought_Reproduction_P Parameter: Organism Value: A. thaliana
  misc_feature: MA Experiment 20001904 PARAMETER Experiment Name: At_Drought_Reproduction_P Parameter: Plant Line Value: WS
  misc_feature: MA Experiment 20001904 PARAMETER Experiment Name: At_Drought_Reproduction_P Parameter: Timepoint (day) Value: 7
  misc_feature: MA Experiment 20001904 PARAMETER Experiment Name: At_Drought_Reproduction_P Parameter: Tissue Value: Rosettes
  misc_feature: MA Experiment 20001904 PARAMETER Experiment Name: At_Drought_Reproduction_P Parameter: Treatment Value: Drought vs. No Drought
  misc_feature: MA Experiment ID: 20001905 Result: Up-regulated in Transcription
  misc_feature: MA Experiment 20001905 PARAMETER Experiment Name: At_Drought_Reproduction_P Parameter: Age (day) Value: 40
  misc_feature: MA Experiment 20001905 PARAMETER Experiment Name: At_Drought_Reproduction_P Parameter: Organism Value: A. thaliana
  misc_feature: MA Experiment 20001905 PARAMETER Experiment Name: At_Drought_Reproduction_P Parameter: Plant Line Value: WS
  misc_feature: MA Experiment 20001905 PARAMETER Experiment Name: At_Drought_Reproduction_P Parameter: Timepoint (day) Value: 10
  misc_feature: MA Experiment 20001905 PARAMETER Experiment Name: At_Drought_Reproduction_P Parameter: Tissue Value: Rosettes
  misc_feature: MA Experiment 20001905 PARAMETER Experiment Name: At_Drought_Reproduction_P Parameter: Treatment Value: Drought vs. No Drought
tataaacacaaaagcctttagtatcattctcgaaaaccaccaaaaacctctttataacccaacaaacaaagtctctacttcttcttcaatcactgaaacacaacaccaaaaaagaaaaaagtatgtctcttcttccccatctcatcctctacctaacacttttgacggtggttgttactggagaaactctccgaccaagattctacagcgagacatgccctgaagctgaatccatagtaagaagagaaatgaagaaagcaatgatcaaagaagcaagaagcgtcgcttccgtcatgcgtttccaatttcacgactgtttcgtcaatggatgtgacgcatctctgttgcttgacgacacaccaaacatgcttggtgaaaaactatcactttccaacatcgattcactaagatctttcgaagtcgttgacgacattaaagaagctctagagaaagcttgtccagctactgtttcttgtgccgatatcgttatcatggccgctcgtgacgccgttgctcttacaggaggaccagattgggaagtgaagctagggaggaaagacagtttaacagcgagtcagcaagattccgacgatataatgccaagtccaagagccaacgcaactttcttgattgatctcttcgaaagattcaatctttctgtaaaagacatggttgctttatcagggtcacactcaataggtcaaggtcggtgtttttcaatcatgttcagactttataaccaatccggttctggtaaaccggatccagctcttgaaccgagttaccgtaagaagcttgataagctttgtcctttgggtggagatgagaatgtgactggagatctagatgcaacacctcaggtttttgataatcagtatttcaaagacttggtttcagggagagggtttcttaactctgatcagactttgtacacgaatctagtgacgagagagtatgtgaagatgtttagtgaggatcaagatgagttctttagggcttttgcagaaggcatggtgaagttgggtgatttgcaatctgggagacctggtgagattaggtttaattgtagagttgttaatagaaggcctattgatgtattgcttgtatcttgaattatcattagtaaagagaagaaatctt

SEQ ID NO: 99721 - protein, 329 aa, Arabidopsis thaliana
  peptide (1)..(329): Ceres Seq. ID no. 13603512
  misc_feature (39)..(285): Pfam Name: Peroxidase Pfam Description: Peroxidase
  misc_feature (1)..(329): Homolog of NCBI NO: 15227200 NR Description: putative peroxidase [Arabidopsis thaliana]
  misc_feature (1)..(327): Homolog of NCBI NO: 19698448 NR Description: gaiacol peroxidase [Gossypium hirsutum]
  misc_feature (7)..(319): Homolog of NCBI NO: 21537275 NR Description: putative peroxidase [Arabidopsis thaliana]
  misc_feature (23)..(319): Homolog of NCBI NO: 15224116 NR Description: peroxidase, putative [Arabidopsis thaliana]
  misc_feature (1)..(319): Homolog of NCBI NO: 15234394 NR Description: peroxidase, putative [Arabidopsis thaliana]
  misc_feature (6)..(319): Homolog of NCBI NO: 1403134 NR Description: peroxidase [Arabidopsis thaliana]
  misc_feature (6)..(319): Homolog of NCBI NO: 21593604 NR Description: peroxidase ATP N [Arabidopsis thaliana]
  misc_feature (6)..(319): Homolog of NCBI NO: 18420061 NR Description: peroxidase, putative [Arabidopsis thaliana] Peroxidase 59 precursor (Atperox P59) (Peroxidase N) (ATPN)
  misc_feature (23)..(319): Homolog of NCBI NO: 15224114 NR Description: peroxidase, putative [Arabidopsis thaliana]
  misc_feature (1)..(319): Homolog of NCBI NO: 7453855 NR Description: peroxidase prx15 precursor [Spinacia oleracea]
MSLLPHLILYLTLLTVVVTGETLRPRFYSETCPEAESIVRREMKKAMIKEARSVASVMRFQFHDCFVNGCDASLLLDDTPNMLGEKLSLSNIDSLRSFEVVDDIKEALEKACPATVSCADIVIMAARDAVALTGGPDWEVKLGRKDSLTASQQDSDDIMPSPRANATFLIDLFERFNLSVKDMVALSGSHSIGQGRCFSIMFRLYNQSGSGKPDPALEPSYRKKLDKLCPLGGDENVTGDLDATPQVFDNQYFKDLVSGRGFLNSDQTLYTNLVTREYVKMFSEDQDEFFRAFAEGMVKLGDLQSGRPGEIRFNCRVVNRRPIDVLLVS

SEQ ID NO: 99722 - protein, 287 aa, Arabidopsis thaliana
  peptide (1)..(287): Ceres Seq. ID no. 13603513
  misc_feature (1)..(243): Pfam Name: Peroxidase Pfam Description: Peroxidase
  misc_feature (1)..(287): Homolog of NCBI NO: 15227200 NR Description: putative peroxidase [Arabidopsis thaliana]
  misc_feature (1)..(285): Homolog of NCBI NO: 19698448 NR Description: gaiacol peroxidase [Gossypium hirsutum]
  misc_feature (1)..(277): Homolog of NCBI NO: 21537275 NR Description: putative peroxidase [Arabidopsis thaliana]
  misc_feature (1)..(277): Homolog of NCBI NO: 15224116 NR Description: peroxidase, putative [Arabidopsis thaliana]
  misc_feature (1)..(277): Homolog of NCBI NO: 15234394 NR Description: peroxidase, putative [Arabidopsis thaliana]
  misc_feature (1)..(277): Homolog of NCBI NO: 1403134 NR Description: peroxidase [Arabidopsis thaliana]
  misc_feature (1)..(277): Homolog of NCBI NO: 21593604 NR Description: peroxidase ATP N [Arabidopsis thaliana]
  misc_feature (1)..(277): Homolog of NCBI NO: 18420061 NR Description: peroxidase, putative [Arabidopsis thaliana] Peroxidase 59 precursor (Atperox P59) (Peroxidase N) (ATPN)
  misc_feature (1)..(277): Homolog of NCBI NO: 15224114 NR Description: peroxidase, putative [Arabidopsis thaliana]
  misc_feature (1)..(277): Homolog of NCBI NO: 7453855 NR Description: peroxidase prx15 precursor [Spinacia oleracea]
MKKAMIKEARSVASVMRFQFHDCFVNGCDASLLLDDTPNMLGEKLSLSNIDSLRSFEVVDDIKEALEKACPATVSCADIVIMAARDAVALTGGPDWEVKLGRKDSLTASQQDSDDIMPSPRANATFLIDLFERFNLSVKDMVALSGSHSIGQGRCFSIMFRLYNQSGSGKPDPALEPSYRKKLDKLCPLGGDENVTGDLDATPQVFDNQYFKDLVSGRGFLNSDQTLYTNLVTREYVKMFSEDQDEFFRAFAEGMVKLGDLQSGRPGEIRFNCRVVNRRPIDVLLVS

SEQ ID NO: 99723 - protein, 283 aa, Arabidopsis thaliana
  peptide (1)..(283): Ceres Seq. ID no. 13603514
  misc_feature (1)..(239): Pfam Name: Peroxidase Pfam Description: Peroxidase
  misc_feature (1)..(283): Homolog of NCBI NO: 15227200 NR Description: putative peroxidase [Arabidopsis thaliana]
  misc_feature (1)..(281): Homolog of NCBI NO: 19698448 NR Description: gaiacol peroxidase [Gossypium hirsutum]
  misc_feature (1)..(273): Homolog of NCBI NO: 21537275 NR Description: putative peroxidase [Arabidopsis thaliana]
  misc_feature (1)..(273): Homolog of NCBI NO: 15224116 NR Description: peroxidase, putative [Arabidopsis thaliana]
  misc_feature (1)..(273): Homolog of NCBI NO: 15234394 NR Description: peroxidase, putative [Arabidopsis thaliana]
  misc_feature (1)..(273): Homolog of NCBI NO: 1403134 NR Description: peroxidase [Arabidopsis thaliana]
  misc_feature (1)..(273): Homolog of NCBI NO: 21593604 NR Description: peroxidase ATP N [Arabidopsis thaliana]
  misc_feature (1)..(273): Homolog of NCBI NO: 18420061 NR Description: peroxidase, putative [Arabidopsis thaliana] Peroxidase 59 precursor (Atperox P59) (Peroxidase N) (ATPN)
  misc_feature (1)..(273): Homolog of NCBI NO: 15224114 NR Description: peroxidase, putative [Arabidopsis thaliana]
  misc_feature (1)..(273): Homolog of NCBI NO: 7453855 NR Description: peroxidase prx15 precursor [Spinacia oleracea]
MIKEARSVASVMRFQFHDCFVNGCDASLLLDDTPNMLGEKLSLSNIDSLRSFEVVDDIKEALEKACPATVSCADIVIMAARDAVALTGGPDWEVKLGRKDSLTASQQDSDDIMPSPRANATFLIDLFERFNLSVKDMVALSGSHSIGQGRCFSIMFRLYNQSGSGKPDPALEPSYRKKLDKLCPLGGDENVTGDLDATPQVFDNQYFKDLVSGRGFLNSDQTLYTNLVTREYVKMFSEDQDEFFRAFAEGMVKLGDLQSGRPGEIRFNCRVVNRRPIDVLLVS

SEQ ID NO: 99724 - DNA, 1643 bp, Arabidopsis thaliana
  misc_feature (1)..(1643): Ceres Seq. ID no. 13603515
  misc_feature: MA Experiment ID: 108434 Result: Up-regulated in Transcription
  misc_feature: MA Experiment 108434 PARAMETER Experiment Name: At_Root_Tips_cDNA_P Parameter: Tissue Value: Root Tips
  misc_feature: MA Experiment ID: 108435 Result: Down-regulated in Transcription
  misc_feature: MA Experiment 108435 PARAMETER Experiment Name: At_stm_Mutants_cDNA_P Parameter: Plant Line Value: wt Landsburg vs stm
  misc_feature: MA Experiment 108435 PARAMETER Experiment Name: At_stm_Mutants_cDNA_P Parameter: Tissue Value: Shoot Apical Meristem Region
  misc_feature: MA Experiment ID: 108462 Result: Down-regulated in Transcription
  misc_feature: MA Experiment 108462 PARAMETER Experiment Name: At_Germinating_Seeds_cDNA_P Parameter: Age (day) Value: 2 vs. 0
  misc_feature: MA Experiment 108462 PARAMETER Experiment Name: At_Germinating_Seeds_cDNA_P Parameter: Tissue Value: Germinating Seeds
  misc_feature: MA Experiment ID: 108463 Result: Down-regulated in Transcription
  misc_feature: MA Experiment 108463 PARAMETER Experiment Name: At_Germinating_Seeds_cDNA_P Parameter: Age (day) Value: 3 vs. 0
  misc_feature: MA Experiment 108463 PARAMETER Experiment Name: At_Germinating_Seeds_cDNA_P Parameter: Tissue Value: Germinating Seeds
  misc_feature: MA Experiment ID: 108464 Result: Down-regulated in Transcription
  misc_feature: MA Experiment 108464 PARAMETER Experiment Name: At_Germinating_Seeds_cDNA_P Parameter: Age (day) Value: 4 vs. 0
  misc_feature: MA Experiment 108464 PARAMETER Experiment Name: At_Germinating_Seeds_cDNA_P Parameter: Tissue Value: Germinating Seeds
  misc_feature: MA Experiment ID: 20000070 Result: Up-regulated in Transcription
  misc_feature: MA Experiment 20000070 PARAMETER Experiment Name: At_100uM_ABA_Mutants_cDNA_P Parameter: Plant Line Value: CS24
  misc_feature: MA Experiment 20000070 PARAMETER Experiment Name: At_100uM_ABA_Mutants_cDNA_P Parameter: Timepoint (hr) Value: 6
  misc_feature: MA Experiment 20000070 PARAMETER Experiment Name: At_100uM_ABA_Mutants_cDNA_P Parameter: Tissue Value: Aerial
  misc_feature: MA Experiment 20000070 PARAMETER Experiment Name: At_100uM_ABA_Mutants_cDNA_P Parameter: Treatment Value: 100uM ABA vs. No Treatment
  misc_feature: MA Experiment ID: 20000071 Result: Up-regulated in Transcription
  misc_feature: MA Experiment 20000071 PARAMETER Experiment Name: At_100uM_ABA_Mutants_cDNA_P Parameter: Plant Line Value: CS8104
  misc_feature: MA Experiment 20000071 PARAMETER Experiment Name: At_100uM_ABA_Mutants_cDNA_P Parameter: Timepoint (hr) Value: 6
  misc_feature: MA Experiment 20000071 PARAMETER Experiment Name: At_100uM_ABA_Mutants_cDNA_P Parameter: Tissue Value: Aerial
  misc_feature: MA Experiment 20000071 PARAMETER Experiment Name: At_100uM_ABA_Mutants_cDNA_P Parameter: Treatment Value: 100uM ABA vs. No Treatment
  misc_feature: MA Experiment ID: 20000072 Result: Up-regulated in Transcription
  misc_feature: MA Experiment 20000072 PARAMETER Experiment Name: At_100uM_ABA_Mutants_cDNA_P Parameter: Plant Line Value: CS8105
  misc_feature: MA Experiment 20000072 PARAMETER Experiment Name: At_100uM_ABA_Mutants_cDNA_P Parameter: Timepoint (hr) Value: 6
  misc_feature: MA Experiment 20000072 PARAMETER Experiment Name: At_100uM_ABA_Mutants_cDNA_P Parameter: Tissue Value: Aerial
  misc_feature: MA Experiment 20000072 PARAMETER Experiment Name: At_100uM_ABA_Mutants_cDNA_P Parameter: Treatment Value: 100uM ABA vs. No Treatment
  misc_feature: MA Experiment ID: 20000086 Result: Up-regulated in Transcription
  misc_feature: MA Experiment 20000086 PARAMETER Experiment Name: At_100uM_ABA_Mutants_cDNA_P Parameter: Plant Line Value: CS22
  misc_feature: MA Experiment 20000086 PARAMETER Experiment Name: At_100uM_ABA_Mutants_cDNA_P Parameter: Timepoint (hr) Value: 6
  misc_feature: MA Experiment 20000086 PARAMETER Experiment Name: At_100uM_ABA_Mutants_cDNA_P Parameter: Tissue Value: Aerial
  misc_feature: MA Experiment 20000086 PARAMETER Experiment Name: At_100uM_ABA_Mutants_cDNA_P Parameter: Treatment Value: 100uM ABA vs. No Treatment
  misc_feature: MA Experiment ID: 20000087 Result: Up-regulated in Transcription
  misc_feature: MA Experiment 20000087 PARAMETER Experiment Name: At_100uM_ABA_Mutants_cDNA_P Parameter: Plant Line Value: WS
  misc_feature: MA Experiment 20000087 PARAMETER Experiment Name: At_100uM_ABA_Mutants_cDNA_P Parameter: Timepoint (hr) Value: 6
  misc_feature: MA Experiment 20000087 PARAMETER Experiment Name: At_100uM_ABA_Mutants_cDNA_P Parameter: Tissue Value: Aerial
  misc_feature: MA Experiment 20000087 PARAMETER Experiment Name: At_100uM_ABA_Mutants_cDNA_P Parameter: Treatment Value: 100uM ABA vs. No Treatment
  misc_feature: MA Experiment ID: 20000088 Result: Up-regulated in Transcription
  misc_feature: MA Experiment 20000088 PARAMETER Experiment Name: At_100uM_ABA_Mutants_cDNA_P Parameter: Plant Line Value: Landsberg
  misc_feature: MA Experiment 20000088 PARAMETER Experiment Name: At_100uM_ABA_Mutants_cDNA_P Parameter: Timepoint (hr) Value: 6
  misc_feature: MA Experiment 20000088 PARAMETER Experiment Name: At_100uM_ABA_Mutants_cDNA_P Parameter: Tissue Value: Aerial
  misc_feature: MA Experiment 20000088 PARAMETER Experiment Name: At_100uM_ABA_Mutants_cDNA_P Parameter: Treatment Value: 100uM ABA vs. No Treatment
  misc_feature: MA Experiment ID: 20000090 Result: Up-regulated in Transcription
  misc_feature: MA Experiment ID: 20000111 Result: Down-regulated in Transcription
  misc_feature: MA Experiment 20000111 PARAMETER Experiment Name: At_42deg_Heat_cDNA_P Parameter: Temperature (deg C) Value: 42 vs. 22
  misc_feature: MA Experiment 20000111 PARAMETER Experiment Name: At_42deg_Heat_cDNA_P Parameter: Timepoint (hr) Value: 6
  misc_feature: MA Experiment 20000111 PARAMETER Experiment Name: At_42deg_Heat_cDNA_P Parameter: Tissue Value: Aerial
  misc_feature: MA Experiment ID: 20000113 Result: Down-regulated in Transcription
  misc_feature: MA Experiment 20000113 PARAMETER Experiment Name: At_42deg_Heat_cDNA_P Parameter: Temperature (deg C) Value: 42 vs. 22
  misc_feature: MA Experiment 20000113 PARAMETER Experiment Name: At_42deg_Heat_cDNA_P Parameter: Timepoint (hr) Value: 8
  misc_feature: MA Experiment 20000113 PARAMETER Experiment Name: At_42deg_Heat_cDNA_P Parameter: Tissue Value: Aerial
  misc_feature: MA Experiment ID: 20000117 Result: Up-regulated in Transcription
  misc_feature: MA Experiment 20000117 PARAMETER Experiment Name: At_100uM_ABA_Mutants_cDNA_P Parameter: Plant Line Value: Columbia
  misc_feature: MA Experiment 20000117 PARAMETER Experiment Name: At_100uM_ABA_Mutants_cDNA_P Parameter: Timepoint (hr) Value: 6
  misc_feature: MA Experiment 20000117 PARAMETER Experiment Name: At_100uM_ABA_Mutants_cDNA_P Parameter: Tissue Value: Aerial
  misc_feature: MA Experiment 20000117 PARAMETER Experiment Name: At_100uM_ABA_Mutants_cDNA_P Parameter: Treatment Value: 100uM ABA vs. No Treatment
  misc_feature: MA Experiment ID: 20000184 Result: Down-regulated in Transcription
  misc_feature: MA Experiment 20000184 PARAMETER Experiment Name: At_Shoots__P Parameter: Age (day) Value: 7
  misc_feature: MA Experiment 20000184 PARAMETER Experiment Name: At_Shoots__P Parameter: Tissue Value: Shoots vs. Whole Plant
  misc_feature: MA Experiment ID: 20000185 Result: Down-regulated in Transcription
  misc_feature: MA Experiment 20000185 PARAMETER Experiment Name: At_Roots__P Parameter: Age (day) Value: 7 vs. 21
  misc_feature: MA Experiment 20000185 PARAMETER Experiment Name: At_Roots__P Parameter: Organism Value: A. thaliana
  misc_feature: MA Experiment 20000185 PARAMETER Experiment Name: At_Roots__P Parameter: Tissue Value: Roots vs. Whole Plant
  misc_feature: MA Experiment ID: 20000234 Result: Down-regulated in Transcription
  misc_feature: MA Experiment 20000234 PARAMETER Experiment Name: At_Siliques_P Parameter: Age (day) Value: 21
  misc_feature: MA Experiment 20000234 PARAMETER Experiment Name: At_Siliques_P Parameter: Organism Value: A. thaliana
  misc_feature: MA Experiment 20000234 PARAMETER Experiment Name: At_Siliques_P Parameter: Plant Line Value: WS
  misc_feature: MA Experiment 20000234 PARAMETER Experiment Name: At_Siliques_P Parameter: Tissue Value: Less Than 5mm Siliques vs. Whole Plant
  misc_feature: MA Experiment ID: 20000264 Result: Down-regulated in Transcription
  misc_feature: MA Experiment 20000264 PARAMETER Experiment Name: At_Open_Flower_P Parameter: Age (day) Value: 21
  misc_feature: MA Experiment 20000264 PARAMETER Experiment Name: At_Open_Flower_P Parameter: Plant Line Value: WS
  misc_feature: MA Experiment 20000264 PARAMETER Experiment Name: At_Open_Flower_P Parameter: Tissue Value: Open Flower vs. Whole Plant
  misc_feature: MA Experiment ID: 20000265 Result: Down-regulated in Transcription
  misc_feature: MA Experiment 20000265 PARAMETER Experiment Name: At_Open_Flower_P Parameter: Age (day) Value: 21
  misc_feature: MA Experiment 20000265 PARAMETER Experiment Name: At_Open_Flower_P Parameter: Plant Line Value: WS
  misc_feature: MA Experiment 20000265 PARAMETER Experiment Name: At_Open_Flower_P Parameter: Tissue Value: Closed Flower vs. Whole Plant
  misc_feature: MA Experiment ID: 20000286 Result: Down-regulated in Transcription
  misc_feature: MA Experiment 20000286 PARAMETER Experiment Name: At_Open_Flower_P Parameter: Age (day) Value: 21
  misc_feature: MA Experiment 20000286 PARAMETER Experiment Name: At_Open_Flower_P Parameter: Plant Line Value: WS
  misc_feature: MA Experiment 20000286 PARAMETER Experiment Name: At_Open_Flower_P Parameter: Tissue Value: Half Open vs. Whole Plant
  misc_feature: MA Experiment ID: 20000437 Result: Up-regulated in Transcription
  misc_feature: MA Experiment 20000437 PARAMETER Experiment Name: At_Drought_P Parameter: Age (day) Value: 8
  misc_feature: MA Experiment 20000437 PARAMETER Experiment Name: At_Drought_P Parameter: Organism Value: A. thaliana
  misc_feature: MA Experiment 20000437 PARAMETER Experiment Name: At_Drought_P Parameter: Plant Line Value: WS
  misc_feature: MA Experiment 20000437 PARAMETER Experiment Name: At_Drought_P Parameter: Timepoint (hr) Value: 24
  misc_feature: MA Experiment 20000437 PARAMETER Experiment Name: At_Drought_P Parameter: Tissue Value: Whole Plant
  misc_feature: MA Experiment 20000437 PARAMETER Experiment Name: At_Drought_P Parameter: Treatment Value: Drought vs. No Drought
  misc_feature: MA Experiment ID: 20000438 Result: Down-regulated in Transcription
  misc_feature: MA Experiment 20000438 PARAMETER Experiment Name: At_Shoots__P Parameter: Age (day) Value: 14
  misc_feature: MA Experiment 20000438 PARAMETER Experiment Name: At_Shoots__P Parameter: Tissue Value: Shoots vs. Whole Plant
  misc_feature: MA Experiment ID: 20000439 Result: Down-regulated in Transcription
  misc_feature: MA Experiment 20000439 PARAMETER Experiment Name: At_Roots__P Parameter: Age (day) Value: 14 vs. 21
  misc_feature: MA Experiment 20000439 PARAMETER Experiment Name: At_Roots__P Parameter: Organism Value: A. thaliana
  misc_feature: MA Experiment 20000439 PARAMETER Experiment Name: At_Roots__P Parameter: Tissue Value: Roots vs. Whole Plant
  misc_feature: MA Experiment ID: 20000794 Result: Down-regulated in Transcription
  misc_feature: MA Experiment 20000794 PARAMETER Experiment Name: At_Petals_P Parameter: Age (day) Value: 23-25 days
  misc_feature: MA Experiment 20000794 PARAMETER Experiment Name: At_Petals_P Parameter: Plant Line Value: WS
  misc_feature: MA Experiment 20000794 PARAMETER Experiment Name: At_Petals_P Parameter: Tissue Value: Petals vs. Whole plant
  misc_feature: MA Experiment ID: 20001247 Result: Down-regulated in Transcription
  misc_feature: MA Experiment 20001247 PARAMETER Experiment Name: At_Far-red-induction_P Parameter: Age (day) Value: 7
  misc_feature: MA Experiment 20001247 PARAMETER Experiment Name: At_Far-red-induction_P Parameter: Light Value: Far-red vs. White
  misc_feature: MA Experiment 20001247 PARAMETER Experiment Name: At_Far-red-induction_P Parameter: Organism Value: A. thaliana
  misc_feature: MA Experiment 20001247 PARAMETER Experiment Name: At_Far-red-induction_P Parameter: Plant Line Value: Columbia
  misc_feature: MA Experiment 20001247 PARAMETER Experiment Name: At_Far-red-induction_P Parameter: Timepoint (hr) Value: 1
  misc_feature: MA Experiment 20001247 PARAMETER Experiment Name: At_Far-red-induction_P Parameter: Tissue Value: Whole Plant
  misc_feature: MA Experiment ID: 20001248 Result: Up-regulated in Transcription
  misc_feature: MA Experiment 20001248 PARAMETER Experiment Name: At_Far-red-induction_P Parameter: Age (day) Value: 7
  misc_feature: MA Experiment 20001248 PARAMETER Experiment Name: At_Far-red-induction_P Parameter: Light Value: Far-red vs. White
  misc_feature: MA Experiment 20001248 PARAMETER Experiment Name: At_Far-red-induction_P Parameter: Organism Value: A. thaliana
  misc_feature: MA Experiment 20001248 PARAMETER Experiment Name: At_Far-red-induction_P Parameter: Plant Line Value: Columbia
  misc_feature: MA Experiment 20001248 PARAMETER Experiment Name: At_Far-red-induction_P Parameter: Timepoint (hr) Value: 4
  misc_feature: MA Experiment 20001248 PARAMETER Experiment Name: At_Far-red-induction_P Parameter: Tissue Value: Whole Plant
  misc_feature: MA Experiment ID: 20001905 Result: Down-regulated in Transcription
  misc_feature: MA Experiment 20001905 PARAMETER Experiment Name: At_Drought_Reproduction_P Parameter: Age (day) Value: 40
  misc_feature: MA Experiment 20001905 PARAMETER Experiment Name: At_Drought_Reproduction_P Parameter: Organism Value: A. thaliana
  misc_feature: MA Experiment 20001905 PARAMETER Experiment Name: At_Drought_Reproduction_P Parameter: Plant Line Value: WS
  misc_feature: MA Experiment 20001905 PARAMETER Experiment Name: At_Drought_Reproduction_P Parameter: Timepoint (day) Value: 10
  misc_feature: MA Experiment 20001905 PARAMETER Experiment Name: At_Drought_Reproduction_P Parameter: Tissue Value: Rosettes
  misc_feature: MA Experiment 20001905 PARAMETER Experiment Name: At_Drought_Reproduction_P Parameter: Treatment Value: Drought vs. No Drought
ggttcagtctcttcgaagctcgtcgtctctctcttcaaaactccggtgaaaatggcgtcgcttactctccggtgcgattcgacgcatcttttgccttcccgtgatgttgtcaagggaacaaaaccatttggaacgagcttggtgtatcctaggatcatatcgaagaagtttaatgttagaatgagagtgatacctgaggaaggagatgtgttctcttcttctaagagtaatggatcatcaatggggattgagttacagccagatttggtttcgtttggaacattagcagctgaaatgattcctacaacaatggattctcctgaagttgaggatgaagagtttgatttagatcgacctactgatggatttgcgtctattcctcaagctattgaagatattcgacatggcaagatggtagttgttgtagatgatgaagatagagaaaacgaaggagatttgataatggcggcatctttggctacacctgaagctatggcttttgttgtaaagcatgggactggaatcgtgtgtgtgagcatgaaaggcgaagacttggagaggttagagcttcctttaatggtaacgcgtaaggataacgaggaaaaactccgcacggccttcacggtttcagtggacgcaaaaaagggaacatccacaggtgtctcagctcgtgatagggcgcaaacaatattaacccttgcatcaaaagattcaaaacctgaagatttcaatcgtcctggtcatatttttcctttgagatacagagaaggtggtgttcttaaaagagcagggcatacagaagcctctgttgacttgactgtgttggccggtttagaaccagtatctgttttatgtgagattgtagatgatgatggttccatggctagattaccaagactccgccaattcgctcaagagaacaacttgaaattaatttcaatcgctgatttaatcagataccgaaggaaaagagagagactggttgagtttactgcggttgcgcctataccgacaatgtggggaccattcaaagcacattgctttaagtcattacttgatggagttgagcacattgcaatggtcaagggagaaatcggagatgggaaggatattctcgtgagagtacacgcggagtgtatcacagatgatatattcggaaatagctctggtggaaaacagttagcgattgcaatgagactgattgaagaaaatgggagaggtgtttttgtctacttacgtggtcctgaaagtaaaggcattgatctaagccacaagcctcgtacttacaacaccaattcagatcaagccgagggtgtttcatttcccgttgcttcacgggaatacggcattggagcacaaattctaagggatcttggagttagagagatgaaggtgatgacgaataatccagcacattacgttggtcttaaaggctatggtttatcaatttctggtaaggttccactcattactactccttaagtgttgttttgaccgttgtttgattacgttaagagacgacacgtgtcggcttcttgagtgacttagtttgttgtttagttgtggttttggcgcctaaatcatgtgatctgatattgtgttttttgacctccataattatcattagaattattttaaatggc

SEQ ID NO: 99725 - protein, 493 aa, Arabidopsis thaliana
  peptide (1)..(493): Ceres Seq. ID no. 13603516
  misc_feature (126)..(323): Pfam Name: 3,4-dihydroxy-2-butanone 4-phosphate synthase Pfam Description: 3,4-dihydroxy-2-butanone 4-phosphate synthase
  misc_feature (18)..(493): Homolog of NCBI NO: 30681714 NR Description: GTP cyclohydrolase -related [Arabidopsis thaliana]
  misc_feature (61)..(493): Homolog of NCBI NO: 25290324 NR Description: probable GTP cyclohydrolase [imported] - thaliana >gi|4544447|gb|AAD22355.1| putative GTP cyclohydrolase
  misc_feature (2)..(491): Homolog of NCBI NO: 27735197 NR Description: Riboflavin biosynthesis protein ribA [Includes:
  misc_feature (53)..(491): Homolog of NCBI NO: 7436011 NR Description: GTP cyclohydrolase II (EC 3.5.4.25) / 3,
  misc_feature (155)..(491): Homolog of NCBI NO: 30697989 NR Description: GTP cyclohydrolase II;
  misc_feature (91)..(491): Homolog of NCBI NO: 29367375 NR Description: GTP cyclohydrolase
  misc_feature (88)..(491): Homolog of NCBI NO: 18424277 NR Description: GTP cyclohydrolase II /
  misc_feature (124)..(489): Homolog of NCBI NO: 23053279 NR Description: hypothetical protein [Geobacter metallireducens]
  misc_feature (123)..(493): Homolog of NCBI NO: 15605862 NR Description: GTP cyclohydrolase II [Aquifex aeolicus]
  misc_feature (112)..(489): Homolog of NCBI NO: 23018011 NR Description: hypothetical protein [Thermobifida fusca]
GSVSSKLVVSLFKTPVKMASLTLRCDSTHLLPSRDVVKGTKPFGTSLVYPRIISKKFNVRMRVIPEEGDVFSSSKSNGSSMGIELQPDLVSFGTLAAEMIPTTMDSPEVEDEEFDLDRPTDGFASIPQAIEDIRHGKMVVVVDDEDRENEGDLIMAASLATPEAMAFVVKHGTGIVCVSMKGEDLERLELPLMVTRKDNEEKLRTAFTVSVDAKKGTSTGVSARDRAQTILTLASKDSKPEDFNRPGHIFPLRYREGGVLKRAGHTEASVDLTVLAGLEPVSVLCEIVDDDGSMARLPRLRQFAQENNLKLISIADLIRYRRKRERLVEFTAVAPIPTMWGPFKAHCFKSLLDGVEHIAMVKGEIGDGKDILVRVHAECITDDIFGNSSGGKQLAIAMRLIEENGRGVFVYLRGPESKGIDLSHKPRTYNTNSDQAEGVSFPVASREYGIGAQILRDLGVREMKVMTNNPAHYVGLKGYGLSISGKVPLITTP

SEQ ID NO: 99726 - protein, 476 aa, Arabidopsis thaliana
  peptide (1)..(476): Ceres Seq. ID no. 13603517
  misc_feature (109)..(306): Pfam Name: 3,4-dihydroxy-2-butanone 4-phosphate synthase Pfam Description: 3,4-dihydroxy-2-butanone 4-phosphate synthase
  misc_feature (1)..(476): Homolog of NCBI NO: 30681714 NR Description: GTP cyclohydrolase -related [Arabidopsis thaliana]
  misc_feature (44)..(476): Homolog of NCBI NO: 25290324 NR Description: probable GTP cyclohydrolase [imported] - thaliana >gi|4544447|gb|AAD22355.1| putative GTP cyclohydrolase
  misc_feature (1)..(474): Homolog of NCBI NO: 27735197 NR Description: Riboflavin biosynthesis protein ribA [Includes:
  misc_feature (36)..(474): Homolog of NCBI NO: 7436011 NR Description: GTP cyclohydrolase II (EC 3.5.4.25) / 3,
  misc_feature (138)..(474): Homolog of NCBI NO: 30697989 NR Description: GTP cyclohydrolase II;
  misc_feature (74)..(474): Homolog of NCBI NO: 29367375 NR Description: GTP cyclohydrolase
  misc_feature (71)..(474): Homolog of NCBI NO: 18424277 NR Description: GTP cyclohydrolase II /
  misc_feature (107)..(472): Homolog of NCBI NO: 23053279 NR Description: hypothetical protein [Geobacter metallireducens]
  misc_feature (106)..(476): Homolog of NCBI NO: 15605862 NR Description: GTP cyclohydrolase II [Aquifex aeolicus]
  misc_feature (95)..(472): Homolog of NCBI NO: 23018011 NR Description: hypothetical protein [Thermobifida fusca]
MASLTLRCDSTHLLPSRDVVKGTKPFGTSLVYPRIISKKFNVRMRVIPEEGDVFSSSKSNGSSMGIELQPDLVSFGTLAAEMIPTTMDSPEVEDEEFDLDRPTDGFASIPQAIEDIRHGKMVVVVDDEDRENEGDLIMAASLATPEAMAFVVKHGTGIVCVSMKGEDLERLELPLMVTRKDNEEKLRTAFTVSVDAKKGTSTGVSARDRAQTILTLASKDSKPEDFNRPGHIFPLRYREGGVLKRAGHTEASVDLTVLAGLEPVSVLCEIVDDDGSMARLPRLRQFAQENNLKLISIADLIRYRRKRERLVEFTAVAPIPTMWGPFKAHCFKSLLDGVEHIAMVKGEIGDGKDILVRVHAECITDDIFGNSSGGKQLAIAMRLIEENGRGVFVYLRGPESKGIDLSHKPRTYNTNSDQAEGVSFPVASREYGIGAQILRDLGVREMKVMTNNPAHYVGLKGYGLSISGKVPLITTP

SEQ ID NO: 99727 - protein, 433 aa, Arabidopsis thaliana
  peptide (1)..(433): Ceres Seq. ID no. 13603518
  misc_feature (66)..(263): Pfam Name: 3,4-dihydroxy-2-butanone 4-phosphate synthase Pfam Description: 3,4-dihydroxy-2-butanone 4-phosphate synthase
  misc_feature (1)..(433): Homolog of NCBI NO: 30681714 NR Description: GTP cyclohydrolase -related [Arabidopsis thaliana]
  misc_feature (1)..(433): Homolog of NCBI NO: 25290324 NR Description: probable GTP cyclohydrolase [imported] - thaliana >gi|4544447|gb|AAD22355.1| putative GTP cyclohydrolase
  misc_feature (1)..(431): Homolog of NCBI NO: 27735197 NR Description: Riboflavin biosynthesis protein ribA [Includes:
  misc_feature (1)..(431): Homolog of NCBI NO: 7436011 NR Description: GTP cyclohydrolase II (EC 3.5.4.25) / 3,
  misc_feature (95)..(431): Homolog of NCBI NO: 30697989 NR Description: GTP cyclohydrolase II;
  misc_feature (31)..(431): Homolog of NCBI NO: 29367375 NR Description: GTP cyclohydrolase
  misc_feature (28)..(431): Homolog of NCBI NO: 18424277 NR Description: GTP cyclohydrolase II /
  misc_feature (64)..(429): Homolog of NCBI NO: 23053279 NR Description: hypothetical protein [Geobacter metallireducens]
  misc_feature (63)..(433): Homolog of NCBI NO: 15605862 NR Description: GTP cyclohydrolase II [Aquifex aeolicus]
  misc_feature (52)..(429): Homolog of NCBI NO: 23018011 NR Description: hypothetical protein [Thermobifida fusca]
MRVIPEEGDVFSSSKSNGSSMGIELQPDLVSFGTLAAEMIPTTMDSPEVEDEEFDLDRPTDGFASIPQAIEDIRHGKMVVVVDDEDRENEGDLIMAASLATPEAMAFVVKHGTGIVCVSMKGEDLERLELPLMVTRKDNEEKLRTAFTVSVDAKKGTSTGVSARDRAQTILTLASKDSKPEDFNRPGHIFPLRYREGGVLKRAGHTEASVDLTVLAGLEPVSVLCEIVDDDGSMARLPRLRQFAQENNLKLISIADLIRYRRKRERLVEFTAVAPIPTMWGPFKAHCFKSLLDGVEHIAMVKGEIGDGKDILVRVHAECITDDIFGNSSGGKQLAIAMRLIEENGRGVFVYLRGPESKGIDLSHKPRTYNTNSDQAEGVSFPVASREYGIGAQILRDLGVREMKVMTNNPAHYVGLKGYGLSISGKVPLITTP

SEQ ID NO: 99728 - DNA, 1215 bp, Arabidopsis thaliana
  misc_feature (1)..(1215): Ceres Seq. ID no. 13603523
  misc_feature: MA Experiment ID: 20000111 Result: Down-regulated in Transcription
  misc_feature: MA Experiment 20000111 PARAMETER Experiment Name: At_42deg_Heat_cDNA_P Parameter: Temperature (deg C) Value: 42 vs. 22
  misc_feature: MA Experiment 20000111 PARAMETER Experiment Name: At_42deg_Heat_cDNA_P Parameter: Timepoint (hr) Value: 6
  misc_feature: MA Experiment 20000111 PARAMETER Experiment Name: At_42deg_Heat_cDNA_P Parameter: Tissue Value: Aerial
aaagggaacgataccattagtcccaataccaatccttgcaaaattcaaactcaaacaaaccgtttatctcacgcgccgccgtactcgccacgatccgtctttggagaccaatttatggagccgccgaagggagataccgtagtgaagactgaggtcccggtgaaggatccatcgctaagcgtcgtcgattcgaaaacgaagggagtcgaggatgcgaacactgagatagccttgtccgatgaggttgaaatcgagacgaagggaagcgattcgacaccggtgaaagctccgagtcgaacatcgtctggatcgaagaaatctgtacattggagccccgaattggtgtctggatctcaggaaccggatcagaaagctgcatcgtcttcttcggctggatctaatccgtatattgctcgttctccagctgagacttcagatgcttcgttgaaagatacgatggagactgtgaaaggagtgcttggtagatggggaaagagggttgcagaagcagcaaagaagacggagagccttgccgggaacacatggcaacacctgagaactgctccgagttttgcggatgctgcaatgggaagaattgcacagagtacaaaggtctttgcagaaggaggatatgagaagatattccgacaaacctttgagacagatcccgaagaacagttgctaaattcttttgcatgttacttgtcaacatcagctggcccagttatgggagttctatatatatccagtgccaaacttgcttactgtagtgacaaccctctctcctataaaaacggtgatcaaaccgaatggagctattacaaggtagtaattccattacatcaacttaaagcagtgaatccatcagcgagcatagtcaatcctgcagagaagtacatacaggtgatttcggtagacaatcatgagttttggttcatgggttttttaaactacgacggcgctgtcacgtctctgcaagattctttgcaagccggtgctttaaggtcggtgtgatacataactggatgactgatgaccataaaagcatgttgatctccacctcttcttgcttagtcatatcagaagactcaaatttttacattattttgcatttaatctcaatatcctatttactacagaaactagctgaattttacaaatttactttaaaatgttttatcttttgatatttttatgagaagacagcttaattgc

SEQ ID NO: 99729 - protein, 337 aa, Arabidopsis thaliana
  peptide (1)..(337): Ceres Seq. ID no. 13603524
  misc_feature (213)..(290): Pfam Name: GRAM domain Pfam Description: GRAM domain
  misc_feature (39)..(337): Homolog of NCBI NO: 18399985 NR Description: GRAM domain-containing protein [Arabidopsis >gi|20197888|gb|AAM15301.1| Expressed protein [Arabidopsis
  misc_feature (39)..(337): Homolog of NCBI NO: 26452129 NR Description: unknown protein [Arabidopsis thaliana]
  misc_feature (39)..(337): Homolog of NCBI NO: 21592789 NR Description: unknown [Arabidopsis thaliana]
  misc_feature (105)..(248): Homolog of NCBI NO: 15236123 NR Description: GRAM domain-containing protein [Arabidopsis
  misc_feature (276)..(333): Homolog of NCBI NO: 15236123 NR Description: GRAM domain-containing protein [Arabidopsis
  misc_feature (88)..(336): Homolog of NCBI NO: 34902414 NR Description: Putative FH protein interacting protein FIP1
  misc_feature (121)..(331): Homolog of NCBI NO: 15217869 NR Description: GRAM domain-containing protein [Arabidopsis
  misc_feature (154)..(332): Homolog of NCBI NO: 34906818 NR Description: contains EST C91668(E31216)~similar to FH protein
  misc_feature (129)..(333): Homolog of NCBI NO: 29788871 NR Description: putative ABA-responsive protein [Oryza sativa
  misc_feature (196)..(332): Homolog of NCBI NO: 33146631 NR Description: putative FH protein interacting protein FIP1
KGNDTISPNTNPCKIQTQTNRLSHAPPYSPRSVFGDQFMEPPKGDTVVKTEVPVKDPSLSVVDSKTKGVEDANTEIALSDEVEIETKGSDSTPVKAPSRTSSGSKKSVHWSPELVSGSQEPDQKAASSSSAGSNPYIARSPAETSDASLKDTMETVKGVLGRWGKRVAEAAKKTESLAGNTWQHLRTAPSFADAAMGRIAQSTKVFAEGGYEKIFRQTFETDPEEQLLNSFACYLSTSAGPVMGVLYISSAKLAYCSDNPLSYKNGDQTEWSYYKVVIPLHQLKAVNPSASIVNPAEKYIQVISVDNHEFWFMGFLNYDGAVTSLQDSLQAGALRSV

SEQ ID NO: 99730 - protein, 299 aa, Arabidopsis thaliana
  peptide (1)..(299): Ceres Seq. ID no. 13603525
  misc_feature (175)..(252): Pfam Name: GRAM domain Pfam Description: GRAM domain
  misc_feature (1)..(299): Homolog of NCBI NO: 18399985 NR Description: GRAM domain-containing protein [Arabidopsis >gi|20197888|gb|AAM15301.1| Expressed protein [Arabidopsis
  misc_feature (1)..(299): Homolog of NCBI NO: 26452129 NR Description: unknown protein [Arabidopsis thaliana]
  misc_feature (1)..(299): Homolog of NCBI NO: 21592789 NR Description: unknown [Arabidopsis thaliana]
  misc_feature (67)..(210): Homolog of NCBI NO: 15236123 NR Description: GRAM domain-containing protein [Arabidopsis
  misc_feature (238)..(295): Homolog of NCBI NO: 15236123 NR Description: GRAM domain-containing protein [Arabidopsis
  misc_feature (50)..(298): Homolog of NCBI NO: 34902414 NR Description: Putative FH protein interacting protein FIP1
  misc_feature (83)..(293): Homolog of NCBI NO: 15217869 NR Description: GRAM domain-containing protein [Arabidopsis
  misc_feature (116)..(294): Homolog of NCBI NO: 34906818 NR Description: contains EST C91668(E31216)~similar to FH protein
  misc_feature (91)..(295): Homolog of NCBI NO: 29788871 NR Description: putative ABA-responsive protein [Oryza sativa
  misc_feature (158)..(294): Homolog of NCBI NO: 33146631 NR Description: putative FH protein interacting protein FIP1
MEPPKGDTVVKTEVPVKDPSLSVVDSKTKGVEDANTEIALSDEVEIETKGSDSTPVKAPSRTSSGSKKSVHWSPELVSGSQEPDQKAASSSSAGSNPYIARSPAETSDASLKDTMETVKGVLGRWGKRVAEAAKKTESLAGNTWQHLRTAPSFADAAMGRIAQSTKVFAEGGYEKIFRQTFETDPEEQLLNSFACYLSTSAGPVMGVLYISSAKLAYCSDNPLSYKNGDQTEWSYYKVVIPLHQLKAVNPSASIVNPAEKYIQVISVDNHEFWFMGFLNYDGAVTSLQDSLQAGALRSV

SEQ ID NO: 99731 - protein, 185 aa, Arabidopsis thaliana
  peptide (1)..(185): Ceres Seq. ID no. 13603526
  misc_feature (61)..(138): Pfam Name: GRAM domain Pfam Description: GRAM domain
  misc_feature (1)..(185): Homolog of NCBI NO: 18399985 NR Description: GRAM domain-containing protein [Arabidopsis >gi|20197888|gb|AAM15301.1| Expressed protein [Arabidopsis
  misc_feature (1)..(185): Homolog of NCBI NO: 26452129 NR Description: unknown protein [Arabidopsis thaliana]
  misc_feature (1)..(185): Homolog of NCBI NO: 21592789 NR Description: unknown [Arabidopsis thaliana]
  misc_feature (1)..(96): Homolog of NCBI NO: 15236123 NR Description: GRAM domain-containing protein [Arabidopsis
  misc_feature (124)..(181): Homolog of NCBI NO: 15236123 NR Description: GRAM domain-containing protein [Arabidopsis
  misc_feature (1)..(184): Homolog of NCBI NO: 34902414 NR Description: Putative FH protein interacting protein FIP1
  misc_feature (1)..(179): Homolog of NCBI NO: 15217869 NR Description: GRAM domain-containing protein [Arabidopsis
  misc_feature (2)..(180): Homolog of NCBI NO: 34906818 NR Description: contains EST C91668(E31216)~similar to FH protein
  misc_feature (1)..(181): Homolog of NCBI NO: 29788871 NR Description: putative ABA-responsive protein [Oryza sativa
  misc_feature (44)..(180): Homolog of NCBI NO: 33146631 NR Description: putative FH protein interacting protein FIP1
METVKGVLGRWGKRVAEAAKKTESLAGNTWQHLRTAPSFADAAMGRIAQSTKVFAEGGYEKIFRQTFETDPEEQLLNSFACYLSTSAGPVMGVLYISSAKLAYCSDNPLSYKNGDQTEWSYYKVVIPLHQLKAVNPSASIVNPAEKYIQVISVDNHEFWFMGFLNYDGAVTSLQDSLQAGALRSV

SEQ ID NO: 99732 - DNA, 1413 bp, Arabidopsis thaliana
  misc_feature (1)..(1413): Ceres Seq. ID no. 13603527
  misc_feature: MA Experiment ID: 108434 Result: Down-regulated in Transcription
  misc_feature: MA Experiment 108434 PARAMETER Experiment Name: At_Root_Tips_cDNA_P Parameter: Tissue Value: Root Tips
  misc_feature: MA Experiment ID: 108461 Result: Up-regulated in Transcription
  misc_feature: MA Experiment 108461 PARAMETER Experiment Name: At_Germinating_Seeds_cDNA_P Parameter: Age (day) Value: 1 vs. 0
  misc_feature: MA Experiment 108461 PARAMETER Experiment Name: At_Germinating_Seeds_cDNA_P Parameter: Tissue Value: Germinating Seeds
  misc_feature: MA Experiment ID: 108462 Result: Up-regulated in Transcription
  misc_feature: MA Experiment 108462 PARAMETER Experiment Name: At_Germinating_Seeds_cDNA_P Parameter: Age (day) Value: 2 vs. 0
  misc_feature: MA Experiment 108462 PARAMETER Experiment Name: At_Germinating_Seeds_cDNA_P Parameter: Tissue Value: Germinating Seeds
  misc_feature: MA Experiment ID: 108463 Result: Up-regulated in Transcription
  misc_feature: MA Experiment 108463 PARAMETER Experiment Name: At_Germinating_Seeds_cDNA_P Parameter: Age (day) Value: 3 vs. 0
  misc_feature: MA Experiment 108463 PARAMETER Experiment Name: At_Germinating_Seeds_cDNA_P Parameter: Tissue Value: Germinating Seeds
  misc_feature: MA Experiment ID: 108464 Result: Up-regulated in Transcription
  misc_feature: MA Experiment 108464 PARAMETER Experiment Name: At_Germinating_Seeds_cDNA_P Parameter: Age (day) Value: 4 vs. 0
  misc_feature: MA Experiment 108464 PARAMETER Experiment Name: At_Germinating_Seeds_cDNA_P Parameter: Tissue Value: Germinating Seeds
  misc_feature: MA Experiment ID: 108488 Result: Down-regulated in Transcription
  misc_feature: MA Experiment ID: 108489 Result: Up-regulated in Transcription
  misc_feature: MA Experiment ID: 108573 Result: Up-regulated in Transcription
  misc_feature: MA Experiment 108573 PARAMETER Experiment Name: At_Drought_cDNA_P Parameter: Timepoint (hr) Value: 6
  misc_feature: MA Experiment 108573 PARAMETER Experiment Name: At_Drought_cDNA_P Parameter: Tissue Value: Aerial
  misc_feature: MA Experiment 108573 PARAMETER Experiment Name: At_Drought_cDNA_P Parameter: Treatment Value: Drought vs. No Drought
  misc_feature: MA Experiment ID: 108574 Result: Up-regulated in Transcription
  misc_feature: MA Experiment 108574 PARAMETER Experiment Name: At_Wounding__cDNA_P Parameter: Timepoint (hr) Value: 1
  misc_feature: MA Experiment 108574 PARAMETER Experiment Name: At_Wounding__cDNA_P Parameter: Tissue Value: Aerial
  misc_feature: MA Experiment 108574 PARAMETER Experiment Name: At_Wounding__cDNA_P Parameter: Treatment Value: Wounding vs. No Wounding
  misc_feature: MA Experiment ID: 108577 Result: Down-regulated in Transcription
  misc_feature: MA Experiment 108577 PARAMETER Experiment Name: At_42deg_Heat_cDNA_P Parameter: Temperature (deg C) Value: 42 vs. 22
  misc_feature: MA Experiment 108577 PARAMETER Experiment Name: At_42deg_Heat_cDNA_P Parameter: Timepoint (hr) Value: 6
  misc_feature: MA Experiment 108577 PARAMETER Experiment Name: At_42deg_Heat_cDNA_P Parameter: Tissue Value: Aerial
  misc_feature: MA Experiment ID: 108579 Result: Up-regulated in Transcription
  misc_feature: MA Experiment 108579 PARAMETER Experiment Name: At_4deg_Cold_cDNA_P Parameter: Temperature (deg C) Value: 4 vs. 22
  misc_feature: MA Experiment 108579 PARAMETER Experiment Name: At_4deg_Cold_cDNA_P Parameter: Timepoint (hr) Value: 6
  misc_feature: MA Experiment 108579 PARAMETER Experiment Name: At_4deg_Cold_cDNA_P Parameter: Tissue Value: Aerial
  misc_feature: MA Experiment ID: 108585 Result: Up-regulated in Transcription
  misc_feature: MA Experiment 108585 PARAMETER Experiment Name: At_5mM_NaNP_cDNA_P Parameter: Timepoint (hr) Value: 6
  misc_feature: MA Experiment 108585 PARAMETER Experiment Name: At_5mM_NaNP_cDNA_P Parameter: Tissue Value: Aerial
  misc_feature: MA Experiment 108585 PARAMETER Experiment Name: At_5mM_NaNP_cDNA_P Parameter: Treatment Value: null
  misc_feature: MA Experiment ID: 108595 Result: Up-regulated in Transcription
  misc_feature: MA Experiment 108595 PARAMETER Experiment Name: At_Ler-pi_Ovule_cDNA_P Parameter: Plant Line Value: null
  misc_feature: MA Experiment ID: 108605 Result: Up-regulated in Transcription
  misc_feature: MA Experiment 108605 PARAMETER Experiment Name: At_100uM_ABA_cDNA_P Parameter: Timepoint (hr) Value: 6
  misc_feature: MA Experiment 108605 PARAMETER Experiment Name: At_100uM_ABA_cDNA_P Parameter: Tissue Value: Aerial
  misc_feature: MA Experiment 108605 PARAMETER Experiment Name: At_100uM_ABA_cDNA_P Parameter: Treatment Value: 100uM ABA vs. No Treatment
  misc_feature: MA Experiment ID: 108607 Result: Up-regulated in Transcription
  misc_feature: MA Experiment 108607 PARAMETER Experiment Name: At_100uM_ABA_cDNA_P Parameter: Timepoint (hr) Value: 4
  misc_feature: MA Experiment 108607 PARAMETER Experiment Name: At_100uM_ABA_cDNA_P Parameter: Tissue Value: Aerial
  misc_feature: MA Experiment 108607 PARAMETER Experiment Name: At_100uM_ABA_cDNA_P Parameter: Treatment Value: 100uM ABA vs. No Treatment
  misc_feature: MA Experiment ID: 108608 Result: Up-regulated in Transcription
  misc_feature: MA Experiment 108608 PARAMETER Experiment Name: At_100uM_ABA_cDNA_P Parameter: Timepoint (hr) Value: 1
  misc_feature: MA Experiment 108608 PARAMETER Experiment Name: At_100uM_ABA_cDNA_P Parameter: Tissue Value: Aerial
  misc_feature: MA Experiment 108608 PARAMETER Experiment Name: At_100uM_ABA_cDNA_P Parameter: Treatment Value: 100uM ABA vs. No Treatment
  misc_feature: MA Experiment ID: 108609 Result: Up-regulated in Transcription
  misc_feature: MA Experiment 108609 PARAMETER Experiment Name: At_100uM_ABA_cDNA_P Parameter: Timepoint (hr) Value: 24
  misc_feature: MA Experiment 108609 PARAMETER Experiment Name: At_100uM_ABA_cDNA_P Parameter: Tissue Value: Aerial
  misc_feature: MA Experiment 108609 PARAMETER Experiment Name: At_100uM_ABA_cDNA_P Parameter: Treatment Value: 100uM ABA vs. No Treatment
  misc_feature: MA Experiment ID: 108667 Result: Up-regulated in Transcription
  misc_feature: MA Experiment 108667 PARAMETER Experiment Name: At_2mM_SA_cDNA_P Parameter: Plant Line Value: WS
  misc_feature: MA Experiment 108667 PARAMETER Experiment Name: At_2mM_SA_cDNA_P Parameter: Timepoint (hr) Value: 1
  misc_feature: MA Experiment 108667 PARAMETER Experiment Name: At_2mM_SA_cDNA_P Parameter: Treatment Value: 2mM SA vs. No Treatment
  misc_feature: MA Experiment ID: 20000069 Result: Up-regulated in Transcription
  misc_feature: MA Experiment 20000069 PARAMETER Experiment Name: At_100uM_ABA_Mutants_cDNA_P Parameter: Plant Line Value: CS23
  misc_feature: MA Experiment 20000069 PARAMETER Experiment Name: At_100uM_ABA_Mutants_cDNA_P Parameter: Timepoint (hr) Value: 6
  misc_feature: MA Experiment 20000069 PARAMETER Experiment Name: At_100uM_ABA_Mutants_cDNA_P Parameter: Tissue Value: Aerial
  misc_feature: MA Experiment 20000069 PARAMETER Experiment Name: At_100uM_ABA_Mutants_cDNA_P Parameter: Treatment Value: 100uM ABA vs. No Treatment
  misc_feature: MA Experiment ID: 20000070 Result: Up-regulated in Transcription
  misc_feature: MA Experiment 20000070 PARAMETER Experiment Name: At_100uM_ABA_Mutants_cDNA_P Parameter: Plant Line Value: CS24
  misc_feature: MA Experiment 20000070 PARAMETER Experiment Name: At_100uM_ABA_Mutants_cDNA_P Parameter: Timepoint (hr) Value: 6
  misc_feature: MA Experiment 20000070 PARAMETER Experiment Name: At_100uM_ABA_Mutants_cDNA_P Parameter: Tissue Value: Aerial
  misc_feature: MA Experiment 20000070 PARAMETER Experiment Name: At_100uM_ABA_Mutants_cDNA_P Parameter: Treatment Value: 100uM ABA vs. No Treatment
  misc_feature: MA Experiment ID: 20000071 Result: Up-regulated in Transcription
  misc_feature: MA Experiment 20000071 PARAMETER Experiment Name: At_100uM_ABA_Mutants_cDNA_P Parameter: Plant Line Value: CS8104
  misc_feature: MA Experiment 20000071 PARAMETER Experiment Name: At_100uM_ABA_Mutants_cDNA_P Parameter: Timepoint (hr) Value: 6
  misc_feature: MA Experiment 20000071 PARAMETER Experiment Name: At_100uM_ABA_Mutants_cDNA_P Parameter: Tissue Value: Aerial
  misc_feature: MA Experiment 20000071 PARAMETER Experiment Name: At_100uM_ABA_Mutants_cDNA_P Parameter: Treatment Value: 100uM ABA vs. No Treatment
  misc_feature: MA Experiment ID: 20000072 Result: Up-regulated in Transcription
  misc_feature: MA Experiment 20000072 PARAMETER Experiment Name: At_100uM_ABA_Mutants_cDNA_P Parameter: Plant Line Value: CS8105
  misc_feature: MA Experiment 20000072 PARAMETER Experiment Name: At_100uM_ABA_Mutants_cDNA_P Parameter: Timepoint (hr) Value: 6
  misc_feature: MA Experiment 20000072 PARAMETER Experiment Name: At_100uM_ABA_Mutants_cDNA_P Parameter: Tissue Value: Aerial
  misc_feature: MA Experiment 20000072 PARAMETER Experiment Name: At_100uM_ABA_Mutants_cDNA_P Parameter: Treatment Value: 100uM ABA vs. No Treatment
  misc_feature: MA Experiment ID: 20000086 Result: Up-regulated in Transcription
  misc_feature: MA Experiment 20000086 PARAMETER Experiment Name: At_100uM_ABA_Mutants_cDNA_P Parameter: Plant Line Value: CS22
  misc_feature: MA Experiment 20000086 PARAMETER Experiment Name: At_100uM_ABA_Mutants_cDNA_P Parameter: Timepoint (hr) Value: 6
  misc_feature: MA Experiment 20000086 PARAMETER Experiment Name: At_100uM_ABA_Mutants_cDNA_P Parameter: Tissue Value: Aerial
  misc_feature: MA Experiment 20000086 PARAMETER Experiment Name: At_100uM_ABA_Mutants_cDNA_P Parameter: Treatment Value: 100uM ABA vs. No Treatment
  misc_feature: MA Experiment ID: 20000087 Result: Up-regulated in Transcription
  misc_feature: MA Experiment 20000087 PARAMETER Experiment Name: At_100uM_ABA_Mutants_cDNA_P Parameter: Plant Line Value: WS
  misc_feature: MA Experiment 20000087 PARAMETER Experiment Name: At_100uM_ABA_Mutants_cDNA_P Parameter: Timepoint (hr) Value: 6
  misc_feature: MA Experiment 20000087 PARAMETER Experiment Name: At_100uM_ABA_Mutants_cDNA_P Parameter: Tissue Value: Aerial
  misc_feature: MA Experiment 20000087 PARAMETER Experiment Name: At_100uM_ABA_Mutants_cDNA_P Parameter: Treatment Value: 100uM ABA vs. No Treatment
  misc_feature: MA Experiment ID: 20000088 Result: Up-regulated in Transcription
  misc_feature: MA Experiment 20000088 PARAMETER Experiment Name: At_100uM_ABA_Mutants_cDNA_P Parameter: Plant Line Value: Landsberg
  misc_feature: MA Experiment 20000088 PARAMETER Experiment Name: At_100uM_ABA_Mutants_cDNA_P Parameter: Timepoint (hr) Value: 6
  misc_feature: MA Experiment 20000088 PARAMETER Experiment Name: At_100uM_ABA_Mutants_cDNA_P Parameter: Tissue Value: Aerial
  misc_feature: MA Experiment 20000088 PARAMETER Experiment Name: At_100uM_ABA_Mutants_cDNA_P Parameter: Treatment Value: 100uM ABA vs. No Treatment
  misc_feature: MA Experiment ID: 20000090 Result: Up-regulated in Transcription
  misc_feature: MA Experiment ID: 20000111 Result: Down-regulated in Transcription
  misc_feature: MA Experiment 20000111 PARAMETER Experiment Name: At_42deg_Heat_cDNA_P Parameter: Temperature (deg C) Value: 42 vs. 22
  misc_feature: MA Experiment 20000111 PARAMETER Experiment Name: At_42deg_Heat_cDNA_P Parameter: Timepoint (hr) Value: 6
  misc_feature: MA Experiment 20000111 PARAMETER Experiment Name: At_42deg_Heat_cDNA_P Parameter: Tissue Value: Aerial
  misc_feature: MA Experiment ID: 20000113 Result: Down-regulated in Transcription
  misc_feature: MA Experiment 20000113 PARAMETER Experiment Name: At_42deg_Heat_cDNA_P Parameter: Temperature (deg C) Value: 42 vs. 22
  misc_feature: MA Experiment 20000113 PARAMETER Experiment Name: At_42deg_Heat_cDNA_P Parameter: Timepoint (hr) Value: 8
  misc_feature: MA Experiment 20000113 PARAMETER Experiment Name: At_42deg_Heat_cDNA_P Parameter: Tissue Value: Aerial
  misc_feature: MA Experiment ID: 20000117 Result: Up-regulated in Transcription
  misc_feature: MA Experiment 20000117 PARAMETER Experiment Name: At_100uM_ABA_Mutants_cDNA_P Parameter: Plant Line Value: Columbia
  misc_feature: MA Experiment 20000117 PARAMETER Experiment Name: At_100uM_ABA_Mutants_cDNA_P Parameter: Timepoint (hr) Value: 6
  misc_feature: MA Experiment 20000117 PARAMETER Experiment Name: At_100uM_ABA_Mutants_cDNA_P Parameter: Tissue Value: Aerial
  misc_feature: MA Experiment 20000117 PARAMETER Experiment Name: At_100uM_ABA_Mutants_cDNA_P Parameter: Treatment Value: 100uM ABA vs. No Treatment
  misc_feature: MA Experiment ID: 20000166 Result: Up-regulated in Transcription
  misc_feature: MA Experiment 20000166 PARAMETER Experiment Name: At_100uM_ABA_P Parameter: Age (day) Value: 14
  misc_feature: MA Experiment 20000166 PARAMETER Experiment Name: At_100uM_ABA_P Parameter: Organism Value: A. thaliana
  misc_feature: MA Experiment 20000166 PARAMETER Experiment Name: At_100uM_ABA_P Parameter: Plant Line Value: WS
  misc_feature: MA Experiment 20000166 PARAMETER Experiment Name: At_100uM_ABA_P Parameter: Timepoint (hr) Value: 1
  misc_feature: MA Experiment 20000166 PARAMETER Experiment Name: At_100uM_ABA_P Parameter: Tissue Value: Aerial
  misc_feature: MA Experiment 20000166 PARAMETER Experiment Name: At_100uM_ABA_P Parameter: Treatment Value: 100uM ABA vs. No Treatment
  misc_feature: MA Experiment ID: 20000169 Result: Up-regulated in Transcription
  misc_feature: MA Experiment 20000169 PARAMETER Experiment Name: At_100uM_ABA_P Parameter: Age (day) Value: 14
  misc_feature: MA Experiment 20000169 PARAMETER Experiment Name: At_100uM_ABA_P Parameter: Organism Value: A. thaliana
  misc_feature: MA Experiment 20000169 PARAMETER Experiment Name: At_100uM_ABA_P Parameter: Plant Line Value: WS
  misc_feature: MA Experiment 20000169 PARAMETER Experiment Name: At_100uM_ABA_P Parameter: Timepoint (hr) Value: 6
  misc_feature: MA Experiment 20000169 PARAMETER Experiment Name: At_100uM_ABA_P Parameter: Tissue Value: Aerial
  misc_feature: MA Experiment 20000169 PARAMETER Experiment Name: At_100uM_ABA_P Parameter: Treatment Value: 100uM ABA vs. No Treatment
  misc_feature: MA Experiment ID: 20000171 Result: Down-regulated in Transcription
  misc_feature: MA Experiment 20000171 PARAMETER Experiment Name: At_42deg_Heat_P Parameter: Age (day) Value: 14
  misc_feature: MA Experiment 20000171 PARAMETER Experiment Name: At_42deg_Heat_P Parameter: Organism Value: A. thaliana
  misc_feature: MA Experiment 20000171 PARAMETER Experiment Name: At_42deg_Heat_P Parameter: Plant Line Value: WS
  misc_feature: MA Experiment 20000171 PARAMETER Experiment Name: At_42deg_Heat_P Parameter: Temperature (deg C) Value: 42 vs. 22
  misc_feature: MA Experiment 20000171 PARAMETER Experiment Name: At_42deg_Heat_P Parameter: Timepoint (hr) Value: 1
  misc_feature: MA Experiment 20000171 PARAMETER Experiment Name: At_42deg_Heat_P Parameter: Tissue Value: Aerial
  misc_feature: MA Experiment ID: 20000173 Result: Down-regulated in Transcription
  misc_feature: MA Experiment 20000173 PARAMETER Experiment Name: At_42deg_Heat_P Parameter: Age (day) Value: 14
  misc_feature: MA Experiment 20000173 PARAMETER Experiment Name: At_42deg_Heat_P Parameter: Organism Value: A. thaliana
  misc_feature: MA Experiment 20000173 PARAMETER Experiment Name: At_42deg_Heat_P Parameter: Plant Line Value: WS
  misc_feature: MA Experiment 20000173 PARAMETER Experiment Name: At_42deg_Heat_P Parameter: Temperature (deg C) Value: 42 vs. 22
  misc_feature: MA Experiment 20000173 PARAMETER Experiment Name: At_42deg_Heat_P Parameter: Timepoint (hr) Value: 6
  misc_feature: MA Experiment 20000173 PARAMETER Experiment Name: At_42deg_Heat_P Parameter: Tissue Value: Aerial
  misc_feature: MA Experiment ID: 20000182 Result: Up-regulated in Transcription
  misc_feature: MA Experiment 20000182 PARAMETER Experiment Name: At_2mM_SA_P Parameter: Age (day) Value: 14
  misc_feature: MA Experiment 20000182 PARAMETER Experiment Name: At_2mM_SA_P Parameter: Organism Value: A. thaliana
  misc_feature: MA Experiment 20000182 PARAMETER Experiment Name: At_2mM_SA_P Parameter: Plant Line Value: WS
  misc_feature: MA Experiment 20000182 PARAMETER Experiment Name: At_2mM_SA_P Parameter: Timepoint (hr) Value: 6
  misc_feature: MA Experiment 20000182 PARAMETER Experiment Name: At_2mM_SA_P Parameter: Tissue Value: Aerial
  misc_feature: MA Experiment 20000182 PARAMETER Experiment Name: At_2mM_SA_P Parameter: Treatment Value: 2mM SA vs. No Treatment
  misc_feature: MA Experiment ID: 20000184 Result: Down-regulated in Transcription
  misc_feature: MA Experiment 20000184 PARAMETER Experiment Name: At_Shoots__P Parameter: Age (day) Value: 7
  misc_feature: MA Experiment 20000184 PARAMETER Experiment Name: At_Shoots__P Parameter: Tissue Value: Shoots vs. Whole Plant
  misc_feature: MA Experiment ID: 20000185 Result: Down-regulated in Transcription
  misc_feature: MA Experiment 20000185 PARAMETER Experiment Name: At_Roots__P Parameter: Age (day) Value: 7 vs. 21
  misc_feature: MA Experiment 20000185 PARAMETER Experiment Name: At_Roots__P Parameter: Organism Value: A. thaliana
  misc_feature: MA Experiment 20000185 PARAMETER Experiment Name: At_Roots__P Parameter: Tissue Value: Roots vs. Whole Plant
  misc_feature: MA Experiment ID: 20000234 Result: Down-regulated in Transcription
  misc_feature: MA Experiment 20000234 PARAMETER Experiment Name: At_Siliques_P Parameter: Age (day) Value: 21
  misc_feature: MA Experiment 20000234 PARAMETER Experiment Name: At_Siliques_P Parameter: Organism Value: A. thaliana
  misc_feature: MA Experiment 20000234 PARAMETER Experiment Name: At_Siliques_P Parameter: Plant Line Value: WS
  misc_feature: MA Experiment 20000234 PARAMETER Experiment Name: At_Siliques_P Parameter: Tissue Value: Less Than 5mm Siliques vs. Whole Plant
  misc_feature: MA Experiment ID: 20000235 Result: Down-regulated in Transcription
  misc_feature: MA Experiment 20000235 PARAMETER Experiment Name: At_Siliques_P Parameter: Age (day) Value: 21
  misc_feature: MA Experiment 20000235 PARAMETER Experiment Name: At_Siliques_P Parameter: Organism Value: A. thaliana
  misc_feature: MA Experiment 20000235 PARAMETER Experiment Name: At_Siliques_P Parameter: Plant Line Value: WS
  misc_feature: MA Experiment 20000235 PARAMETER Experiment Name: At_Siliques_P Parameter: Tissue Value: 5-10mm Siliques vs. Whole Plant
  misc_feature: MA Experiment ID: 20000264 Result: Down-regulated in Transcription
  misc_feature: MA Experiment 20000264 PARAMETER Experiment Name: At_Open_Flower_P Parameter: Age (day) Value: 21
  misc_feature: MA Experiment 20000264 PARAMETER Experiment Name: At_Open_Flower_P Parameter: Plant Line Value: WS
  misc_feature: MA Experiment 20000264 PARAMETER Experiment Name: At_Open_Flower_P Parameter: Tissue Value: Open Flower vs. Whole Plant
  misc_feature: MA Experiment ID: 20000265 Result: Down-regulated in Transcription
  misc_feature: MA Experiment 20000265 PARAMETER Experiment Name: At_Open_Flower_P Parameter: Age (day) Value: 21
  misc_feature: MA Experiment 20000265 PARAMETER Experiment Name: At_Open_Flower_P Parameter: Plant Line Value: WS
  misc_feature: MA Experiment 20000265 PARAMETER Experiment Name: At_Open_Flower_P Parameter: Tissue Value: Closed Flower vs. Whole Plant
  misc_feature: MA Experiment ID: 20000267 Result: Up-regulated in Transcription
  misc_feature: MA Experiment 20000267 PARAMETER Experiment Name: At_Drought_P Parameter: Age (day) Value: 7
  misc_feature: MA Experiment 20000267 PARAMETER Experiment Name: At_Drought_P Parameter: Organism Value: A. thaliana
  misc_feature: MA Experiment 20000267 PARAMETER Experiment Name: At_Drought_P Parameter: Plant Line Value: WS
  misc_feature: MA Experiment 20000267 PARAMETER Experiment Name: At_Drought_P Parameter: Timepoint (hr) Value: 6
  misc_feature: MA Experiment 20000267 PARAMETER Experiment Name: At_Drought_P Parameter: Tissue Value: Whole Plant
  misc_feature: MA Experiment 20000267 PARAMETER Experiment Name: At_Drought_P Parameter: Treatment Value: Drought vs. No Drought
  misc_feature: MA Experiment ID: 20000286 Result: Down-regulated in Transcription
  misc_feature: MA Experiment 20000286 PARAMETER Experiment Name: At_Open_Flower_P Parameter: Age (day) Value: 21
  misc_feature: MA Experiment 20000286 PARAMETER Experiment Name: At_Open_Flower_P Parameter: Plant Line Value: WS
  misc_feature: MA Experiment 20000286 PARAMETER Experiment Name: At_Open_Flower_P Parameter: Tissue Value: Half Open vs. Whole Plant
  misc_feature: MA Experiment ID: 20000437 Result: Up-regulated in Transcription
  misc_feature: MA Experiment 20000437 PARAMETER Experiment Name: At_Drought_P Parameter: Age (day) Value: 8
  misc_feature: MA Experiment 20000437 PARAMETER Experiment Name: At_Drought_P Parameter: Organism Value: A. thaliana
  misc_feature: MA Experiment 20000437 PARAMETER Experiment Name: At_Drought_P Parameter: Plant Line Value: WS
  misc_feature: MA Experiment 20000437 PARAMETER Experiment Name: At_Drought_P Parameter: Timepoint (hr) Value: 24
  misc_feature: MA Experiment 20000437 PARAMETER Experiment Name: At_Drought_P Parameter: Tissue Value: Whole Plant
  misc_feature: MA Experiment 20000437 PARAMETER Experiment Name: At_Drought_P Parameter: Treatment Value: Drought vs. No Drought
  misc_feature: MA Experiment ID: 20000438 Result: Down-regulated in Transcription
  misc_feature: MA Experiment 20000438 PARAMETER Experiment Name: At_Shoots__P Parameter: Age (day) Value: 14
  misc_feature: MA Experiment 20000438 PARAMETER Experiment Name: At_Shoots__P Parameter: Tissue Value: Shoots vs. Whole Plant
  misc_feature: MA Experiment ID: 20000439 Result: Down-regulated in Transcription
  misc_feature: MA Experiment 20000439 PARAMETER Experiment Name: At_Roots__P Parameter: Age (day) Value: 14 vs. 21
  misc_feature: MA Experiment 20000439 PARAMETER Experiment Name: At_Roots__P Parameter: Organism Value: A. thaliana
  misc_feature: MA Experiment 20000439 PARAMETER Experiment Name: At_Roots__P Parameter: Tissue Value: Roots vs. Whole Plant
  misc_feature: MA Experiment ID: 20000453 Result: Up-regulated in Transcription
  misc_feature: MA Experiment 20000453 PARAMETER Experiment Name: At_100uM_ABA_P Parameter: Age (day) Value: 15
  misc_feature: MA Experiment 20000453 PARAMETER Experiment Name: At_100uM_ABA_P Parameter: Organism Value: A. thaliana
  misc_feature: MA Experiment 20000453 PARAMETER Experiment Name: At_100uM_ABA_P Parameter: Plant Line Value: WS
  misc_feature: MA Experiment 20000453 PARAMETER Experiment Name: At_100uM_ABA_P Parameter: Timepoint (hr) Value: 24
  misc_feature: MA Experiment 20000453 PARAMETER Experiment Name: At_100uM_ABA_P Parameter: Tissue Value: Aerial
  misc_feature: MA Experiment 20000453 PARAMETER Experiment Name: At_100uM_ABA_P Parameter: Treatment Value: 100uM ABA vs. No Treatment
  misc_feature: MA Experiment ID: 20000460 Result: Up-regulated in Transcription
  misc_feature: MA Experiment 20000460 PARAMETER Experiment Name: At_10percent_PEG_P Parameter: Age (day) Value: 12
  misc_feature: MA Experiment 20000460 PARAMETER Experiment Name: At_10percent_PEG_P Parameter: Organism Value: A. thaliana
  misc_feature: MA Experiment 20000460 PARAMETER Experiment Name: At_10percent_PEG_P Parameter: Plant Line Value: WS
  misc_feature: MA Experiment 20000460 PARAMETER Experiment Name: At_10percent_PEG_P Parameter: Timepoint (day) Value: 12
  misc_feature: MA Experiment 20000460 PARAMETER Experiment Name: At_10percent_PEG_P Parameter: Tissue Value: Whole Plant
  misc_feature: MA Experiment 20000460 PARAMETER Experiment Name: At_10percent_PEG_P Parameter: Treatment Value: 10percent PEG vs. No Treatment
  misc_feature: MA Experiment ID: 20000495 Result: Down-regulated in Transcription
  misc_feature: MA Experiment 20000495 PARAMETER Experiment Name: At_Guard_Cells_P Parameter: Harvest Date Value: 8/2/2002
  misc_feature: MA Experiment 20000495 PARAMETER Experiment Name: At_Guard_Cells_P Parameter: Organism Value: A. thaliana
  misc_feature: MA Experiment 20000495 PARAMETER Experiment Name: At_Guard_Cells_P Parameter: Tissue Value: Guard Cells vs. Leaves
  misc_feature: MA Experiment ID: 20000573 Result: Down-regulated in Transcription
  misc_feature: MA Experiment 20000573 PARAMETER Experiment Name: At_100uM_ABA_Mutants__P Parameter: Organism Value: A. thaliana
  misc_feature: MA Experiment 20000573 PARAMETER Experiment Name: At_100uM_ABA_Mutants__P Parameter: Plant Line Value: CS22 vs. Ler wt
  misc_feature: MA Experiment 20000573 PARAMETER Experiment Name: At_100uM_ABA_Mutants__P Parameter: Timepoint (hr) Value: N/A
  misc_feature: MA Experiment 20000573 PARAMETER Experiment Name: At_100uM_ABA_Mutants__P Parameter: Tissue Value: Whole Plant
  misc_feature: MA Experiment 20000573 PARAMETER Experiment Name: At_100uM_ABA_Mutants__P Parameter: Treatment Value: None
  misc_feature: MA Experiment ID: 20000574 Result: Down-regulated in Transcription
  misc_feature: MA Experiment 20000574 PARAMETER Experiment Name: At_100uM_ABA_Mutants__P Parameter: Organism Value: A. thaliana
  misc_feature: MA Experiment 20000574 PARAMETER Experiment Name: At_100uM_ABA_Mutants__P Parameter: Plant Line Value: CS23 vs. Ler wt
  misc_feature: MA Experiment 20000574 PARAMETER Experiment Name: At_100uM_ABA_Mutants__P Parameter: Timepoint (hr) Value: N/A
  misc_feature: MA Experiment 20000574 PARAMETER Experiment Name: At_100uM_ABA_Mutants__P Parameter: Tissue Value: Whole Plant
  misc_feature: MA Experiment 20000574 PARAMETER Experiment Name: At_100uM_ABA_Mutants__P Parameter: Treatment Value: None
  misc_feature: MA Experiment ID: 20000794 Result: Down-regulated in Transcription
  misc_feature: MA Experiment 20000794 PARAMETER Experiment Name: At_Petals_P Parameter: Age (day) Value: 23-25 days
  misc_feature: MA Experiment 20000794 PARAMETER Experiment Name: At_Petals_P Parameter: Plant Line Value: WS
  misc_feature: MA Experiment 20000794 PARAMETER Experiment Name: At_Petals_P Parameter: Tissue Value: Petals vs. Whole plant
  misc_feature: MA Experiment ID: 20001557 Result: Up-regulated in Transcription
  misc_feature: MA Experiment 20001557 PARAMETER Experiment Name: At_Drought_Soil_Dry_P Parameter: Age (day) Value: 27
  misc_feature: MA Experiment 20001557 PARAMETER Experiment Name: At_Drought_Soil_Dry_P Parameter: Organism Value: A. thaliana
  misc_feature: MA Experiment 20001557 PARAMETER Experiment Name: At_Drought_Soil_Dry_P Parameter: Plant Line Value: WS
  misc_feature: MA Experiment 20001557 PARAMETER Experiment Name: At_Drought_Soil_Dry_P Parameter: Post Timepoint (hr) Value: 3
  misc_feature: MA Experiment 20001557 PARAMETER Experiment Name: At_Drought_Soil_Dry_P Parameter: Post-Treatment Value: Re-Water vs. No Drought
  misc_feature: MA Experiment 20001557 PARAMETER Experiment Name: At_Drought_Soil_Dry_P Parameter: Timepoint (day) Value: 13
  misc_feature: MA Experiment 20001557 PARAMETER Experiment Name: At_Drought_Soil_Dry_P Parameter: Treatment Value: Drought vs. No Drought
  misc_feature: MA Experiment ID: 20001770 Result: Up-regulated in Transcription
  misc_feature: MA Experiment 20001770 PARAMETER Experiment Name: At_Far-red-enriched-adult_P Parameter: Age (day) Value: 28
  misc_feature: MA Experiment 20001770 PARAMETER Experiment Name: At_Far-red-enriched-adult_P Parameter: Light Value: Far-red enriched vs. White
  misc_feature: MA Experiment 20001770 PARAMETER Experiment Name: At_Far-red-enriched-adult_P Parameter: Organism Value: A. thaliana
  misc_feature: MA Experiment 20001770 PARAMETER Experiment Name: At_Far-red-enriched-adult_P Parameter: Plant Line Value: Columbia
  misc_feature: MA Experiment 20001770 PARAMETER Experiment Name: At_Far-red-enriched-adult_P Parameter: Timepoint (hr) Value: 8
  misc_feature: MA Experiment 20001770 PARAMETER Experiment Name: At_Far-red-enriched-adult_P Parameter: Tissue Value: Aerial
aatctcaccttctctctccctctctataacaaacattaatacacacaccaaaaaaaaacctgtttatgtctcaaagatctctgattcctcattcttcttctatagcttttggtctccattctcatctcttaatctccagtgagatcagctccaattctaactggtctctctaaataaaaaacagaaataaaaatccaacctttttcaattttcgttcaattttcccggaaaaaaaagcgatccttttgatttttcgatttctccaagtaacaattcaaaatgggtctaaagggttttgctgaaggaggaatagcttcgattgttgcgggttgttcgacccacccgcttgatctaatcaaggtccgaatgcaacttcaaggcgaatcagctccgattcaaaccaatctccgaccagctcttgcttttcagacttcgaccaccgtcaacgcgcctcctctacgtgttggtgtaatcggagtcggatctcgtttaataagagaagaaggcatgcgtgctctgttttccggcgtctccgccaccgttcttcgtcaaactctgtattcaacgactcgtatgggtttatacgacatcatcaaaggagaatggaccgacccggaaacaaaaacgatgcctttaatgaaaaaaatcggtgccggagccatcgccggagcaatcggagccgccgttgggaatcctgctgacgtggcgatggtgaggatgcaagccgatggtcgtttaccgttgactgatagaagaaactacaaaagcgttttagacgcgatcacgcaaatgattcgcggtgaaggcgttacgtcgttgtggagaggatcgtctttgacgataaacagagcaatgcttgtgacgtcatcgcagttggcttcgtatgattctgttaaagagacgattttggagaaagggttgttgaaagatgggcttgggactcatgtgtcggcgagtttcgcggcggggtttgttgcgagcgttgcgagtaatcctgttgatgtgattaagacgagagtgatgaatatgaaggtggtggctggagttgctccgccgtataaaggagcggttgattgtgctttgaaaacggtgaaagcggaagggattatgtctttgtataaaggttttatcccgacggtttcgagacaagcaccgttcacggtggttttgtttgttacgcttgaacaagttaagaagttgttcaaggactatgacttttgaaaaaaacaagagttgaattatgttgaagaagatgaatgatggtggcgacaataagcttctctttttttctggttataattttcttttgattatttgagtagttttaaattgtttcccatttgttggaatagatctatgatatgataattcttctcatggagaagaaagaaagaaagaaacagttcatttgat

SEQ ID NO: 99733 - protein, 313 aa, Arabidopsis thaliana; identical to SEQ ID NO: 34731
  peptide (1)..(313): Ceres Seq. ID no. 13603528
  misc_feature (1)..(313): Homolog of NCBI NO: 15227225 NR Description: mitochondrial carrier protein family [Arabidopsis
  misc_feature (1)..(313): Homolog of NCBI NO: 13878155 NR Description: putative mitochondrial dicarboxylate carrier
  misc_feature (1)..(313): Homolog of NCBI NO: 21554157 NR Description: putative mitochondrial dicarboxylate carrier
  misc_feature (1)..(311): Homolog of NCBI NO: 15233884 NR Description: mitochondrial carrier protein family [Arabidopsis
  misc_feature (67)..(313): Homolog of NCBI NO: 15242423 NR Description: mitochondrial carrier protein family [Arabidopsis
  misc_feature (1)..(55): Homolog of NCBI NO: 15242423 NR Description: mitochondrial carrier protein family [Arabidopsis
  misc_feature (60)..(308): Homolog of NCBI NO: 17568881 NR Description: Mitochondrial carrier protein (32.0 kD)
  misc_feature (9)..(33): Homolog of NCBI NO: 17568881 NR Description: Mitochondrial carrier protein (32.0 kD)
  misc_feature (70)..(311): Homolog of NCBI NO: 31240035 NR Description: ENSANGP00000016898 [Anopheles gambiae]
  misc_feature (69)..(311): Homolog of NCBI NO: 24657951 NR Description: CG18418-PA [Drosophila melanogaster]

SEQ ID NO: 99734 - protein, 284 aa, Arabidopsis thaliana; identical to SEQ ID NO: 34732
  peptide (1)..(284): Ceres Seq. ID no. 13603529
  misc_feature (1)..(284): Homolog of NCBI NO: 15227225 NR Description: mitochondrial carrier protein family [Arabidopsis
  misc_feature (1)..(284): Homolog of NCBI NO: 13878155 NR Description: putative mitochondrial dicarboxylate carrier
  misc_feature (1)..(284): Homolog of NCBI NO: 21554157 NR Description: putative mitochondrial dicarboxylate carrier
  misc_feature (1)..(282): Homolog of NCBI NO: 15233884 NR Description: mitochondrial carrier protein family [Arabidopsis
  misc_feature (38)..(284): Homolog of NCBI NO: 15242423 NR Description: mitochondrial carrier protein family [Arabidopsis
  misc_feature (1)..(26): Homolog of NCBI NO: 15242423 NR Description: mitochondrial carrier protein family [Arabidopsis
  misc_feature (31)..(279): Homolog of NCBI NO: 17568881 NR Description: Mitochondrial carrier protein (32.0 kD)
  misc_feature (41)..(282): Homolog of NCBI NO: 31240035 NR Description: ENSANGP00000016898 [Anopheles gambiae]
  misc_feature (40)..(282): Homolog of NCBI NO: 24657951 NR Description: CG18418-PA [Drosophila melanogaster]
  misc_feature (40)..(282): Homolog of NCBI NO: 20151395 NR Description: GH11346p [Drosophila melanogaster]

SEQ ID NO: 99735 - protein, 237 aa, Arabidopsis thaliana; identical to SEQ ID NO: 34733
  peptide (1)..(237): Ceres Seq. ID no. 13603530
  misc_feature (1)..(237): Homolog of NCBI NO: 15227225 NR Description: mitochondrial carrier protein family [Arabidopsis
  misc_feature (1)..(237): Homolog of NCBI NO: 13878155 NR Description: putative mitochondrial dicarboxylate carrier
  misc_feature (1)..(237): Homolog of NCBI NO: 21554157 NR Description: putative mitochondrial dicarboxylate carrier
  misc_feature (1)..(235): Homolog of NCBI NO: 15233884 NR Description: mitochondrial carrier protein family [Arabidopsis
  misc_feature (1)..(237): Homolog of NCBI NO: 15242423 NR Description: mitochondrial carrier protein family [Arabidopsis
  misc_feature (1)..(232): Homolog of NCBI NO: 17568881 NR Description: Mitochondrial carrier protein (32.0 kD)
  misc_feature (1)..(235): Homolog of NCBI NO: 31240035 NR Description: ENSANGP00000016898 [Anopheles gambiae]
  misc_feature (1)..(235): Homolog of NCBI NO: 24657951 NR Description: CG18418-PA [Drosophila melanogaster]
  misc_feature (1)..(235): Homolog of NCBI NO: 20151395 NR Description: GH11346p [Drosophila melanogaster]
  misc_feature (1)..(237): Homolog of NCBI NO: 39586904 NR Description: Hypothetical protein CBG07018 [Caenorhabditis

SEQ ID NO: 99736 - DNA, 934 bp, Arabidopsis thaliana
  misc_feature (1)..(934): Ceres Seq. ID no. 13603531
  misc_feature: MA Experiment ID: 108577 Result: Down-regulated in Transcription
  misc_feature: MA Experiment 108577 PARAMETER Experiment Name: At_42deg_Heat_cDNA_P Parameter: Temperature (deg C) Value: 42 vs. 22
  misc_feature: MA Experiment 108577 PARAMETER Experiment Name: At_42deg_Heat_cDNA_P Parameter: Timepoint (hr) Value: 6
  misc_feature: MA Experiment 108577 PARAMETER Experiment Name: At_42deg_Heat_cDNA_P Parameter: Tissue Value: Aerial
  misc_feature: MA Experiment ID: 20000069 Result: Up-regulated in Transcription
  misc_feature: MA Experiment 20000069 PARAMETER Experiment Name: At_100uM_ABA_Mutants_cDNA_P Parameter: Plant Line Value: CS23
  misc_feature: MA Experiment 20000069 PARAMETER Experiment Name: At_100uM_ABA_Mutants_cDNA_P Parameter: Timepoint (hr) Value: 6
  misc_feature: MA Experiment 20000069 PARAMETER Experiment Name: At_100uM_ABA_Mutants_cDNA_P Parameter: Tissue Value: Aerial
  misc_feature: MA Experiment 20000069 PARAMETER Experiment Name: At_100uM_ABA_Mutants_cDNA_P Parameter: Treatment Value: 100uM ABA vs. No Treatment
  misc_feature: MA Experiment ID: 20000070 Result: Up-regulated in Transcription
  misc_feature: MA Experiment 20000070 PARAMETER Experiment Name: At_100uM_ABA_Mutants_cDNA_P Parameter: Plant Line Value: CS24
  misc_feature: MA Experiment 20000070 PARAMETER Experiment Name: At_100uM_ABA_Mutants_cDNA_P Parameter: Timepoint (hr) Value: 6
  misc_feature: MA Experiment 20000070 PARAMETER Experiment Name: At_100uM_ABA_Mutants_cDNA_P Parameter: Tissue Value: Aerial
  misc_feature: MA Experiment 20000070 PARAMETER Experiment Name: At_100uM_ABA_Mutants_cDNA_P Parameter: Treatment Value: 100uM ABA vs. No Treatment
  misc_feature: MA Experiment ID: 20000071 Result: Up-regulated in Transcription
  misc_feature: MA Experiment 20000071 PARAMETER Experiment Name: At_100uM_ABA_Mutants_cDNA_P Parameter: Plant Line Value: CS8104
  misc_feature: MA Experiment 20000071 PARAMETER Experiment Name: At_100uM_ABA_Mutants_cDNA_P Parameter: Timepoint (hr) Value: 6
  misc_feature: MA Experiment 20000071 PARAMETER Experiment Name: At_100uM_ABA_Mutants_cDNA_P Parameter: Tissue Value: Aerial
  misc_feature: MA Experiment 20000071 PARAMETER Experiment Name: At_100uM_ABA_Mutants_cDNA_P Parameter: Treatment Value: 100uM ABA vs. No Treatment
  misc_feature: MA Experiment ID: 20000089 Result: Up-regulated in Transcription
  misc_feature: MA Experiment ID: 20000090 Result: Up-regulated in Transcription
  misc_feature: MA Experiment ID: 20000111 Result: Down-regulated in Transcription
  misc_feature: MA Experiment 20000111 PARAMETER Experiment Name: At_42deg_Heat_cDNA_P Parameter: Temperature (deg C) Value: 42 vs. 22
  misc_feature: MA Experiment 20000111 PARAMETER Experiment Name: At_42deg_Heat_cDNA_P Parameter: Timepoint (hr) Value: 6
  misc_feature: MA Experiment 20000111 PARAMETER Experiment Name: At_42deg_Heat_cDNA_P Parameter: Tissue Value: Aerial
  misc_feature: MA Experiment ID: 20000113 Result: Down-regulated in Transcription
  misc_feature: MA Experiment 20000113 PARAMETER Experiment Name: At_42deg_Heat_cDNA_P Parameter: Temperature (deg C) Value: 42 vs. 22
  misc_feature: MA Experiment 20000113 PARAMETER Experiment Name: At_42deg_Heat_cDNA_P Parameter: Timepoint (hr) Value: 8
  misc_feature: MA Experiment 20000113 PARAMETER Experiment Name: At_42deg_Heat_cDNA_P Parameter: Tissue Value: Aerial
  misc_feature: MA Experiment ID: 20000227 Result: Down-regulated in Transcription
  misc_feature: MA Experiment 20000227 PARAMETER Experiment Name: At_Root-Tips-vs-Tops_P Parameter: Tissue Value: Root Tips vs. Root Tops
  misc_feature: MA Experiment ID: 20000438 Result: Down-regulated in Transcription
  misc_feature: MA Experiment 20000438 PARAMETER Experiment Name: At_Shoots__P Parameter: Age (day) Value: 14
  misc_feature: MA Experiment 20000438 PARAMETER Experiment Name: At_Shoots__P Parameter: Tissue Value: Shoots vs. Whole Plant
  misc_feature: MA Experiment ID: 20001247 Result: Down-regulated in Transcription
  misc_feature: MA Experiment 20001247 PARAMETER Experiment Name: At_Far-red-induction_P Parameter: Age (day) Value: 7
  misc_feature: MA Experiment 20001247 PARAMETER Experiment Name: At_Far-red-induction_P Parameter: Light Value: Far-red vs. White
  misc_feature: MA Experiment 20001247 PARAMETER Experiment Name: At_Far-red-induction_P Parameter: Organism Value: A. thaliana
  misc_feature: MA Experiment 20001247 PARAMETER Experiment Name: At_Far-red-induction_P Parameter: Plant Line Value: Columbia
  misc_feature: MA Experiment 20001247 PARAMETER Experiment Name: At_Far-red-induction_P Parameter: Timepoint (hr) Value: 1
  misc_feature: MA Experiment 20001247 PARAMETER Experiment Name: At_Far-red-induction_P Parameter: Tissue Value: Whole Plant
agttttctcaattttttctagactcgtatcgatatggcgaatcatgaaacgatatttgatcagctaaagaagcagattccagtagatgaggaagaacctctgattttgaatcgagactcaagcgttggtctcgtcatcgttgacgttgttaatggcttctgcacaattggctccggcaatatggctccaacaaagcataatgaacagatatcgaagatggtggaggaaagtgcaaagcttgctagagagttctgtgatcggaaatggccggttttggcgtttattgactctcatcatccagatattccggagagaccttatcctcctcattgtattataggaactgaagaatcagaacttgttcctgctctgaaatggcttgaaagtgaggattgtgccactcttagacgaaaggattgtattaatgggtttgtgggttcgatggagagtgatggttctaatgtttttgtggattgggttaaggaaaaacagatcaaagttattgtcgttgtaggtatctgtacagacatatgtgtgtttgattttgtggctactgcactttctgcccgaaaccacggtgttctttctcctgtagaagatgtggtagtgtactcccgtggctgtgctacttttgaccttcctcttcatgttgcgaaagacatcaaaggcgctcaggctcatcctcaggagttgatgcaccatgtaggtctatatatggctaaaggaagaggagctcaggtagtctctaaaatttcttttgagacttgaaagactatatctcgtttataaacataacactcttgatatcaaatatttcagtaaattgttgagtttgcctctcttttctttcgtgtaaattgttcatgaagcttgttctctgaatttcaactcttgtgtaactgtttcagaatgacaaataatatgatgggtttct

SEQ ID NO: 99737 - protein, 244 aa, Arabidopsis thaliana; identical to SEQ ID NO: 41005
  peptide (1)..(244): Ceres Seq. ID no. 13603532
  misc_feature (25)..(222): Pfam Name: Isochorismatase family Pfam Description: Isochorismatase family
  misc_feature (1)..(244): Homolog of NCBI NO: 18400020 NR Description: isochorismatase hydrolase family [Arabidopsis >gi|20197887|gb|AAM15300.1| expressed protein [Arabidopsis >gi|26983880|gb|AAN86192.1| unknown protein [Arabidopsis
  misc_feature (1)..(244): Homolog of NCBI NO: 21537016 NR Description: unknown [Arabidopsis thaliana]
  misc_feature (1)..(218): Homolog of NCBI NO: 25412119 NR Description: hypothetical protein At2g22570 [imported] - thaliana >gi|4314355|gb|AAD15566.1| unknown protein [Arabidopsis
  misc_feature (5)..(219): Homolog of NCBI NO: 15144508 NR Description: unknown [Lycopersicon esculentum]
  misc_feature (1)..(240): Homolog of NCBI NO: 23042463 NR Description: hypothetical protein [Trichodesmium erythraeum
  misc_feature (85)..(238): Homolog of NCBI NO: 22974429 NR Description: hypothetical protein [Chloroflexus aurantiacus]

SEQ ID NO: 99738 - protein, 195 aa, Arabidopsis thaliana; identical to SEQ ID NO: 41006
  peptide (1)..(195): Ceres Seq. ID no. 13603533
  misc_feature (1)..(173): Pfam Name: Isochorismatase family Pfam Description: Isochorismatase family
  misc_feature (1)..(195): Homolog of NCBI NO: 18400020 NR Description: isochorismatase hydrolase family [Arabidopsis >gi|20197887|gb|AAM15300.1| expressed protein [Arabidopsis >gi|26983880|gb|AAN86192.1| unknown protein [Arabidopsis
  misc_feature (1)..(195): Homolog of NCBI NO: 21537016 NR Description: unknown [Arabidopsis thaliana]
  misc_feature (1)..(169): Homolog of NCBI NO: 25412119 NR Description: hypothetical protein At2g22570 [imported] - thaliana >gi|4314355|gb|AAD15566.1| unknown protein [Arabidopsis
  misc_feature (1)..(170): Homolog of NCBI NO: 15144508 NR Description: unknown [Lycopersicon esculentum]
  misc_feature (1)..(191): Homolog of NCBI NO: 23042463 NR Description: hypothetical protein [Trichodesmium erythraeum
  misc_feature (36)..(189): Homolog of NCBI NO: 22974429 NR Description: hypothetical protein [Chloroflexus aurantiacus]

SEQ ID NO: 99739 - protein, 183 aa, Arabidopsis thaliana; identical to SEQ ID NO: 41007
  peptide (1)..(183): Ceres Seq. ID no. 13603534
  misc_feature (1)..(161): Pfam Name: Isochorismatase family Pfam Description: Isochorismatase family
  misc_feature (1)..(183): Homolog of NCBI NO: 18400020 NR Description: isochorismatase hydrolase family [Arabidopsis >gi|20197887|gb|AAM15300.1| expressed protein [Arabidopsis >gi|26983880|gb|AAN86192.1| unknown protein [Arabidopsis
  misc_feature (1)..(183): Homolog of NCBI NO: 21537016 NR Description: unknown [Arabidopsis thaliana]
  misc_feature (1)..(157): Homolog of NCBI NO: 25412119 NR Description: hypothetical protein At2g22570 [imported] - thaliana >gi|4314355|gb|AAD15566.1| unknown protein [Arabidopsis
  misc_feature (1)..(158): Homolog of NCBI NO: 15144508 NR Description: unknown [Lycopersicon esculentum]
  misc_feature (1)..(179): Homolog of NCBI NO: 23042463 NR Description: hypothetical protein [Trichodesmium erythraeum
  misc_feature (24)..(177): Homolog of NCBI NO: 22974429 NR Description: hypothetical protein [Chloroflexus aurantiacus]

SEQ ID NO: 99740 - DNA, 1537 bp, Arabidopsis thaliana
  misc_feature (1)..(1537): Ceres Seq. ID no. 13603535
  misc_feature: MA Experiment ID: 108594 Result: Down-regulated in Transcription
  misc_feature: MA Experiment 108594 PARAMETER Experiment Name: At_Ler-rhl_Root_cDNA_P Parameter: Plant Line Value: null
  misc_feature: MA Experiment ID: 20000171 Result: Up-regulated in Transcription
  misc_feature: MA Experiment 20000171 PARAMETER Experiment Name: At_42deg_Heat_P Parameter: Age (day) Value: 14
  misc_feature: MA Experiment 20000171 PARAMETER Experiment Name: At_42deg_Heat_P Parameter: Organism Value: A. thaliana
  misc_feature: MA Experiment 20000171 PARAMETER Experiment Name: At_42deg_Heat_P Parameter: Plant Line Value: WS
  misc_feature: MA Experiment 20000171 PARAMETER Experiment Name: At_42deg_Heat_P Parameter: Temperature (deg C) Value: 42 vs. 22
  misc_feature: MA Experiment 20000171 PARAMETER Experiment Name: At_42deg_Heat_P Parameter: Timepoint (hr) Value: 1
  misc_feature: MA Experiment 20000171 PARAMETER Experiment Name: At_42deg_Heat_P Parameter: Tissue Value: Aerial
  misc_feature: MA Experiment ID: 20000180 Result: Up-regulated in Transcription
  misc_feature: MA Experiment 20000180 PARAMETER Experiment Name: At_Germinating_Seeds_P Parameter: Age (hr) Value: 24 vs. 0
  misc_feature: MA Experiment 20000180 PARAMETER Experiment Name: At_Germinating_Seeds_P Parameter: Tissue Value: Germinating Seeds
  misc_feature: MA Experiment ID: 20000184 Result: Up-regulated in Transcription
  misc_feature: MA Experiment 20000184 PARAMETER Experiment Name: At_Shoots__P Parameter: Age (day) Value: 7
  misc_feature: MA Experiment 20000184 PARAMETER Experiment Name: At_Shoots__P Parameter: Tissue Value: Shoots vs. Whole Plant
  misc_feature: MA Experiment ID: 20000267 Result: Up-regulated in Transcription
  misc_feature: MA Experiment 20000267 PARAMETER Experiment Name: At_Drought_P Parameter: Age (day) Value: 7
  misc_feature: MA Experiment 20000267 PARAMETER Experiment Name: At_Drought_P Parameter: Organism Value: A. thaliana
  misc_feature: MA Experiment 20000267 PARAMETER Experiment Name: At_Drought_P Parameter: Plant Line Value: WS
  misc_feature: MA Experiment 20000267 PARAMETER Experiment Name: At_Drought_P Parameter: Timepoint (hr) Value: 6
  misc_feature: MA Experiment 20000267 PARAMETER Experiment Name: At_Drought_P Parameter: Tissue Value: Whole Plant
  misc_feature: MA Experiment 20000267 PARAMETER Experiment Name: At_Drought_P Parameter: Treatment Value: Drought vs. No Drought
  misc_feature: MA Experiment ID: 20000268 Result: Up-regulated in Transcription
  misc_feature: MA Experiment 20000268 PARAMETER Experiment Name: At_100mM_NaCl__P Parameter: Age (day) Value: 14
  misc_feature: MA Experiment 20000268 PARAMETER Experiment Name: At_100mM_NaCl__P Parameter: Organism Value: A. thaliana
  misc_feature: MA Experiment 20000268 PARAMETER Experiment Name: At_100mM_NaCl__P Parameter: Plant Line Value: WS
  misc_feature: MA Experiment 20000268 PARAMETER Experiment Name: At_100mM_NaCl__P Parameter: Timepoint (hr) Value: 6
  misc_feature: MA Experiment 20000268 PARAMETER Experiment Name: At_100mM_NaCl__P Parameter: Tissue Value: Whole Plant
  misc_feature: MA Experiment 20000268 PARAMETER Experiment Name: At_100mM_NaCl__P Parameter: Treatment Value: 100mM NaCl vs. No Treatment
  misc_feature: MA Experiment ID: 20000286 Result: Up-regulated in Transcription
  misc_feature: MA Experiment 20000286 PARAMETER Experiment Name: At_Open_Flower_P Parameter: Age (day) Value: 21
  misc_feature: MA Experiment 20000286 PARAMETER Experiment Name: At_Open_Flower_P Parameter: Plant Line Value: WS
  misc_feature: MA Experiment 20000286 PARAMETER Experiment Name: At_Open_Flower_P Parameter: Tissue Value: Half Open vs. Whole Plant
  misc_feature: MA Experiment ID: 20000436 Result: Up-regulated in Transcription
  misc_feature: MA Experiment 20000436 PARAMETER Experiment Name: At_Drought_P Parameter: Age (day) Value: 7
  misc_feature: MA Experiment 20000436 PARAMETER Experiment Name: At_Drought_P Parameter: Organism Value: A. thaliana
  misc_feature: MA Experiment 20000436 PARAMETER Experiment Name: At_Drought_P Parameter: Plant Line Value: WS
  misc_feature: MA Experiment 20000436 PARAMETER Experiment Name: At_Drought_P Parameter: Timepoint (hr) Value: 12
  misc_feature: MA Experiment 20000436 PARAMETER Experiment Name: At_Drought_P Parameter: Tissue Value: Whole Plant
  misc_feature: MA Experiment 20000436 PARAMETER Experiment Name: At_Drought_P Parameter: Treatment Value: Drought vs. No Drought
  misc_feature: MA Experiment ID: 20000437 Result: Up-regulated in Transcription
  misc_feature: MA Experiment 20000437 PARAMETER Experiment Name: At_Drought_P Parameter: Age (day) Value: 8
  misc_feature: MA Experiment 20000437 PARAMETER Experiment Name: At_Drought_P Parameter: Organism Value: A. thaliana
  misc_feature: MA Experiment 20000437 PARAMETER Experiment Name: At_Drought_P Parameter: Plant Line Value: WS
  misc_feature: MA Experiment 20000437 PARAMETER Experiment Name: At_Drought_P Parameter: Timepoint (hr) Value: 24
  misc_feature: MA Experiment 20000437 PARAMETER Experiment Name: At_Drought_P Parameter: Tissue Value: Whole Plant
  misc_feature: MA Experiment 20000437 PARAMETER Experiment Name: At_Drought_P Parameter: Treatment Value: Drought vs. No Drought
  misc_feature: MA Experiment ID: 20000439 Result: Up-regulated in Transcription
  misc_feature: MA Experiment 20000439 PARAMETER Experiment Name: At_Roots__P Parameter: Age (day) Value: 14 vs. 21
  misc_feature: MA Experiment 20000439 PARAMETER Experiment Name: At_Roots__P Parameter: Organism Value: A. thaliana
  misc_feature: MA Experiment 20000439 PARAMETER Experiment Name: At_Roots__P Parameter: Tissue Value: Roots vs. Whole Plant
  misc_feature: MA Experiment ID: 20000451 Result: Up-regulated in Transcription
  misc_feature: MA Experiment 20000451 PARAMETER Experiment Name: At_CS6879_Shoots-Roots_P Parameter: Age (day) Value: 14
  misc_feature: MA Experiment 20000451 PARAMETER Experiment Name: At_CS6879_Shoots-Roots_P Parameter: Organism Value: A. thaliana
  misc_feature: MA Experiment 20000451 PARAMETER Experiment Name: At_CS6879_Shoots-Roots_P Parameter: Plant Line Value: CS6879 vs. WS
  misc_feature: MA Experiment 20000451 PARAMETER Experiment Name: At_CS6879_Shoots-Roots_P Parameter: Tissue Value: Roots
atcatcaaagtgaaaatgacaaacttcaaagacaacgatggagatggaaccaaactccacgtggtaatgtttccatggttagcctttggtcacatggttccatacttggagctctctaaactcatagctcaaaagggtcacaaagtctctttcatttccactccacgtaacatcgaccgtctcctcccatggttaccggaaaatctctcctccgtcattaacttcgtcaagctatcacttcccgtcggcgacaacaaactcccggaagacggtgaagctaccacagacgtccctttcgaactcataccttacttaaaaatcgcttacgacgggttaaaagttccggtgacggagtttcttgaatcttcgaaacccgattgggttcttcaagatttcgcggggttttggcttcctccaatctctcgtcgtctcggaatcaaaaccggattctttagcgctttcaacggcgcgacgctcggtattcttaaaccgccggggttcgaagagtaccgtacttcgccggcggattttatgaagccgcctaagtgggttccgtttgaaacttcggtagctttcaagttatttgaatgcaggttcattttcaaaggatttatggcggaaaccaccgaagggaatgttcccgacatccaccgtgtcggcggcgtaattgacggctgtgacgtcatcttcgtacggagctgttacgagtatgaagcggagtggttaggacttacacaagaacttcaccggaaaccggttataccggtcggagttttgcctccaaaaccggacgaaaagtttgaagataccgacacgtggctgtctgttaaaaaatggttggactcacggaaaagtaagtccattgtctacgtagcttttggttcagaagctaaaccgagtcaaacggagctaaatgagatcgctctcggtttagagctttctggtttacctttcttttgggtgttaaagactcgtcgtggtccgtgggataccgaaccggtcgagcttccggaaggattcgaagagcgtacagcggatagagggatggtgtggagaggttgggttgagcaattgcgtacattgagccatgactcgatcggtttggttctgactcatcccggttggggaacgataattgaagctatccggtttgctaaaccgatggcaatgctggtttttgtgtatgaccaaggattgaatgcgagagtcattgaagagaagaaaattgggtatatgatccctcgagacgagacagaaggtttctttactaaagaaagtgttgcgaattcgctaagattggtaatggtggaagaagaaggaaaggtttatagagagaatgtgaaggagatgaaaggagtgtttggagatatggatagacaagatcgttatgtggattcattcttggaatatcttgttactaatcgttaactttgagtcttgatccaatggtcggttaattgagtgaagttgatcaagtgttgcaaggatgatcattgtataatgttatgatattttggaatggtcaagttttcttgag

SEQ ID NO: 99741 - protein, 475 aa, Arabidopsis thaliana
  peptide (1)..(475): Ceres Seq. ID no. 13603536
  misc_feature (6)..(475): Homolog of NCBI NO: 18400022 NR Description: glycosyltransferase family [Arabidopsis thaliana]
  misc_feature (6)..(475): Homolog of NCBI NO: 15450577 NR Description: At2g22590/T9I22.3 [Arabidopsis thaliana]
  misc_feature (15)..(471): Homolog of NCBI NO: 20149064 NR Description: putative anthocyanidine rhamnosyl-transferase
  misc_feature (15)..(474): Homolog of NCBI NO: 21435782 NR Description: UDP-glucosyltransferase [Stevia rebaudiana]
  misc_feature (18)..(471): Homolog of NCBI NO: 15238503 NR Description: UDP-glycosyltransferase family [Arabidopsis
  misc_feature (18)..(471): Homolog of NCBI NO: 26452040 NR Description: putative anthocyanidin-3-glucoside
  misc_feature (19)..(471): Homolog of NCBI NO: 15240534 NR Description: UDP-glycosyltransferase family [Arabidopsis
  misc_feature (11)..(471): Homolog of NCBI NO: 34908562 NR Description: putative anthocyanidine rhamnosyl-transferase
  misc_feature (19)..(475): Homolog of NCBI NO: 34393985 NR Description: putative UDP-glucosyltransferase [Oryza sativa
  misc_feature (122)..(471): Homolog of NCBI NO: 34393978 NR Description: putative UDP-glucosyltransferase [Oryza sativa
IIKVKMTNFKDNDGDGTKLHVVMFPWLAFGHMVPYLELSKLIAQKGHKVSFISTPRNIDRLLPWLPENLSSVINFVKLSLPVGDNKLPEDGEATTDVPFELIPYLKIAYDGLKVPVTEFLESSKPDWVLQDFAGFWLPPISRRLGIKTGFFSAFNGATLGILKPPGFEEYRTSPADFMKPPKWVPFETSVAFKLFECRFIFKGFMAETTEGNVPDIHRVGGVIDGCDVIFVRSCYEYEAEWLGLTQELHRKPVIPVGVLPPKPDEKFEDTDTWLSVKKWLDSRKSKSIVYVAFGSEAKPSQTELNEIALGLELSGLPFFWVLKTRRGPWDTEPVELPEGFEERTADRGMVWRGWVEQLRTLSHDSIGLVLTHPGWGTIIEAIRFAKPMAMLVFVYDQGLNARVIEEKKIGYMIPRDETEGFFTKESVANSLRLVMVEEEGKVYRENVKEMKGVFGDMDRQDRYVDSFLEYLVTNR

SEQ ID NO: 99742 - protein, 470 aa, Arabidopsis thaliana
  peptide (1)..(470): Ceres Seq. ID no. 13603537
  misc_feature (1)..(470): Homolog of NCBI NO: 18400022 NR Description: glycosyltransferase family [Arabidopsis thaliana]
  misc_feature (1)..(470): Homolog of NCBI NO: 15450577 NR Description: At2g22590/T9I22.3 [Arabidopsis thaliana]
  misc_feature (10)..(466): Homolog of NCBI NO: 20149064 NR Description: putative anthocyanidine rhamnosyl-transferase
  misc_feature (10)..(469): Homolog of NCBI NO: 21435782 NR Description: UDP-glucosyltransferase [Stevia rebaudiana]
  misc_feature (13)..(466): Homolog of NCBI NO: 15238503 NR Description: UDP-glycosyltransferase family [Arabidopsis
  misc_feature (13)..(466): Homolog of NCBI NO: 26452040 NR Description: putative anthocyanidin-3-glucoside
  misc_feature (14)..(466): Homolog of NCBI NO: 15240534 NR Description: UDP-glycosyltransferase family [Arabidopsis
  misc_feature (6)..(466): Homolog of NCBI NO: 34908562 NR Description: putative anthocyanidine rhamnosyl-transferase
  misc_feature (14)..(470): Homolog of NCBI NO: 34393985 NR Description: putative UDP-glucosyltransferase [Oryza sativa
  misc_feature (117)..(466): Homolog of NCBI NO: 34393978 NR Description: putative UDP-glucosyltransferase [Oryza sativa
MTNFKDNDGDGTKLHVVMFPWLAFGHMVPYLELSKLIAQKGHKVSFISTPRNIDRLLPWLPENLSSVINFVKLSLPVGDNKLPEDGEATTDVPFELIPYLKIAYDGLKVPVTEFLESSKPDWVLQDFAGFWLPPISRRLGIKTGFFSAFNGATLGILKPPGFEEYRTSPADFMKPPKWVPFETSVAFKLFECRFIFKGFMAETTEGNVPDIHRVGGVIDGCDVIFVRSCYEYEAEWLGLTQELHRKPVIPVGVLPPKPDEKFEDTDTWLSVKKWLDSRKSKSIVYVAFGSEAKPSQTELNEIALGLELSGLPFFWVLKTRRGPWDTEPVELPEGFEERTADRGMVWRGWVEQLRTLSHDSIGLVLTHPGWGTIIEAIRFAKPMAMLVFVYDQGLNARVIEEKKIGYMIPRDETEGFFTKESVANSLRLVMVEEEGKVYRENVKEMKGVFGDMDRQDRYVDSFLEYLVTNR

SEQ ID NO: 99743 - protein, 453 aa, Arabidopsis thaliana
  peptide (1)..(453): Ceres Seq. ID no. 13603538
  misc_feature (1)..(453): Homolog of NCBI NO: 18400022 NR Description: glycosyltransferase family [Arabidopsis thaliana]
  misc_feature (1)..(453): Homolog of NCBI NO: 15450577 NR Description: At2g22590/T9I22.3 [Arabidopsis thaliana]
  misc_feature (1)..(449): Homolog of NCBI NO: 20149064 NR Description: putative anthocyanidine rhamnosyl-transferase
  misc_feature (1)..(452): Homolog of NCBI NO: 21435782 NR Description: UDP-glucosyltransferase [Stevia rebaudiana]
  misc_feature (1)..(449): Homolog of NCBI NO: 15238503 NR Description: UDP-glycosyltransferase family [Arabidopsis
  misc_feature (1)..(449): Homolog of NCBI NO: 26452040 NR Description: putative anthocyanidin-3-glucoside
  misc_feature (1)..(449): Homolog of NCBI NO: 15240534 NR Description: UDP-glycosyltransferase family [Arabidopsis
  misc_feature (1)..(449): Homolog of NCBI NO: 34908562 NR Description: putative anthocyanidine rhamnosyl-transferase
  misc_feature (1)..(453): Homolog of NCBI NO: 34393985 NR Description: putative UDP-glucosyltransferase [Oryza sativa
  misc_feature (100)..(449): Homolog of NCBI NO: 34393978 NR Description: putative UDP-glucosyltransferase [Oryza sativa
MFPWLAFGHMVPYLELSKLIAQKGHKVSFISTPRNIDRLLPWLPENLSSVINFVKLSLPVGDNKLPEDGEATTDVPFELIPYLKIAYDGLKVPVTEFLESSKPDWVLQDFAGFWLPPISRRLGIKTGFFSAFNGATLGILKPPGFEEYRTSPADFMKPPKWVPFETSVAFKLFECRFIFKGFMAETTEGNVPDIHRVGGVIDGCDVIFVRSCYEYEAEWLGLTQELHRKPVIPVGVLPPKPDEKFEDTDTWLSVKKWLDSRKSKSIVYVAFGSEAKPSQTELNEIALGLELSGLPFFWVLKTRRGPWDTEPVELPEGFEERTADRGMVWRGWVEQLRTLSHDSIGLVLTHPGWGTIIEAIRFAKPMAMLVFVYDQGLNARVIEEKKIGYMIPRDETEGFFTKESVANSLRLVMVEEEGKVYRENVKEMKGVFGDMDRQDRYVDSFLEYLVTNR

SEQ ID NO: 99744 - DNA, 1402 bp, Arabidopsis thaliana
  misc_feature (1)..(1402): Ceres Seq. ID no. 13603539
  misc_feature: MA Experiment ID: 20000496 Result: Up-regulated in Transcription
  misc_feature: MA Experiment 20000496 PARAMETER Experiment Name: At_Guard_Cells_P Parameter: Harvest Date Value: 7/19/2002
  misc_feature: MA Experiment 20000496 PARAMETER Experiment Name: At_Guard_Cells_P Parameter: Organism Value: Canola
  misc_feature: MA Experiment 20000496 PARAMETER Experiment Name: At_Guard_Cells_P Parameter: Tissue Value: Guard Cells vs. Leaves
  misc_feature: MA Experiment ID: 20000794 Result: Up-regulated in Transcription
  misc_feature: MA Experiment 20000794 PARAMETER Experiment Name: At_Petals_P Parameter: Age (day) Value: 23-25 days
  misc_feature: MA Experiment 20000794 PARAMETER Experiment Name: At_Petals_P Parameter: Plant Line Value: WS
  misc_feature: MA Experiment 20000794 PARAMETER Experiment Name: At_Petals_P Parameter: Tissue Value: Petals vs. Whole plant
aaatttaccactccttccatgtttttgtttctctcttcttcttgattgttgcgcttttgttagctttctctggttcattttccatggacggaccttgacctctctgcttcccttcgtgcattttctctctctcactatcctctctctttctagtgtttgtttgatcctctgcgtactctgttcttcttctctcttcagataaaacaagtcctgcatattgaagatctgatgtcttatcgattgctaagtgtggataaggatgaactggttacgtcaccttgtttgaaagaacgtaactacttgggtctctctgattgttcctctgttgatagctcaactattcccaatgttgttgggaagagcaatctcaatttcaaagctactgaactgaggctaggtcttcctgagtctcaatctcctgagagagagactgatttcggtttgctgagtccgagaacacccgatgagaagcttctcttcccgttgctaccttctaaagacaatggttctgctactacagggcataagaatgttgtttctggtaacaagagaggatttgctgacacttgggatgagttttcgggtgtgaaaggatctgttagacctggaggaggaatcaacatgatgttgtcgccgaaagttaaggatgtctcgaagagtattcaagaagaaagatctcatgctaagggtggcttgaacaatgcaccagctgccaaggcacaggttgttggttggcctccaatcagatcataccggaagaatacaatggcttcttctacttcgaagaacactgatgaggttgatgggaaacctggtcttggtgttctgtttgtgaaggtgagcatggatggtgctccgtatctgagaaaggtcgacttgagaacttacacttcctatcaacagttgtcttctgcacttgagaaaatgttcagctgcttcacccttggtcaatgtggtcttcatggtgctcaagggagggaaagaatgagcgagattaaactgaaggatcttcttcatggatcagaatttgtgcttacttatgaagataaagacggtgattggatgcttgttggcgatgttccatgggagatatttactgaaacatgccagaaactgaagatcatgaagggttctgattctattggcttagctccaggtgcagtggagaaatcgaagaacaaagagcgggtttgaaacgaagatgctcaagacaaaaaaaaaacactatgcacagttccaatgtttaagttttatttactgatgtgtttgaaaactctttagtctttttactaatttgtgttgtaagactttggattctcttatttgtgtgtgcttgttcaaaacaaatacattcttatgtgtgtgtttctactttgaccttcaagatatttcgtctctacgc

SEQ ID NO: 99745 - protein, 321 aa, Arabidopsis thaliana; identical to SEQ ID NO: 23887
  peptide (1)..(321): Ceres Seq. ID no. 13603540
  misc_feature (47)..(311): Pfam Name: AUX/IAA family Pfam Description: AUX/IAA family
  misc_feature (1)..(321): Homolog of NCBI NO: 15227275 NR Description: auxin-responsive protein IAA8 (Indoleacetic
  misc_feature (1)..(321): Homolog of NCBI NO: 30681782 NR Description: auxin-responsive protein IAA8 (Indoleacetic
  misc_feature (19)..(318): Homolog of NCBI NO: 20257219 NR Description: auxin-regulated protein [Zinnia elegans]
  misc_feature (124)..(318): Homolog of NCBI NO: 20269051 NR Description: aux/IAA protein [Populus tremula x Populus
  misc_feature (19)..(137): Homolog of NCBI NO: 20269051 NR Description: aux/IAA protein [Populus tremula x Populus
  misc_feature (133)..(318): Homolog of NCBI NO: 29465672 NR Description: Aux/IAA protein [Vitis vinifera]
  misc_feature (19)..(137): Homolog of NCBI NO: 29465672 NR Description: Aux/IAA protein [Vitis vinifera]
  misc_feature (19)..(316): Homolog of NCBI NO: 30698145 NR Description: auxin-responsive protein IAA9 (Indoleacetic
  misc_feature (19)..(316): Homolog of NCBI NO: 21592701 NR Description: auxin-induced protein IAA9 [Arabidopsis thaliana]
  misc_feature (19)..(316): Homolog of NCBI NO: 30698143 NR Description: auxin-responsive protein IAA9 (Indoleacetic

SEQ ID NO: 99746 - protein, 190 aa, Arabidopsis thaliana; identical to SEQ ID NO: 23888
  peptide (1)..(190): Ceres Seq. ID no. 13603541
  misc_feature (1)..(180): Pfam Name: AUX/IAA family Pfam Description: AUX/IAA family
  misc_feature (1)..(190): Homolog of NCBI NO: 15227275 NR Description: auxin-responsive protein IAA8 (Indoleacetic
  misc_feature (1)..(190): Homolog of NCBI NO: 30681782 NR Description: auxin-responsive protein IAA8 (Indoleacetic
  misc_feature (1)..(187): Homolog of NCBI NO: 20257219 NR Description: auxin-regulated protein [Zinnia elegans]
  misc_feature (1)..(187): Homolog of NCBI NO: 20269051 NR Description: aux/IAA protein [Populus tremula x Populus
  misc_feature (2)..(187): Homolog of NCBI NO: 29465672 NR Description: Aux/IAA protein [Vitis vinifera]
  misc_feature (1)..(185): Homolog of NCBI NO: 30698145 NR Description: auxin-responsive protein IAA9 (Indoleacetic
  misc_feature (1)..(185): Homolog of NCBI NO: 21592701 NR Description: auxin-induced protein IAA9 [Arabidopsis thaliana]
  misc_feature (1)..(185): Homolog of NCBI NO: 30698143 NR Description: auxin-responsive protein IAA9 (Indoleacetic
  misc_feature (1)..(187): Homolog of NCBI NO: 25989504 NR Description: Aux/IAA protein [Solanum tuberosum]
  misc_feature (1)..(176): Homolog of NCBI NO: 10177324 NR Description: auxin-induced protein IAA9 [Arabidopsis thaliana]

SEQ ID NO: 99747 - protein, 189 aa, Arabidopsis thaliana; identical to SEQ ID NO: 23889
  peptide (1)..(189): Ceres Seq. ID no. 13603542
  misc_feature (1)..(179): Pfam Name: AUX/IAA family Pfam Description: AUX/IAA family
  misc_feature (1)..(189): Homolog of NCBI NO: 15227275 NR Description: auxin-responsive protein IAA8 (Indoleacetic
  misc_feature (1)..(189): Homolog of NCBI NO: 30681782 NR Description: auxin-responsive protein IAA8 (Indoleacetic
  misc_feature (1)..(186): Homolog of NCBI NO: 20257219 NR Description: auxin-regulated protein [Zinnia elegans]
  misc_feature (1)..(186): Homolog of NCBI NO: 20269051 NR Description: aux/IAA protein [Populus tremula x Populus
  misc_feature (1)..(186): Homolog of NCBI NO: 29465672 NR Description: Aux/IAA protein [Vitis vinifera]
  misc_feature (1)..(184): Homolog of NCBI NO: 30698145 NR Description: auxin-responsive protein IAA9 (Indoleacetic
  misc_feature (1)..(184): Homolog of NCBI NO: 21592701 NR Description: auxin-induced protein IAA9 [Arabidopsis thaliana]
  misc_feature (1)..(184): Homolog of NCBI NO: 30698143 NR Description: auxin-responsive protein IAA9 (Indoleacetic
  misc_feature (1)..(186): Homolog of NCBI NO: 25989504 NR Description: Aux/IAA protein [Solanum tuberosum]
  misc_feature (1)..(175): Homolog of NCBI NO: 10177324 NR Description: auxin-induced protein IAA9 [Arabidopsis thaliana]

SEQ ID NO: 99748 - DNA, 1361 bp, Arabidopsis thaliana
  misc_feature (1)..(1361): Ceres Seq. ID no. 13603543
  misc_feature: MA Experiment ID: 108488 Result: Down-regulated in Transcription
  misc_feature: MA Experiment ID: 20000086 Result: Up-regulated in Transcription
  misc_feature: MA Experiment 20000086 PARAMETER Experiment Name: At_100uM_ABA_Mutants_cDNA_P Parameter: Plant Line Value: CS22
  misc_feature: MA Experiment 20000086 PARAMETER Experiment Name: At_100uM_ABA_Mutants_cDNA_P Parameter: Timepoint (hr) Value: 6
  misc_feature: MA Experiment 20000086 PARAMETER Experiment Name: At_100uM_ABA_Mutants_cDNA_P Parameter: Tissue Value: Aerial
  misc_feature: MA Experiment 20000086 PARAMETER Experiment Name: At_100uM_ABA_Mutants_cDNA_P Parameter: Treatment Value: 100uM ABA vs. No Treatment
  misc_feature: MA Experiment ID: 20000184 Result: Down-regulated in Transcription
  misc_feature: MA Experiment 20000184 PARAMETER Experiment Name: At_Shoots__P Parameter: Age (day) Value: 7
  misc_feature: MA Experiment 20000184 PARAMETER Experiment Name: At_Shoots__P Parameter: Tissue Value: Shoots vs. Whole Plant
  misc_feature: MA Experiment ID: 20000437 Result: Up-regulated in Transcription
  misc_feature: MA Experiment 20000437 PARAMETER Experiment Name: At_Drought_P Parameter: Age (day) Value: 8
  misc_feature: MA Experiment 20000437 PARAMETER Experiment Name: At_Drought_P Parameter: Organism Value: A. thaliana
  misc_feature: MA Experiment 20000437 PARAMETER Experiment Name: At_Drought_P Parameter: Plant Line Value: WS
  misc_feature: MA Experiment 20000437 PARAMETER Experiment Name: At_Drought_P Parameter: Timepoint (hr) Value: 24
  misc_feature: MA Experiment 20000437 PARAMETER Experiment Name: At_Drought_P Parameter: Tissue Value: Whole Plant
  misc_feature: MA Experiment 20000437 PARAMETER Experiment Name: At_Drought_P Parameter: Treatment Value: Drought vs. No Drought
  misc_feature: MA Experiment ID: 20000794 Result: Up-regulated in Transcription
  misc_feature: MA Experiment 20000794 PARAMETER Experiment Name: At_Petals_P Parameter: Age (day) Value: 23-25 days
  misc_feature: MA Experiment 20000794 PARAMETER Experiment Name: At_Petals_P Parameter: Plant Line Value: WS
  misc_feature: MA Experiment 20000794 PARAMETER Experiment Name: At_Petals_P Parameter: Tissue Value: Petals vs. Whole plant
aaattcatcttctcttcttcctccgattccatctttctccgtttccggcgataatcttcatcgcttcttcagttgattatctttagaatggagctaaagaatgtcaaagatgcgtttgatcgtgttaccaaaaagcagaaactatgctatagcaaaacgcatgaagtggtagacaaaatgtctcaagaaatcgacaaggcattgaaaacgatacaggaggataatcatgaatctgttgttgctgatctgaagaaaacttttgaggagattgctccaatcaatctactagaagcgtctcagaaagaaataaatggggttcttaccaaatacccgaaagctcttgacaaaactctgaatccagatatatcgacggcttacagaaacgttaagtttgatactcatacagttcatcagatactagctcagtttttctacaggcaaggcatgtacgacgttggtgactgtttcatttccgagactggtgaggttaagcctgaatcttctgttactaaagctttcatggaaatgaatatgatacttgaagccatgaaagaacgggatctcggaccagctttgaaatgggtagcttcaaactctgacaagctaaaggaagcaaagtcagatcttgagttgaaacttcacagccttcactttttggagatagctaaagacaaaacctccgaagaagctatcaactacgcgagaaaacactttgctacgtattcagcagatagctgctgtttccctgagatacagaaactcatgtgctctctcttatggatcagaaacctcaataaatccccatactcagagttcctctcacctgtattgtggaccaacgctgccaaggaactaacccgacaatactgcatcctactcggtgaatcaccagagagtcctttaagtgtaacagttgcagcaggttcacaagttttaccgacgtttttgaagtatttgaacgtgctgccggagaaaagaaaagagtggcaaacaatggagcaacttcttgtacctgtggaactctctgaagagtatcgcttctactcggtctttgtctgccctgtctctaaagaacactcgagcgaagataatccgccgatgagattggcttgcggtcatgtcctttgcaagcagtctatcaacagaatgtcgaggaatggttcaaggtcgttcaagtgtccttattgtccaacagatattgatgcttcgcagtgtaagcagttatatttttagactagctttacaacttcttatgcagcatttctaaagaaagtagacaaatgtttcttatcttttcttttatgaacttgaattgggttcgtgtacaaaaactatagtttgaaataaaaccttttataccc

SEQ ID NO: 99749 - protein, 381 aa, Arabidopsis thaliana
  peptide (1)..(381): Ceres Seq. ID no. 13603544
  misc_feature (1)..(381): Homolog of NCBI NO: 18400050 NR Description: expressed protein [Arabidopsis thaliana]
  misc_feature (1)..(381): Homolog of NCBI NO: 21593562 NR Description: unknown [Arabidopsis thaliana]
  misc_feature (1)..(381): Homolog of NCBI NO: 15235735 NR Description: expressed protein [Arabidopsis thaliana]
  misc_feature (6)..(381): Homolog of NCBI NO: 15242463 NR Description: expressed protein [Arabidopsis thaliana]
  misc_feature (1)..(381): Homolog of NCBI NO: 28829262 NR Description: similar to Arabidopsis thaliana (Mouse-ear
  misc_feature (6)..(381): Homolog of NCBI NO: 31240441 NR Description: ENSANGP00000021271 [Anopheles gambiae]
  misc_feature (47)..(381): Homolog of NCBI NO: 37590378 NR Description: Unknown (protein for MGC:73277) [Danio rerio]
  misc_feature (1)..(381): Homolog of NCBI NO: 12232469 NR Description: hypothetical protein FLJ13910 [Homo sapiens] hypothetical protein, clone MTA.D02.090 [Mus musculus] unnamed protein product [Homo sapiens]
  misc_feature (1)..(381): Homolog of NCBI NO: 10434433 NR Description: unnamed protein product [Homo sapiens]
  misc_feature (1)..(381): Homolog of NCBI NO: 31044429 NR Description: hypothetical protein MGC59617 [Mus musculus]
MELKNVKDAFDRVTKKQKLCYSKTHEVVDKMSQEIDKALKTIQEDNHESVVADLKKTFEEIAPINLLEASQKEINGVLTKYPKALDKTLNPDISTAYRNVKFDTHTVHQILAQFFYRQGMYDVGDCFISETGEVKPESSVTKAFMEMNMILEAMKERDLGPALKWVASNSDKLKEAKSDLELKLHSLHFLEIAKDKTSEEAINYARKHFATYSADSCCFPEIQKLMCSLLWIRNLNKSPYSEFLSPVLWTNAAKELTRQYCILLGESPESPLSVTVAAGSQVLPTFLKYLNVLPEKRKEWQTMEQLLVPVELSEEYRFYSVFVCPVSKEHSSEDNPPMRLACGHVLCKQSINRMSRNGSRSFKCPYCPTDIDASQCKQLYF

SEQ ID NO: 99750 - protein, 351 aa, Arabidopsis thaliana
  peptide (1)..(351): Ceres Seq. ID no. 13603545
  misc_feature (1)..(351): Homolog of NCBI NO: 18400050 NR Description: expressed protein [Arabidopsis thaliana]
  misc_feature (1)..(351): Homolog of NCBI NO: 21593562 NR Description: unknown [Arabidopsis thaliana]
  misc_feature (1)..(351): Homolog of NCBI NO: 15235735 NR Description: expressed protein [Arabidopsis thaliana]
  misc_feature (1)..(351): Homolog of NCBI NO: 15242463 NR Description: expressed protein [Arabidopsis thaliana]
  misc_feature (1)..(351): Homolog of NCBI NO: 28829262 NR Description: similar to Arabidopsis thaliana (Mouse-ear
  misc_feature (1)..(351): Homolog of NCBI NO: 31240441 NR Description: ENSANGP00000021271 [Anopheles gambiae]
  misc_feature (17)..(351): Homolog of NCBI NO: 37590378 NR Description: Unknown (protein for MGC:73277) [Danio rerio]
  misc_feature (1)..(351): Homolog of NCBI NO: 12232469 NR Description: hypothetical protein FLJ13910 [Homo sapiens] hypothetical protein, clone MTA.D02.090 [Mus musculus] unnamed protein product [Homo sapiens]
  misc_feature (1)..(351): Homolog of NCBI NO: 10434433 NR Description: unnamed protein product [Homo sapiens]
  misc_feature (1)..(351): Homolog of NCBI NO: 31044429 NR Description: hypothetical protein MGC59617 [Mus musculus]
MSQEIDKALKTIQEDNHESVVADLKKTFEEIAPINLLEASQKEINGVLTKYPKALDKTLNPDISTAYRNVKFDTHTVHQILAQFFYRQGMYDVGDCFISETGEVKPESSVTKAFMEMNMILEAMKERDLGPALKWVASNSDKLKEAKSDLELKLHSLHFLEIAKDKTSEEAINYARKHFATYSADSCCFPEIQKLMCSLLWIRNLNKSPYSEFLSPVLWTNAAKELTRQYCILLGESPESPLSVTVAAGSQVLPTFLKYLNVLPEKRKEWQTMEQLLVPVELSEEYRFYSVFVCPVSKEHSSEDNPPMRLACGHVLCKQSINRMSRNGSRSFKCPYCPTDIDASQCKQLYF

SEQ ID NO: 99751 - protein, 262 aa, Arabidopsis thaliana
  peptide (1)..(262): Ceres Seq. ID no. 13603546
  misc_feature (1)..(262): Homolog of NCBI NO: 18400050 NR Description: expressed protein [Arabidopsis thaliana]
  misc_feature (1)..(262): Homolog of NCBI NO: 21593562 NR Description: unknown [Arabidopsis thaliana]
  misc_feature (1)..(262): Homolog of NCBI NO: 15235735 NR Description: expressed protein [Arabidopsis thaliana]
  misc_feature (1)..(262): Homolog of NCBI NO: 15242463 NR Description: expressed protein [Arabidopsis thaliana]
  misc_feature (1)..(262): Homolog of NCBI NO: 28829262 NR Description: similar to Arabidopsis thaliana (Mouse-ear
  misc_feature (1)..(262): Homolog of NCBI NO: 31240441 NR Description: ENSANGP00000021271 [Anopheles gambiae]
  misc_feature (1)..(262): Homolog of NCBI NO: 37590378 NR Description: Unknown (protein for MGC:73277) [Danio rerio]
  misc_feature (1)..(262): Homolog of NCBI NO: 12232469 NR Description: hypothetical protein FLJ13910 [Homo sapiens] hypothetical protein, clone MTA.D02.090 [Mus musculus] unnamed protein product [Homo sapiens]
  misc_feature (1)..(262): Homolog of NCBI NO: 10434433 NR Description: unnamed protein product [Homo sapiens]
  misc_feature (1)..(262): Homolog of NCBI NO: 31044429 NR Description: hypothetical protein MGC59617 [Mus musculus]
MYDVGDCFISETGEVKPESSVTKAFMEMNMILEAMKERDLGPALKWVASNSDKLKEAKSDLELKLHSLHFLEIAKDKTSEEAINYARKHFATYSADSCCFPEIQKLMCSLLWIRNLNKSPYSEFLSPVLWTNAAKELTRQYCILLGESPESPLSVTVAAGSQVLPTFLKYLNVLPEKRKEWQTMEQLLVPVELSEEYRFYSVFVCPVSKEHSSEDNPPMRLACGHVLCKQSINRMSRNGSRSFKCPYCPTDIDASQCKQLYF

SEQ ID NO: 99752 - DNA, 1352 bp, Arabidopsis thaliana
  misc_feature (1)..(1352): Ceres Seq. ID no. 13603555
  misc_feature: MA Experiment ID: 108462 Result: Down-regulated in Transcription
  misc_feature: MA Experiment 108462 PARAMETER Experiment Name: At_Germinating_Seeds_cDNA_P Parameter: Age (day) Value: 2 vs. 0
  misc_feature: MA Experiment 108462 PARAMETER Experiment Name: At_Germinating_Seeds_cDNA_P Parameter: Tissue Value: Germinating Seeds
  misc_feature: MA Experiment ID: 108668 Result: Up-regulated in Transcription
  misc_feature: MA Experiment 108668 PARAMETER Experiment Name: At_2mM_SA_cDNA_P Parameter: Plant Line Value: WS
  misc_feature: MA Experiment 108668 PARAMETER Experiment Name: At_2mM_SA_cDNA_P Parameter: Timepoint (hr) Value: 6
  misc_feature: MA Experiment 108668 PARAMETER Experiment Name: At_2mM_SA_cDNA_P Parameter: Treatment Value: 2mM SA vs. No Treatment
gaaacggaacgtaattatttacgtgacttatgaaaagtcatcggcgattgtttctaatttgtcatcgccgccgttgaactatctcgccggcgataatgatctacgttggtggagtgcaatttctagacgagagtagctctttttcattgtcttcttcatcgcagggaagtagcttgcttgttgatgtaatgagtcatcctgtgataacgttagcttctgattcctttaagaatcttgaggaaaagaatgtttctttcgatgaaagtgattcagagagctcaacaaaagacagatatgtttacatattccaaagagaatttgctgttgtgaatccagctcttgttgattttgttggcaccgatgaagcaacaacttgtgtaggccttgttatccgcaacagaaaatctggaatgacgtctgttgcacacatggattcgccagagattgtggatttggggataagccagatgttgttattggttttacaggatgacgtagatgccgagttagatgtacatatggttggtggttatgaagatgtcgacataaaaaatgctgatggtgttggtgactatgccaaaccagagggttattcatttccgttgtgttgcaaattagtagaaactttgcagaagagaagagaaaactttcacattcaaaccctctttattcttgggcacaataccaagttggattcacaagcaaacacgtgccccatttttaatggatgcctggtgaataccagcaccggtgcaatcttgccagccagtttcaacagaacatctagatgtccggatgagatcgttagaagaattcgagtttcatcatcgtttgaagattctagctggaagggaaagttacttgacacatatgacacaaaaactgatagattcatcatcgcaccatgccgctggacaatgcgcttgattgaatatgtttgggaacttaatcagcttactgatgaagaaatcctcactaactgttccacctcaccttctgctgaaggtccagacttcgtaaacagtttaagaaggaattggggatatttactgaaatatccagaatggagcaaaacattcccaaggaggcaaccacgtgtgtttgaaagaactgtcgatggacactggaaaaaatgctgactttctcatctaatcatcatgacattatccagaaatctggctaaaaacaacggttagtgtatctaacattttgagatttatgtaaatggtcaagaacacatgtgattgattcttggacacagaaaatgtttgatttatctttttgactttttgtatcaaacgttgcaagtttggttcctatgaaaatatgggccggatcaggcccggtagacc

SEQ ID NO: 99753 - protein, 347 aa, Arabidopsis thaliana; identical to SEQ ID NO: 34907
  peptide (1)..(347): Ceres Seq. ID no. 13603556
  misc_feature (1)..(347): Homolog of NCBI NO: 18406532 NR Description: expressed protein [Arabidopsis thaliana] expressed protein [Arabidopsis thaliana] unknown protein [Arabidopsis thaliana]
  misc_feature (1)..(347): Homolog of NCBI NO: 21554202 NR Description: unknown [Arabidopsis thaliana]
  misc_feature (106)..(313): Homolog of NCBI NO: 7486430 NR Description: hypothetical protein At2g44420 [imported] -
  misc_feature (313)..(347): Homolog of NCBI NO: 7486430 NR Description: hypothetical protein At2g44420 [imported] -
  misc_feature (157)..(346): Homolog of NCBI NO: 38382972 NR Description: Unknown (protein for MGC:77869) [Danio rerio]
  misc_feature (157)..(346): Homolog of NCBI NO: 6754902 NR Description: N-terminal Asn amidase; asparagine-specific
  misc_feature (157)..(346): Homolog of NCBI NO: 2498798 NR Description: PROTEIN N-TERMINAL ASPARAGINE AMIDOHYDROLASE
  misc_feature (157)..(346): Homolog of NCBI NO: 27735049 NR Description: N-terminal Asn amidase [Homo sapiens]
  misc_feature (157)..(346): Homolog of NCBI NO: 33150674 NR Description: N-terminal asparagine amidohydrolase [Homo
  misc_feature (119)..(346): Homolog of NCBI NO: 34868058 NR Description: similar to N-terminal asparagine amidohydrolase

SEQ ID NO: 99754 - protein, 316 aa, Arabidopsis thaliana; identical to SEQ ID NO: 34908
  peptide (1)..(316): Ceres Seq. ID no. 13603557
  misc_feature (1)..(316): Homolog of NCBI NO: 18406532 NR Description: expressed protein [Arabidopsis thaliana] expressed protein [Arabidopsis thaliana] unknown protein [Arabidopsis thaliana]
  misc_feature (1)..(316): Homolog of NCBI NO: 21554202 NR Description: unknown [Arabidopsis thaliana]
  misc_feature (75)..(282): Homolog of NCBI NO: 7486430 NR Description: hypothetical protein At2g44420 [imported] -
  misc_feature (282)..(316): Homolog of NCBI NO: 7486430 NR Description: hypothetical protein At2g44420 [imported] -
  misc_feature (126)..(315): Homolog of NCBI NO: 38382972 NR Description: Unknown (protein for MGC:77869) [Danio rerio]
  misc_feature (126)..(315): Homolog of NCBI NO: 6754902 NR Description: N-terminal Asn amidase; asparagine-specific
  misc_feature (126)..(315): Homolog of NCBI NO: 2498798 NR Description: PROTEIN N-TERMINAL ASPARAGINE AMIDOHYDROLASE
  misc_feature (126)..(315): Homolog of NCBI NO: 27735049 NR Description: N-terminal Asn amidase [Homo sapiens]
  misc_feature (126)..(315): Homolog of NCBI NO: 33150674 NR Description: N-terminal asparagine amidohydrolase [Homo
  misc_feature (88)..(315): Homolog of NCBI NO: 34868058 NR Description: similar to N-terminal asparagine amidohydrolase

SEQ ID NO: 99755 - protein, 242 aa, Arabidopsis thaliana; identical to SEQ ID NO: 34909
  peptide (1)..(242): Ceres Seq. ID no. 13603558
  misc_feature (1)..(242): Homolog of NCBI NO: 18406532 NR Description: expressed protein [Arabidopsis thaliana] expressed protein [Arabidopsis thaliana] unknown protein [Arabidopsis thaliana]
  misc_feature (1)..(242): Homolog of NCBI NO: 21554202 NR Description: unknown [Arabidopsis thaliana]
  misc_feature (1)..(208): Homolog of NCBI NO: 7486430 NR Description: hypothetical protein At2g44420 [imported] -
  misc_feature (208)..(242): Homolog of NCBI NO: 7486430 NR Description: hypothetical protein At2g44420 [imported] -
  misc_feature (52)..(241): Homolog of NCBI NO: 38382972 NR Description: Unknown (protein for MGC:77869) [Danio rerio]
  misc_feature (52)..(241): Homolog of NCBI NO: 6754902 NR Description: N-terminal Asn amidase; asparagine-specific
  misc_feature (52)..(241): Homolog of NCBI NO: 2498798 NR Description: PROTEIN N-TERMINAL ASPARAGINE AMIDOHYDROLASE
  misc_feature (52)..(241): Homolog of NCBI NO: 27735049 NR Description: N-terminal Asn amidase [Homo sapiens]
  misc_feature (52)..(241): Homolog of NCBI NO: 33150674 NR Description: N-terminal asparagine amidohydrolase [Homo
  misc_feature (14)..(241): Homolog of NCBI NO: 34868058 NR Description: similar to N-terminal asparagine amidohydrolase

SEQ ID NO: 99756 - DNA, 1302 bp, Arabidopsis thaliana
  misc_feature (1)..(1302): Ceres Seq. ID no. 13603565
  misc_feature: MA Experiment ID: 20000113 Result: Down-regulated in Transcription
  misc_feature: MA Experiment 20000113 PARAMETER Experiment Name: At_42deg_Heat_cDNA_P Parameter: Temperature (deg C) Value: 42 vs. 22
  misc_feature: MA Experiment 20000113 PARAMETER Experiment Name: At_42deg_Heat_cDNA_P Parameter: Timepoint (hr) Value: 8
  misc_feature: MA Experiment 20000113 PARAMETER Experiment Name: At_42deg_Heat_cDNA_P Parameter: Tissue Value: Aerial
  misc_feature: MA Experiment ID: 20000224 Result: Down-regulated in Transcription
acagggaaaagcagagcactctttatctcttcttctctctttcttctactctgtgatcaaactatcgaagaaaaaacaaaccctagatttatccgcccctcttcttcctctgatgataagaaagtcgaagactttgagaatctaaagctgaaaaattttgttttttttcattgagggaatcgaatcgagttatgtacaaggatcggagtggaggaggaataatgggtggtggtggatcatcgagatcggagatccttggtggagctattgatcggaaacgaatcaatgatgctttagacaaacatcttaagaaatcttcaccttctacatctagggttttcacttctaaggacaaagattctgtcccttctacttcaactgctaaatctcagcttcattctcgttcccccgatgttgaatctgacacggatagtgaaggatcagatgtgagtggttcagaaggtgatgatacctcttggatctcatggttttgtaatttgagagggaatgagtttttctgtgaagtagatgaagattatatacaagatgatttcaatctctgtggtttgagtggtcaagttccttactatgattatgcacttgatctcattttagatgttgaatcatcaaatggtgatatgtttactgaagaacagcatgagatggtggaatcagctgctgagatgttatatggtcttattcatgttcgttatattctcactactaaaggaatggctgctatgatggagaagtataagaattatgatttcgggagatgccccagagttttctgttgcggacagtcttgtcttccggttggccaatctgatatcccgaggtcgagcactgtgaagatatactgcccaaaatgcgaggatatttactacccgcgatctaaataccaaggcaacattgatggagcttactttggaactactttccctcatttgtttctcatggcctatgggaacatgaaaccgcagaagccggctcaaaactacgttcctaagatctttggctttaaggtacacaacaaacaatgatactctctcctctcaacagtcttgtggttgaatacaatctcggtggctaaaccaccattcttctgatggtcacgggtttgaaatggatgatactaaactgcgtttggaggatgagaagagctaatgaagaaaggtcgacacttaaaagtttttcactatgtaatctcaaaagttctaagtagaatcttcaacatagaaccgttctttgatgggtcttgggaaattctttacctgtgagtaatcaattaaatcatttacc

SEQ ID NO: 99757 - protein, 283 aa, Arabidopsis thaliana; identical to SEQ ID NO: 25592
  peptide (1)..(283): Ceres Seq. ID no. 13603566
  misc_feature (92)..(270): Pfam Name: Casein kinase II regulatory subunit Pfam Description: Casein kinase II regulatory subunit
  misc_feature (1)..(283): Homolog of NCBI NO: 15224934 NR Description: casein kinase II beta chain, putative
  misc_feature (1)..(283): Homolog of NCBI NO: 30689795 NR Description: casein kinase II beta chain, putative thaliana] >gi|15529282|gb|AAK97735.1| At2g44680/F16B22.17 thaliana] >gi|16974421|gb|AAL31136.1| At2g44680/F16B22.17 kinase
  misc_feature (1)..(280): Homolog of NCBI NO: 15232283 NR Description: casein kinase II beta chain, putative
  misc_feature (1)..(280): Homolog of NCBI NO: 21261784 NR Description: protein kinase Ck2 regulatory subunit 2
  misc_feature (1)..(280): Homolog of NCBI NO: 34901776 NR Description: OJ1058_B11.17 [Oryza sativa (japonica >gi|29243371|dbj|BAC66224.1| putative protein kinase CK2
  misc_feature (23)..(280): Homolog of NCBI NO: 11527004 NR Description: protein kinase CK2 regulatory subunit CK2B3 [Zea
  misc_feature (15)..(282): Homolog of NCBI NO: 37536920 NR Description: putative casein kinase II beta subunit [Oryza
  misc_feature (26)..(280): Homolog of NCBI NO: 11527002 NR Description: protein kinase CK2 regulatory subunit CK2B2 [Zea
  misc_feature (1)..(280): Homolog of NCBI NO: 15236597 NR Description: casein kinase II beta chain, putative thaliana] >gi|729882|sp|P40229|KC2C_ARATH Casein kinase II beta'
  misc_feature (1)..(280): Homolog of NCBI NO: 15238013 NR Description: casein kinase II beta chain, putative thaliana] >gi|729880|sp|P40228|KC2B_ARATH Casein kinase II beta

SEQ ID NO: 99758 - protein, 273 aa, Arabidopsis thaliana; identical to SEQ ID NO: 25593
  peptide (1)..(273): Ceres Seq. ID no. 13603567
  misc_feature (82)..(260): Pfam Name: Casein kinase II regulatory subunit Pfam Description: Casein kinase II regulatory subunit
  misc_feature (1)..(273): Homolog of NCBI NO: 15224934 NR Description: casein kinase II beta chain, putative
  misc_feature (1)..(273): Homolog of NCBI NO: 30689795 NR Description: casein kinase II beta chain, putative thaliana] >gi|15529282|gb|AAK97735.1| At2g44680/F16B22.17 thaliana] >gi|16974421|gb|AAL31136.1| At2g44680/F16B22.17 kinase
  misc_feature (1)..(270): Homolog of NCBI NO: 15232283 NR Description: casein kinase II beta chain, putative
  misc_feature (1)..(270): Homolog of NCBI NO: 21261784 NR Description: protein kinase Ck2 regulatory subunit 2
  misc_feature (1)..(270): Homolog of NCBI NO: 34901776 NR Description: OJ1058_B11.17 [Oryza sativa (japonica >gi|29243371|dbj|BAC66224.1| putative protein kinase CK2
  misc_feature (13)..(270): Homolog of NCBI NO: 11527004 NR Description: protein kinase CK2 regulatory subunit CK2B3 [Zea
  misc_feature (5)..(272): Homolog of NCBI NO: 37536920 NR Description: putative casein kinase II beta subunit [Oryza
  misc_feature (16)..(270): Homolog of NCBI NO: 11527002 NR Description: protein kinase CK2 regulatory subunit CK2B2 [Zea
  misc_feature (1)..(270): Homolog of NCBI NO: 15236597 NR Description: casein kinase II beta chain, putative thaliana] >gi|729882|sp|P40229|KC2C_ARATH Casein kinase II beta'
  misc_feature (1)..(270): Homolog of NCBI NO: 15238013 NR Description: casein kinase II beta chain, putative thaliana] >gi|729880|sp|P40228|KC2B_ARATH Casein kinase II beta

SEQ ID NO: 99759 - DNA, 1153 bp, Arabidopsis thaliana
  misc_feature (1)..(1153): Ceres Seq. ID no. 13603568
  misc_feature: MA Experiment ID: 108488 Result: Up-regulated in Transcription
  misc_feature: MA Experiment ID: 108501 Result: Up-regulated in Transcription
  misc_feature: MA Experiment 108501 PARAMETER Experiment Name: At_ap2_floral_buds_cDNA_P Parameter: Plant Line Value: ap2 (Ler.)
  misc_feature: MA Experiment 108501 PARAMETER Experiment Name: At_ap2_floral_buds_cDNA_P Parameter: Tissue Value: Closed Flower
  misc_feature: MA Experiment ID: 108572 Result: Down-regulated in Transcription
  misc_feature: MA Experiment 108572 PARAMETER Experiment Name: At_Drought_cDNA_P Parameter: Timepoint (hr) Value: 1
  misc_feature: MA Experiment 108572 PARAMETER Experiment Name: At_Drought_cDNA_P Parameter: Tissue Value: Aerial
  misc_feature: MA Experiment 108572 PARAMETER Experiment Name: At_Drought_cDNA_P Parameter: Treatment Value: Drought vs. No Drought
  misc_feature: MA Experiment ID: 108573 Result: Down-regulated in Transcription
  misc_feature: MA Experiment 108573 PARAMETER Experiment Name: At_Drought_cDNA_P Parameter: Timepoint (hr) Value: 6
  misc_feature: MA Experiment 108573 PARAMETER Experiment Name: At_Drought_cDNA_P Parameter: Tissue Value: Aerial
  misc_feature: MA Experiment 108573 PARAMETER Experiment Name: At_Drought_cDNA_P Parameter: Treatment Value: Drought vs. No Drought
  misc_feature: MA Experiment ID: 108576 Result: Down-regulated in Transcription
  misc_feature: MA Experiment 108576 PARAMETER Experiment Name: At_42deg_Heat_cDNA_P Parameter: Temperature (deg C) Value: 42 vs. 22
  misc_feature: MA Experiment 108576 PARAMETER Experiment Name: At_42deg_Heat_cDNA_P Parameter: Timepoint (hr) Value: 1
  misc_feature: MA Experiment 108576 PARAMETER Experiment Name: At_42deg_Heat_cDNA_P Parameter: Tissue Value: Aerial
  misc_feature: MA Experiment ID: 108594 Result: Down-regulated in Transcription
  misc_feature: MA Experiment 108594 PARAMETER Experiment Name: At_Ler-rhl_Root_cDNA_P Parameter: Plant Line Value: null
  misc_feature: MA Experiment ID: 20000093 Result: Down-regulated in Transcription
  misc_feature: MA Experiment 20000093 PARAMETER Experiment Name: At_42deg_Heat_cDNA_P Parameter: Temperature (deg C) Value: 42 vs. 22
  misc_feature: MA Experiment 20000093 PARAMETER Experiment Name: At_42deg_Heat_cDNA_P Parameter: Timepoint (hr) Value: 0.5
  misc_feature: MA Experiment 20000093 PARAMETER Experiment Name: At_42deg_Heat_cDNA_P Parameter: Tissue Value: Aerial
  misc_feature: MA Experiment ID: 20000111 Result: Down-regulated in Transcription
  misc_feature: MA Experiment 20000111 PARAMETER Experiment Name: At_42deg_Heat_cDNA_P Parameter: Temperature (deg C) Value: 42 vs. 22
  misc_feature: MA Experiment 20000111 PARAMETER Experiment Name: At_42deg_Heat_cDNA_P Parameter: Timepoint (hr) Value: 6
  misc_feature: MA Experiment 20000111 PARAMETER Experiment Name: At_42deg_Heat_cDNA_P Parameter: Tissue Value: Aerial
  misc_feature: MA Experiment ID: 20000112 Result: Down-regulated in Transcription
  misc_feature: MA Experiment 20000112 PARAMETER Experiment Name: At_42deg_Heat_cDNA_P Parameter: Temperature (deg C) Value: 42 vs. 22
  misc_feature: MA Experiment 20000112 PARAMETER Experiment Name: At_42deg_Heat_cDNA_P Parameter: Timepoint (hr) Value: 2
  misc_feature: MA Experiment 20000112 PARAMETER Experiment Name: At_42deg_Heat_cDNA_P Parameter: Tissue Value: Aerial
  misc_feature: MA Experiment ID: 20000113 Result: Down-regulated in Transcription
  misc_feature: MA Experiment 20000113 PARAMETER Experiment Name: At_42deg_Heat_cDNA_P Parameter: Temperature (deg C) Value: 42 vs. 22
  misc_feature: MA Experiment 20000113 PARAMETER Experiment Name: At_42deg_Heat_cDNA_P Parameter: Timepoint (hr) Value: 8
  misc_feature: MA Experiment 20000113 PARAMETER Experiment Name: At_42deg_Heat_cDNA_P Parameter: Tissue Value: Aerial
  misc_feature: MA Experiment ID: 20000144 Result: Down-regulated in Transcription
  misc_feature: MA Experiment 20000144 PARAMETER Experiment Name: At_42deg_Heat_cDNA_P Parameter: Temperature (deg C) Value: 42 vs. 22
  misc_feature: MA Experiment 20000144 PARAMETER Experiment Name: At_42deg_Heat_cDNA_P Parameter: Timepoint (hr) Value: 1
  misc_feature: MA Experiment 20000144 PARAMETER Experiment Name: At_42deg_Heat_cDNA_P Parameter: Tissue Value: Aerial
  misc_feature: MA Experiment ID: 20000171 Result: Down-regulated in Transcription
  misc_feature: MA Experiment 20000171 PARAMETER Experiment Name: At_42deg_Heat_P Parameter: Age (day) Value: 14
  misc_feature: MA Experiment 20000171 PARAMETER Experiment Name: At_42deg_Heat_P Parameter: Organism Value: A. thaliana
  misc_feature: MA Experiment 20000171 PARAMETER Experiment Name: At_42deg_Heat_P Parameter: Plant Line Value: WS
  misc_feature: MA Experiment 20000171 PARAMETER Experiment Name: At_42deg_Heat_P Parameter: Temperature (deg C) Value: 42 vs. 22
  misc_feature: MA Experiment 20000171 PARAMETER Experiment Name: At_42deg_Heat_P Parameter: Timepoint (hr) Value: 1
  misc_feature: MA Experiment 20000171 PARAMETER Experiment Name: At_42deg_Heat_P Parameter: Tissue Value: Aerial
  misc_feature: MA Experiment ID: 20000173 Result: Down-regulated in Transcription
  misc_feature: MA Experiment 20000173 PARAMETER Experiment Name: At_42deg_Heat_P Parameter: Age (day) Value: 14
  misc_feature: MA Experiment 20000173 PARAMETER Experiment Name: At_42deg_Heat_P Parameter: Organism Value: A. thaliana
  misc_feature: MA Experiment 20000173 PARAMETER Experiment Name: At_42deg_Heat_P Parameter: Plant Line Value: WS
  misc_feature: MA Experiment 20000173 PARAMETER Experiment Name: At_42deg_Heat_P Parameter: Temperature (deg C) Value: 42 vs. 22
  misc_feature: MA Experiment 20000173 PARAMETER Experiment Name: At_42deg_Heat_P Parameter: Timepoint (hr) Value: 6
  misc_feature: MA Experiment 20000173 PARAMETER Experiment Name: At_42deg_Heat_P Parameter: Tissue Value: Aerial
  misc_feature: MA Experiment ID: 20000184 Result: Up-regulated in Transcription
  misc_feature: MA Experiment 20000184 PARAMETER Experiment Name: At_Shoots__P Parameter: Age (day) Value: 7
  misc_feature: MA Experiment 20000184 PARAMETER Experiment Name: At_Shoots__P Parameter: Tissue Value: Shoots vs. Whole Plant
  misc_feature: MA Experiment ID: 20000185 Result: Up-regulated in Transcription
  misc_feature: MA Experiment 20000185 PARAMETER Experiment Name: At_Roots__P Parameter: Age (day) Value: 7 vs. 21
  misc_feature: MA Experiment 20000185 PARAMETER Experiment Name: At_Roots__P Parameter: Organism Value: A. thaliana
  misc_feature: MA Experiment 20000185 PARAMETER Experiment Name: At_Roots__P Parameter: Tissue Value: Roots vs. Whole Plant
  misc_feature: MA Experiment ID: 20000213 Result: Up-regulated in Transcription
  misc_feature: MA Experiment 20000213 PARAMETER Experiment Name: At_4deg_Cold_P Parameter: Timepoint (hr) Value: 2
  misc_feature: MA Experiment ID: 20000227 Result: Down-regulated in Transcription
  misc_feature: MA Experiment 20000227 PARAMETER Experiment Name: At_Root-Tips-vs-Tops_P Parameter: Tissue Value: Root Tips vs. Root Tops
  misc_feature: MA Experiment ID: 20000234 Result: Up-regulated in Transcription
  misc_feature: MA Experiment 20000234 PARAMETER Experiment Name: At_Siliques_P Parameter: Age (day) Value: 21
  misc_feature: MA Experiment 20000234 PARAMETER Experiment Name: At_Siliques_P Parameter: Organism Value: A. thaliana
  misc_feature: MA Experiment 20000234 PARAMETER Experiment Name: At_Siliques_P Parameter: Plant Line Value: WS
  misc_feature: MA Experiment 20000234 PARAMETER Experiment Name: At_Siliques_P Parameter: Tissue Value: Less Than 5mm Siliques vs. Whole Plant
  misc_feature: MA Experiment ID: 20000235 Result: Up-regulated in Transcription
  misc_feature: MA Experiment 20000235 PARAMETER Experiment Name: At_Siliques_P Parameter: Age (day) Value: 21
  misc_feature: MA Experiment 20000235 PARAMETER Experiment Name: At_Siliques_P Parameter: Organism Value: A. thaliana
  misc_feature: MA Experiment 20000235 PARAMETER Experiment Name: At_Siliques_P Parameter: Plant Line Value: WS
  misc_feature: MA Experiment 20000235 PARAMETER Experiment Name: At_Siliques_P Parameter: Tissue Value: 5-10mm Siliques vs. Whole Plant
  misc_feature: MA Experiment ID: 20000438 Result: Up-regulated in Transcription
  misc_feature: MA Experiment 20000438 PARAMETER Experiment Name: At_Shoots__P Parameter: Age (day) Value: 14
  misc_feature: MA Experiment 20000438 PARAMETER Experiment Name: At_Shoots__P Parameter: Tissue Value: Shoots vs. Whole Plant
  misc_feature: MA Experiment ID: 20000439 Result: Up-regulated in Transcription
  misc_feature: MA Experiment 20000439 PARAMETER Experiment Name: At_Roots__P Parameter: Age (day) Value: 14 vs. 21
  misc_feature: MA Experiment 20000439 PARAMETER Experiment Name: At_Roots__P Parameter: Organism Value: A. thaliana
  misc_feature: MA Experiment 20000439 PARAMETER Experiment Name: At_Roots__P Parameter: Tissue Value: Roots vs. Whole Plant
  misc_feature: MA Experiment ID: 20000527 Result: Down-regulated in Transcription
  misc_feature: MA Experiment 20000527 PARAMETER Experiment Name: At_10percent_PEG_P Parameter: Age (day) Value: 20
  misc_feature: MA Experiment 20000527 PARAMETER Experiment Name: At_10percent_PEG_P Parameter: Organism Value: A. thaliana
  misc_feature: MA Experiment 20000527 PARAMETER Experiment Name: At_10percent_PEG_P Parameter: Plant Line Value: WS
  misc_feature: MA Experiment 20000527 PARAMETER Experiment Name: At_10percent_PEG_P Parameter: Timepoint (day) Value: 20
  misc_feature: MA Experiment 20000527 PARAMETER Experiment Name: At_10percent_PEG_P Parameter: Tissue Value: Whole Plant
  misc_feature: MA Experiment 20000527 PARAMETER Experiment Name: At_10percent_PEG_P Parameter: Treatment Value: 10percent PEG vs. No Treatment
  misc_feature: MA Experiment ID: 20001247 Result: Down-regulated in Transcription
  misc_feature: MA Experiment 20001247 PARAMETER Experiment Name: At_Far-red-induction_P Parameter: Age (day) Value: 7
  misc_feature: MA Experiment 20001247 PARAMETER Experiment Name: At_Far-red-induction_P Parameter: Light Value: Far-red vs. White
  misc_feature: MA Experiment 20001247 PARAMETER Experiment Name: At_Far-red-induction_P Parameter: Organism Value: A. thaliana
  misc_feature: MA Experiment 20001247 PARAMETER Experiment Name: At_Far-red-induction_P Parameter: Plant Line Value: Columbia
  misc_feature: MA Experiment 20001247 PARAMETER Experiment Name: At_Far-red-induction_P Parameter: Timepoint (hr) Value: 1
  misc_feature: MA Experiment 20001247 PARAMETER Experiment Name: At_Far-red-induction_P Parameter: Tissue Value: Whole Plant
  misc_feature: MA Experiment ID: 20001248 Result: Down-regulated in Transcription
  misc_feature: MA Experiment 20001248 PARAMETER Experiment Name: At_Far-red-induction_P Parameter: Age (day) Value: 7
  misc_feature: MA Experiment 20001248 PARAMETER Experiment Name: At_Far-red-induction_P Parameter: Light Value: Far-red vs. White
  misc_feature: MA Experiment 20001248 PARAMETER Experiment Name: At_Far-red-induction_P Parameter: Organism Value: A. thaliana
  misc_feature: MA Experiment 20001248 PARAMETER Experiment Name: At_Far-red-induction_P Parameter: Plant Line Value: Columbia
  misc_feature: MA Experiment 20001248 PARAMETER Experiment Name: At_Far-red-induction_P Parameter: Timepoint (hr) Value: 4
  misc_feature: MA Experiment 20001248 PARAMETER Experiment Name: At_Far-red-induction_P Parameter: Tissue Value: Whole Plant
  misc_feature: MA Experiment ID: 20001450 Result: Down-regulated in Transcription
  misc_feature: MA Experiment 20001450 PARAMETER Experiment Name: At_Far-red-induction_P Parameter: Age (day) Value: 7
  misc_feature: MA Experiment 20001450 PARAMETER Experiment Name: At_Far-red-induction_P Parameter: Light Value: Far-red vs. White
  misc_feature: MA Experiment 20001450 PARAMETER Experiment Name: At_Far-red-induction_P Parameter: Organism Value: A. thaliana
  misc_feature: MA Experiment 20001450 PARAMETER Experiment Name: At_Far-red-induction_P Parameter: Plant Line Value: Columbia
  misc_feature: MA Experiment 20001450 PARAMETER Experiment Name: At_Far-red-induction_P Parameter: Timepoint (hr) Value: 8
  misc_feature: MA Experiment 20001450 PARAMETER Experiment Name: At_Far-red-induction_P Parameter: Tissue Value: Whole Plant
  misc_feature: MA Experiment ID: 20001555 Result: Down-regulated in Transcription
  misc_feature: MA Experiment 20001555 PARAMETER Experiment Name: At_Drought_Soil_Dry_P Parameter: Age (day) Value: 24
  misc_feature: MA Experiment 20001555 PARAMETER Experiment Name: At_Drought_Soil_Dry_P Parameter: Organism Value: A. thaliana
  misc_feature: MA Experiment 20001555 PARAMETER Experiment Name: At_Drought_Soil_Dry_P Parameter: Plant Line Value: WS
  misc_feature: MA Experiment 20001555 PARAMETER Experiment Name: At_Drought_Soil_Dry_P Parameter: Post Timepoint (hr) Value: None
  misc_feature: MA Experiment 20001555 PARAMETER Experiment Name: At_Drought_Soil_Dry_P Parameter: Post-Treatment Value: None
  misc_feature: MA Experiment 20001555 PARAMETER Experiment Name: At_Drought_Soil_Dry_P Parameter: Timepoint (day) Value: 10
  misc_feature: MA Experiment 20001555 PARAMETER Experiment Name: At_Drought_Soil_Dry_P Parameter: Treatment Value: Drought vs. No Drought
  misc_feature: MA Experiment ID: 20001556 Result: Down-regulated in Transcription
  misc_feature: MA Experiment 20001556 PARAMETER Experiment Name: At_Drought_Soil_Dry_P Parameter: Age (day) Value: 26
  misc_feature: MA Experiment 20001556 PARAMETER Experiment Name: At_Drought_Soil_Dry_P Parameter: Organism Value: A. thaliana
  misc_feature: MA Experiment 20001556 PARAMETER Experiment Name: At_Drought_Soil_Dry_P Parameter: Plant Line Value: WS
  misc_feature: MA Experiment 20001556 PARAMETER Experiment Name: At_Drought_Soil_Dry_P Parameter: Post Timepoint (hr) Value: None
  misc_feature: MA Experiment 20001556 PARAMETER Experiment Name: At_Drought_Soil_Dry_P Parameter: Post-Treatment Value: None
  misc_feature: MA Experiment 20001556 PARAMETER Experiment Name: At_Drought_Soil_Dry_P Parameter: Timepoint (day) Value: 12
  misc_feature: MA Experiment 20001556 PARAMETER Experiment Name: At_Drought_Soil_Dry_P Parameter: Treatment Value: Drought vs. No Drought
  misc_feature: MA Experiment ID: 20001906 Result: Down-regulated in Transcription
  misc_feature: MA Experiment 20001906 PARAMETER Experiment Name: At_Drought_Reproduction_P Parameter: Age (day) Value: 35
  misc_feature: MA Experiment 20001906 PARAMETER Experiment Name: At_Drought_Reproduction_P Parameter: Organism Value: A. thaliana
  misc_feature: MA Experiment 20001906 PARAMETER Experiment Name: At_Drought_Reproduction_P Parameter: Plant Line Value: WS
  misc_feature: MA Experiment 20001906 PARAMETER Experiment Name: At_Drought_Reproduction_P Parameter: Timepoint (day) Value: 5
  misc_feature: MA Experiment 20001906 PARAMETER Experiment Name: At_Drought_Reproduction_P Parameter: Tissue Value: Siliques
  misc_feature: MA Experiment 20001906 PARAMETER Experiment Name: At_Drought_Reproduction_P Parameter: Treatment Value: Drought vs. No Drought
  misc_feature: MA Experiment ID: 20001908 Result: Down-regulated in Transcription
  misc_feature: MA Experiment 20001908 PARAMETER Experiment Name: At_Drought_Reproduction_P Parameter: Age (day) Value: 40
  misc_feature: MA Experiment 20001908 PARAMETER Experiment Name: At_Drought_Reproduction_P Parameter: Organism Value: A. thaliana
  misc_feature: MA Experiment 20001908 PARAMETER Experiment Name: At_Drought_Reproduction_P Parameter: Plant Line Value: WS
  misc_feature: MA Experiment 20001908 PARAMETER Experiment Name: At_Drought_Reproduction_P Parameter: Timepoint (day) Value: 10
  misc_feature: MA Experiment 20001908 PARAMETER Experiment Name: At_Drought_Reproduction_P Parameter: Tissue Value: Siliques
  misc_feature: MA Experiment 20001908 PARAMETER Experiment Name: At_Drought_Reproduction_P Parameter: Treatment Value: Drought vs. No Drought
  misc_feature: MA Experiment ID: 20001911 Result: Down-regulated in Transcription
  misc_feature: MA Experiment 20001911 PARAMETER Experiment Name: At_Drought_Reproduction_P Parameter: Age (day) Value: 40
  misc_feature: MA Experiment 20001911 PARAMETER Experiment Name: At_Drought_Reproduction_P Parameter: Organism Value: A. thaliana
  misc_feature: MA Experiment 20001911 PARAMETER Experiment Name: At_Drought_Reproduction_P Parameter: Plant Line Value: WS
  misc_feature: MA Experiment 20001911 PARAMETER Experiment Name: At_Drought_Reproduction_P Parameter: Timepoint (day) Value: 10
  misc_feature: MA Experiment 20001911 PARAMETER Experiment Name: At_Drought_Reproduction_P Parameter: Tissue Value: Flowers
  misc_feature: MA Experiment 20001911 PARAMETER Experiment Name: At_Drought_Reproduction_P Parameter: Treatment Value: Drought vs. No Drought
aaccatctctctaaagcttcttctctcataacaatggcaagacaaatcaacatagagagtagtgtttctcaagttacctttatctcctccgccatccccgccgtatcttcctcctcctccatcaccgcttccgcctcattgtcctcttcacctactacatcttcctcttcttcgtcatcaacaaattctaacttcattgaggaagacaactctaaaagaaaagcatctcgaagatcattgtcatcgttagtctccgttgaagacgatgatgatcaaaacggtggaggtgggaaacggcgaaagaccaacggtggagataaacatccgacgtatagaggagtgaggatgaggagttggggaaaatgggtgtcggagattagagagccgagaaagaaatcaagaatctggctcgggacttatccaacggctgagatggcagctcgagctcatgacgtagcggctttagccattaaaggtacaacggcttacctcaattttcccaagttagccggcgagcttcctcgtccagtcacaaattctcctaaagacattcaagccgccgcctctttagcggccgttaactggcaagattcggtcaacgatgtgagtaattctgaagtggctgaaatagttgaagccgagccgagtcgagccgtggtggctcagttgttttcttcggacacaagcacgacgacgacgactcagagtcaagagtattcggaagcttcgtgtgcttcgacttcggcgtgtacggacaaagacagtgaggaagagaagctgtttgatttgccggatttgtttaccgatgagaatgagatgatgatacgaaacgatgcgttttgctactactcgtccacgtggcagctttgtggagccgatgctgggtttcggcttgaagagccgttttttctatctgaatgactaaagtacccctctcgagagagctctcactaacactttattagtttgccatttacttcttcttcattttctctatttacgtttgatatttttttttctttccaacttgagtgatattgattttttgtaaagaaacaatttcttttttttttcctagcaaaatcgtgtttgtgtaatataaatgtggtgataacatgttgaaatattgcagaataatataatgtagccttac

SEQ ID NO: 99760 - protein, 306 aa, Arabidopsis thaliana
  peptide (1)..(306): Ceres Seq. ID no. 13603569
  misc_feature (108)..(172): Pfam Name: AP2 domain Pfam Description: AP2 domain
  misc_feature (12)..(306): Homolog of NCBI NO: 15225381 NR Description: AP2 domain transcription factor TINY, putative thaliana] >gi|7488386|pir||T00399 probable AP2 domain
  misc_feature (12)..(306): Homolog of NCBI NO: 21592664 NR Description: putative AP2 domain transcription factor
  misc_feature (40)..(302): Homolog of NCBI NO: 15232340 NR Description: AP2 domain transcription factor TINY, putative
  misc_feature (28)..(301): Homolog of NCBI NO: 37536842 NR Description: putative DNA binding protein [Oryza sativa
  misc_feature (12)..(301): Homolog of NCBI NO: 21908034 NR Description: DRE binding factor 2 [Zea mays]
  misc_feature (12)..(301): Homolog of NCBI NO: 25990951 NR Description: DREB-like protein [Zea mays]
  misc_feature (54)..(192): Homolog of NCBI NO: 38605845 NR Description: OSJNBb0034G17.3 [Oryza sativa (japonica
  misc_feature (62)..(192): Homolog of NCBI NO: 14140163 NR Description: putative AP2 domain containing protein [Oryza
  misc_feature (87)..(265): Homolog of NCBI NO: 14140155 NR Description: putative AP2 domain transcription factor [Oryza
  misc_feature (20)..(214): Homolog of NCBI NO: 38605844 NR Description: OSJNBb0034G17.2 [Oryza sativa (japonica
NHLSKASSLITMARQINIESSVSQVTFISSAIPAVSSSSSITASASLSSSPTTSSSSSSSTNSNFIEEDNSKRKASRRSLSSLVSVEDDDDQNGGGGKRRKTNGGDKHPTYRGVRMRSWGKWVSEIREPRKKSRIWLGTYPTAEMAARAHDVAALAIKGTTAYLNFPKLAGELPRPVTNSPKDIQAAASLAAVNWQDSVNDVSNSEVAEIVEAEPSRAVVAQLFSSDTSTTTTTQSQEYSEASCASTSACTDKDSEEEKLFDLPDLFTDENEMMIRNDAFCYYSSTWQLCGADAGFRLEEPFFLSE

SEQ ID NO: 99761 - protein, 295 aa, Arabidopsis thaliana; identical to SEQ ID NO: 21687
  peptide (1)..(295): Ceres Seq. ID no. 13603570
  misc_feature (97)..(161): Pfam Name: AP2 domain Pfam Description: AP2 domain
  misc_feature (1)..(295): Homolog of NCBI NO: 15225381 NR Description: AP2 domain transcription factor TINY, putative thaliana] >gi|7488386|pir||T00399 probable AP2 domain
  misc_feature (1)..(295): Homolog of NCBI NO: 21592664 NR Description: putative AP2 domain transcription factor
  misc_feature (29)..(291): Homolog of NCBI NO: 15232340 NR Description: AP2 domain transcription factor TINY, putative
  misc_feature (17)..(290): Homolog of NCBI NO: 37536842 NR Description: putative DNA binding protein [Oryza sativa
  misc_feature (1)..(290): Homolog of NCBI NO: 21908034 NR Description: DRE binding factor 2 [Zea mays]
  misc_feature (1)..(290): Homolog of NCBI NO: 25990951 NR Description: DREB-like protein [Zea mays]
  misc_feature (43)..(181): Homolog of NCBI NO: 38605845 NR Description: OSJNBb0034G17.3 [Oryza sativa (japonica
  misc_feature (51)..(181): Homolog of NCBI NO: 14140163 NR Description: putative AP2 domain containing protein [Oryza
  misc_feature (76)..(254): Homolog of NCBI NO: 14140155 NR Description: putative AP2 domain transcription factor [Oryza
  misc_feature (9)..(203): Homolog of NCBI NO: 38605844 NR Description: OSJNBb0034G17.2 [Oryza sativa (japonica

SEQ ID NO: 99762 - protein, 191 aa, Arabidopsis thaliana; identical to SEQ ID NO: 21688
  peptide (1)..(191): Ceres Seq. ID no. 13603571
  misc_feature (1)..(57): Pfam Name: AP2 domain Pfam Description: AP2 domain
  misc_feature (1)..(191): Homolog of NCBI NO: 15225381 NR Description: AP2 domain transcription factor TINY, putative thaliana] >gi|7488386|pir||T00399 probable AP2 domain
  misc_feature (1)..(191): Homolog of NCBI NO: 21592664 NR Description: putative AP2 domain transcription factor
  misc_feature (1)..(187): Homolog of NCBI NO: 15232340 NR Description: AP2 domain transcription factor TINY, putative
  misc_feature (1)..(186): Homolog of NCBI NO: 37536842 NR Description: putative DNA binding protein [Oryza sativa
  misc_feature (1)..(186): Homolog of NCBI NO: 21908034 NR Description: DRE binding factor 2 [Zea mays]
  misc_feature (1)..(186): Homolog of NCBI NO: 25990951 NR Description: DREB-like protein [Zea mays]
  misc_feature (1)..(77): Homolog of NCBI NO: 38605845 NR Description: OSJNBb0034G17.3 [Oryza sativa (japonica
  misc_feature (1)..(77): Homolog of NCBI NO: 14140163 NR Description: putative AP2 domain containing protein [Oryza
  misc_feature (1)..(150): Homolog of NCBI NO: 14140155 NR Description: putative AP2 domain transcription factor [Oryza
  misc_feature (1)..(99): Homolog of NCBI NO: 38605844 NR Description: OSJNBb0034G17.2 [Oryza sativa (japonica

SEQ ID NO: 99763 - DNA, 1298 bp, Arabidopsis thaliana
  misc_feature (1)..(1298): Ceres Seq. ID no. 13603572
  misc_feature: MA Experiment ID: 108461 Result: Up-regulated in Transcription
  misc_feature: MA Experiment 108461 PARAMETER Experiment Name: At_Germinating_Seeds_cDNA_P Parameter: Age (day) Value: 1 vs. 0
  misc_feature: MA Experiment 108461 PARAMETER Experiment Name: At_Germinating_Seeds_cDNA_P Parameter: Tissue Value: Germinating Seeds
  misc_feature: MA Experiment ID: 108488 Result: Down-regulated in Transcription
  misc_feature: MA Experiment ID: 108595 Result: Up-regulated in Transcription
  misc_feature: MA Experiment 108595 PARAMETER Experiment Name: At_Ler-pi_Ovule_cDNA_P Parameter: Plant Line Value: null
  misc_feature: MA Experiment ID: 20001757 Result: Down-regulated in Transcription
  misc_feature: MA Experiment 20001757 PARAMETER Experiment Name: At_50mM_NH4NO3_L-to-H_P Parameter: Timepoint (hr) Value: 6
  misc_feature: MA Experiment 20001757 PARAMETER Experiment Name: At_50mM_NH4NO3_L-to-H_P Parameter: Tissue Value: Leaf
  misc_feature: MA Experiment 20001757 PARAMETER Experiment Name: At_50mM_NH4NO3_L-to-H_P Parameter: Treatment Value: 50mM NH4NO3 vs 100mM Mannitol
atccaaaataacaaaacatctcttcacttctcatcacaccatgcatcatcatcatcatccatgcaatcgcaaacccttcacaaccatcttctccttcttccttctctatctcaatctccataaccaacaaattatcgaagctcgaaatccatctcaatttacgaccaacccatcccctgacgtctctataccggaaatcaaacgtcacctccaacagtacggttacctcccacaaaacaaagaatccgacgacgtttcgttcgaacaagctctcgttcgttaccagaaaaatctcggtctaccaataaccggtaaaccggattccgacacgttgtcacagattctattaccaagatgtgggttccctgatgacgtggaacccaaaacggcaccgtttcacacaggaaaaaaatacgtgtacttccccggacggcccaggtggacaagagacgtcccactgaaactcacgtacgccttctcgcaggagaacctaactccttacttagcaccaactgacatacggcgcgtgttccgacgcgctttcggcaagtgggcttcggtgatcccagtatccttcatcgaaacagaggattacgtcatcgccgacatcaagatcggattcttcaacggagatcacggcgacggagaaccgttcgacggcgttttaggtgttttagcacacactttctctccggaaaacggtaggcttcatctagacaaagcagagacgtgggccgtagatttcgatgaggaaaaatctagtgtggccgtcgatttggaatctgtggcggtgcacgagatcggtcacgtgcttggattaggacatagctcggtgaaagacgcggctatgtatccaactttaaagccaagaagtaagaaagtgaatttgaatatggacgacgtcgttggagtacagtctttgtacggaacaaaccctaatttcacgttaaatagtttacttgcgtcggaaacttcgacaaatctagccgatggttcgaggatacggtctcaaggaatgatctattcgactttgagtactgttatcgctctctgttttcttaattggtagttcgtagacttagataattttctttatacaagaaatccgaaaacgtatagaatcatacagacgcatgaatttgttgttcaaagtagtagtctaatcctatgtttctgtttagaataataccatgttcttttttagtttatattagattgggcttcaagttatacggcccaatagaatgctaatgtattaaacgaagaacccagttcagagcaacacaattcgttggcct

SEQ ID NO: 99764 - protein, 355 aa, Arabidopsis thaliana
  peptide (1)..(355): Ceres Seq. ID no. 13603573
  misc_feature (140)..(249): Pfam Name: Matrixin Pfam Description: Matrixin
  misc_feature (14)..(355): Homolog of NCBI NO: 15225398 NR Description: metallo proteinase -related [Arabidopsis thaliana]
  misc_feature (14)..(355): Homolog of NCBI NO: 25455788 NR Description: metalloproteinase (EC 3.4.24.-) [imported] - thaliana >gi|3128477|gb|AAC31167.1| metalloproteinase
  misc_feature (63)..(353): Homolog of NCBI NO: 15235820 NR Description: proteinase like protein [Arabidopsis thaliana]
  misc_feature (63)..(353): Homolog of NCBI NO: 28393482 NR Description: putative proteinase [Arabidopsis thaliana]
  misc_feature (63)..(353): Homolog of NCBI NO: 21553383 NR Description: proteinase like protein [Arabidopsis thaliana]
  misc_feature (63)..(327): Homolog of NCBI NO: 37536782 NR Description: putative metalloproteinase [Oryza sativa cultivar- group)] >gi|14165321|gb|AAK55453.1| putative
  misc_feature (63)..(353): Homolog of NCBI NO: 15218963 NR Description: metallo proteinase -related [Arabidopsis >gi|4249376|gb|AAD14473.1|AAD14473 Strong similarity to F3I6.6 zinc metalloproteinase homolog from Arabidopsis thaliana
  misc_feature (66)..(350): Homolog of NCBI NO: 15223067 NR Description: matrix metallo proteinase -related [Arabidopsis
SKITKHLFTSHHTMHHHHHPCNRKPFTTIFSFFLLYLNLHNQQIIEARNPSQFTTNPSPDVSIPEIKRHLQQYGYLPQNKESDDVSFEQALVRYQKNLGLPITGKPDSDTLSQILLPRCGFPDDVEPKTAPFHTGKKYVYFPGRPRWTRDVPLKLTYAFSQENLTPYLAPTDIRRVFRRAFGKWASVIPVSFIETEDYVIADIKIGFFNGDHGDGEPFDGVLGVLAHTFSPENGRLHLDKAETWAVDFDEEKSSVAVDLESVAVHEIGHVLGLGHSSVKDAAMYPTLKPRSKKVNLNMDDVVGVQSLYGTNPNFTLNSLLASETSTNLADGSRIRSQGMIYSTLSTVIALCFLNW

SEQ ID NO: 99765 - protein, 342 aa, Arabidopsis thaliana; identical to SEQ ID NO: 38243
  peptide (1)..(342): Ceres Seq. ID no. 13603574
  misc_feature (127)..(236): Pfam Name: Matrixin Pfam Description: Matrixin
  misc_feature (1)..(342): Homolog of NCBI NO: 15225398 NR Description: metallo proteinase -related [Arabidopsis thaliana]
  misc_feature (1)..(342): Homolog of NCBI NO: 25455788 NR Description: metalloproteinase (EC 3.4.24.-) [imported] - thaliana >gi|3128477|gb|AAC31167.1| metalloproteinase
  misc_feature (50)..(340): Homolog of NCBI NO: 15235820 NR Description: proteinase like protein [Arabidopsis thaliana]
  misc_feature (50)..(340): Homolog of NCBI NO: 21553383 NR Description: proteinase like protein [Arabidopsis thaliana]
  misc_feature (50)..(340): Homolog of NCBI NO: 28393482 NR Description: putative proteinase [Arabidopsis thaliana]
  misc_feature (50)..(314): Homolog of NCBI NO: 37536782 NR Description: putative metalloproteinase [Oryza sativa cultivar- group)] >gi|14165321|gb|AAK55453.1| putative
  misc_feature (50)..(340): Homolog of NCBI NO: 15218963 NR Description: metallo proteinase -related [Arabidopsis >gi|4249376|gb|AAD14473.1|AAD14473 Strong similarity to F3I6.6 zinc metalloproteinase homolog from Arabidopsis thaliana
  misc_feature (53)..(337): Homolog of NCBI NO: 15223067 NR Description: matrix metallo proteinase -related [Arabidopsis

SEQ ID NO: 99766 - DNA, 648 bp, Arabidopsis thaliana
  misc_feature (1)..(648): Ceres Seq. ID no. 13603575
  misc_feature: MA Experiment ID: 20000234 Result: Down-regulated in Transcription
  misc_feature: MA Experiment 20000234 PARAMETER Experiment Name: At_Siliques_P Parameter: Age (day) Value: 21
  misc_feature: MA Experiment 20000234 PARAMETER Experiment Name: At_Siliques_P Parameter: Organism Value: A. thaliana
  misc_feature: MA Experiment 20000234 PARAMETER Experiment Name: At_Siliques_P Parameter: Plant Line Value: WS
  misc_feature: MA Experiment 20000234 PARAMETER Experiment Name: At_Siliques_P Parameter: Tissue Value: Less Than 5mm Siliques vs. Whole Plant
  misc_feature: MA Experiment ID: 20000265 Result: Down-regulated in Transcription
  misc_feature: MA Experiment 20000265 PARAMETER Experiment Name: At_Open_Flower_P Parameter: Age (day) Value: 21
  misc_feature: MA Experiment 20000265 PARAMETER Experiment Name: At_Open_Flower_P Parameter: Plant Line Value: WS
  misc_feature: MA Experiment 20000265 PARAMETER Experiment Name: At_Open_Flower_P Parameter: Tissue Value: Closed Flower vs. Whole Plant
  misc_feature: MA Experiment ID: 20000286 Result: Down-regulated in Transcription
  misc_feature: MA Experiment 20000286 PARAMETER Experiment Name: At_Open_Flower_P Parameter: Age (day) Value: 21
  misc_feature: MA Experiment 20000286 PARAMETER Experiment Name: At_Open_Flower_P Parameter: Plant Line Value: WS
  misc_feature: MA Experiment 20000286 PARAMETER Experiment Name: At_Open_Flower_P Parameter: Tissue Value: Half Open vs. Whole Plant
  misc_feature: MA Experiment ID: 20000573 Result: Up-regulated in Transcription
  misc_feature: MA Experiment 20000573 PARAMETER Experiment Name: At_100uM_ABA_Mutants__P Parameter: Organism Value: A. thaliana
  misc_feature: MA Experiment 20000573 PARAMETER Experiment Name: At_100uM_ABA_Mutants__P Parameter: Plant Line Value: CS22 vs. Ler wt
  misc_feature: MA Experiment 20000573 PARAMETER Experiment Name: At_100uM_ABA_Mutants__P Parameter: Timepoint (hr) Value: N/A
  misc_feature: MA Experiment 20000573 PARAMETER Experiment Name: At_100uM_ABA_Mutants__P Parameter: Tissue Value: Whole Plant
  misc_feature: MA Experiment 20000573 PARAMETER Experiment Name: At_100uM_ABA_Mutants__P Parameter: Treatment Value: None
  misc_feature: MA Experiment ID: 20000794 Result: Up-regulated in Transcription
  misc_feature: MA Experiment 20000794 PARAMETER Experiment Name: At_Petals_P Parameter: Age (day) Value: 23-25 days
  misc_feature: MA Experiment 20000794 PARAMETER Experiment Name: At_Petals_P Parameter: Plant Line Value: WS
  misc_feature: MA Experiment 20000794 PARAMETER Experiment Name: At_Petals_P Parameter: Tissue Value: Petals vs. Whole plant
  misc_feature: MA Experiment ID: 20001247 Result: Up-regulated in Transcription
  misc_feature: MA Experiment 20001247 PARAMETER Experiment Name: At_Far-red-induction_P Parameter: Age (day) Value: 7
  misc_feature: MA Experiment 20001247 PARAMETER Experiment Name: At_Far-red-induction_P Parameter: Light Value: Far-red vs. White
  misc_feature: MA Experiment 20001247 PARAMETER Experiment Name: At_Far-red-induction_P Parameter: Organism Value: A. thaliana
  misc_feature: MA Experiment 20001247 PARAMETER Experiment Name: At_Far-red-induction_P Parameter: Plant Line Value: Columbia
  misc_feature: MA Experiment 20001247 PARAMETER Experiment Name: At_Far-red-induction_P Parameter: Timepoint (hr) Value: 1
  misc_feature: MA Experiment 20001247 PARAMETER Experiment Name: At_Far-red-induction_P Parameter: Tissue Value: Whole Plant
  misc_feature: MA Experiment ID: 20001248 Result: Up-regulated in Transcription
  misc_feature: MA Experiment 20001248 PARAMETER Experiment Name: At_Far-red-induction_P Parameter: Age (day) Value: 7
  misc_feature: MA Experiment 20001248 PARAMETER Experiment Name: At_Far-red-induction_P Parameter: Light Value: Far-red vs. White
  misc_feature: MA Experiment 20001248 PARAMETER Experiment Name: At_Far-red-induction_P Parameter: Organism Value: A. thaliana
  misc_feature: MA Experiment 20001248 PARAMETER Experiment Name: At_Far-red-induction_P Parameter: Plant Line Value: Columbia
  misc_feature: MA Experiment 20001248 PARAMETER Experiment Name: At_Far-red-induction_P Parameter: Timepoint (hr) Value: 4
  misc_feature: MA Experiment 20001248 PARAMETER Experiment Name: At_Far-red-induction_P Parameter: Tissue Value: Whole Plant
  misc_feature: MA Experiment ID: 20001450 Result: Up-regulated in Transcription
  misc_feature: MA Experiment 20001450 PARAMETER Experiment Name: At_Far-red-induction_P Parameter: Age (day) Value: 7
  misc_feature: MA Experiment 20001450 PARAMETER Experiment Name: At_Far-red-induction_P Parameter: Light Value: Far-red vs. White
  misc_feature: MA Experiment 20001450 PARAMETER Experiment Name: At_Far-red-induction_P Parameter: Organism Value: A. thaliana
  misc_feature: MA Experiment 20001450 PARAMETER Experiment Name: At_Far-red-induction_P Parameter: Plant Line Value: Columbia
  misc_feature: MA Experiment 20001450 PARAMETER Experiment Name: At_Far-red-induction_P Parameter: Timepoint (hr) Value: 8
  misc_feature: MA Experiment 20001450 PARAMETER Experiment Name: At_Far-red-induction_P Parameter: Tissue Value: Whole Plant
  misc_feature: MA Experiment ID: 20001451 Result: Up-regulated in Transcription
  misc_feature: MA Experiment 20001451 PARAMETER Experiment Name: At_Far-red-induction_P Parameter: Age (day) Value: 7
  misc_feature: MA Experiment 20001451 PARAMETER Experiment Name: At_Far-red-induction_P Parameter: Light Value: Far-red vs. White
  misc_feature: MA Experiment 20001451 PARAMETER Experiment Name: At_Far-red-induction_P Parameter: Organism Value: A. thaliana
  misc_feature: MA Experiment 20001451 PARAMETER Experiment Name: At_Far-red-induction_P Parameter: Plant Line Value: Columbia
  misc_feature: MA Experiment 20001451 PARAMETER Experiment Name: At_Far-red-induction_P Parameter: Timepoint (hr) Value: 24
  misc_feature: MA Experiment 20001451 PARAMETER Experiment Name: At_Far-red-induction_P Parameter: Tissue Value: Whole Plant
  misc_feature: MA Experiment ID: 20001555 Result: Down-regulated in Transcription
  misc_feature: MA Experiment 20001555 PARAMETER Experiment Name: At_Drought_Soil_Dry_P Parameter: Age (day) Value: 24
  misc_feature: MA Experiment 20001555 PARAMETER Experiment Name: At_Drought_Soil_Dry_P Parameter: Organism Value: A. thaliana
  misc_feature: MA Experiment 20001555 PARAMETER Experiment Name: At_Drought_Soil_Dry_P Parameter: Plant Line Value: WS
  misc_feature: MA Experiment 20001555 PARAMETER Experiment Name: At_Drought_Soil_Dry_P Parameter: Post Timepoint (hr) Value: None
  misc_feature: MA Experiment 20001555 PARAMETER Experiment Name: At_Drought_Soil_Dry_P Parameter: Post-Treatment Value: None
  misc_feature: MA Experiment 20001555 PARAMETER Experiment Name: At_Drought_Soil_Dry_P Parameter: Timepoint (day) Value: 10
  misc_feature: MA Experiment 20001555 PARAMETER Experiment Name: At_Drought_Soil_Dry_P Parameter: Treatment Value: Drought vs. No Drought
  misc_feature: MA Experiment ID: 20001556 Result: Down-regulated in Transcription
  misc_feature: MA Experiment 20001556 PARAMETER Experiment Name: At_Drought_Soil_Dry_P Parameter: Age (day) Value: 26
  misc_feature: MA Experiment 20001556 PARAMETER Experiment Name: At_Drought_Soil_Dry_P Parameter: Organism Value: A. thaliana
  misc_feature: MA Experiment 20001556 PARAMETER Experiment Name: At_Drought_Soil_Dry_P Parameter: Plant Line Value: WS
  misc_feature: MA Experiment 20001556 PARAMETER Experiment Name: At_Drought_Soil_Dry_P Parameter: Post Timepoint (hr) Value: None
  misc_feature: MA Experiment 20001556 PARAMETER Experiment Name: At_Drought_Soil_Dry_P Parameter: Post-Treatment Value: None
  misc_feature: MA Experiment 20001556 PARAMETER Experiment Name: At_Drought_Soil_Dry_P Parameter: Timepoint (day) Value: 12
  misc_feature: MA Experiment 20001556 PARAMETER Experiment Name: At_Drought_Soil_Dry_P Parameter: Treatment Value: Drought vs. No Drought
  misc_feature: MA Experiment ID: 20001557 Result: Down-regulated in Transcription
  misc_feature: MA Experiment 20001557 PARAMETER Experiment Name: At_Drought_Soil_Dry_P Parameter: Age (day) Value: 27
  misc_feature: MA Experiment 20001557 PARAMETER Experiment Name: At_Drought_Soil_Dry_P Parameter: Organism Value: A. thaliana
  misc_feature: MA Experiment 20001557 PARAMETER Experiment Name: At_Drought_Soil_Dry_P Parameter: Plant Line Value: WS
  misc_feature: MA Experiment 20001557 PARAMETER Experiment Name: At_Drought_Soil_Dry_P Parameter: Post Timepoint (hr) Value: 3
  misc_feature: MA Experiment 20001557 PARAMETER Experiment Name: At_Drought_Soil_Dry_P Parameter: Post-Treatment Value: Re-Water vs. No Drought
  misc_feature: MA Experiment 20001557 PARAMETER Experiment Name: At_Drought_Soil_Dry_P Parameter: Timepoint (day) Value: 13
  misc_feature: MA Experiment 20001557 PARAMETER Experiment Name: At_Drought_Soil_Dry_P Parameter: Treatment Value: Drought vs. No Drought
  misc_feature: MA Experiment ID: 20001559 Result: Down-regulated in Transcription
  misc_feature: MA Experiment 20001559 PARAMETER Experiment Name: At_Drought_Soil_Dry_P Parameter: Age (day) Value: 28
  misc_feature: MA Experiment 20001559 PARAMETER Experiment Name: At_Drought_Soil_Dry_P Parameter: Organism Value: A. thaliana
  misc_feature: MA Experiment 20001559 PARAMETER Experiment Name: At_Drought_Soil_Dry_P Parameter: Plant Line Value: WS
  misc_feature: MA Experiment 20001559 PARAMETER Experiment Name: At_Drought_Soil_Dry_P Parameter: Post Timepoint (hr) Value: 29
  misc_feature: MA Experiment 20001559 PARAMETER Experiment Name: At_Drought_Soil_Dry_P Parameter: Post-Treatment Value: Re-Water vs. No Drought
  misc_feature: MA Experiment 20001559 PARAMETER Experiment Name: At_Drought_Soil_Dry_P Parameter: Timepoint (day) Value: 14
  misc_feature: MA Experiment 20001559 PARAMETER Experiment Name: At_Drought_Soil_Dry_P Parameter: Treatment Value: Drought vs. No Drought
aaagaaaaaggttcctttttttgactttgtatccgtagatcatcttcttcttcttcttccagagttttatccttatccgttccatcaaattctctctctaagcaaagatgaataaaggaagcatctttaagatggacgacgatttcgaaaagagaaaagctgaagctggaaggatcagggagaaataccctgatcgaattcctgtgattgtggaaaaggctgagaaaagtgaagtcccaaatatagacaagaagaagtaccttgtgccatcagacctaacagttggtcaatttgtgtatgtgattcggaagagaatcaaactaagtgcagagaaagctatcttcattttcgtagacaatgttcttcctccaacaggagagctaatgtcaagcgtttacgaggataagaaagacgaagatggcttcctttacatcacttacagtggcgagaacacattcggtgcttcttcaatctaatctctgacctctgagaatccgccacgttttaatgcttcttcccaactttcaatttgtgtgtatagtttgttctcaatatttatcatttctcaaataattgtgattactatcttcttttcacttgttaaaatgtacatagactaatcttataatattatcttcctttggtatt

SEQ ID NO: 99767 - protein, 122 aa, Arabidopsis thaliana
  peptide (1)..(122): Ceres Seq. ID no. 13603576
  misc_feature (15)..(118): Pfam Name: Microtubule associated protein 1A/1B, light chain 3 Pfam Description: Microtubule associated protein 1A/1B, light
  misc_feature (1)..(122): Homolog of NCBI NO: 15225418 NR Description: microtubule-associated protein -related
  misc_feature (1)..(122): Homolog of NCBI NO: 15724332 NR Description: At2g45170/T14P1.2 [Arabidopsis thaliana]
  misc_feature (1)..(121): Homolog of NCBI NO: 18414683 NR Description: symbiosis-related like protein [Arabidopsis
  misc_feature (5)..(118): Homolog of NCBI NO: 21615419 NR Description: microtubule associated protein [Cicer arietinum]
  misc_feature (7)..(120): Homolog of NCBI NO: 15232387 NR Description: (AtAPG8g) autophagy 8g protein [Arabidopsis
  misc_feature (1)..(119): Homolog of NCBI NO: 34595981 NR Description: microtubule-associated protein 1 light chain 3
  misc_feature (5)..(118): Homolog of NCBI NO: 40253647 NR Description: putative microtubial binding protein [Oryza
  misc_feature (1)..(118): Homolog of NCBI NO: 38344173 NR Description: OSJNBa0053K19.12 [Oryza sativa (japonica
  misc_feature (5)..(118): Homolog of NCBI NO: 21592920 NR Description: putative microtubule-associated protein
  misc_feature (5)..(118): Homolog of NCBI NO: 15220686 NR Description: symbiosis-related protein -related [Arabidopsis
MNKGSIFKMDDDFEKRKAEAGRIREKYPDRIPVIVEKAEKSEVPNIDKKKYLVPSDLTVGQFVYVIRKRIKLSAEKAIFIFVDNVLPPTGELMSSVYEDKKDEDGFLYITYSGENTFGASSI

SEQ ID NO: 99768 - protein, 114 aa, Arabidopsis thaliana
  peptide (1)..(114): Ceres Seq. ID no. 13603577
  misc_feature (7)..(110): Pfam Name: Microtubule associated protein 1A/1B, light chain 3 Pfam Description: Microtubule associated protein 1A/1B, light
  misc_feature (1)..(114): Homolog of NCBI NO: 15225418 NR Description: microtubule-associated protein -related
  misc_feature (1)..(114): Homolog of NCBI NO: 15724332 NR Description: At2g45170/T14P1.2 [Arabidopsis thaliana]
  misc_feature (1)..(113): Homolog of NCBI NO: 18414683 NR Description: symbiosis-related like protein [Arabidopsis
  misc_feature (1)..(110): Homolog of NCBI NO: 21615419 NR Description: microtubule associated protein [Cicer arietinum]
  misc_feature (1)..(112): Homolog of NCBI NO: 15232387 NR Description: (AtAPG8g) autophagy 8g protein [Arabidopsis
  misc_feature (1)..(111): Homolog of NCBI NO: 34595981 NR Description: microtubule-associated protein 1 light chain 3
  misc_feature (1)..(110): Homolog of NCBI NO: 40253647 NR Description: putative microtubial binding protein [Oryza
  misc_feature (1)..(110): Homolog of NCBI NO: 38344173 NR Description: OSJNBa0053K19.12 [Oryza sativa (japonica
  misc_feature (1)..(110): Homolog of NCBI NO: 21592920 NR Description: putative microtubule-associated protein
  misc_feature (1)..(110): Homolog of NCBI NO: 15220686 NR Description: symbiosis-related protein -related [Arabidopsis
MDDDFEKRKAEAGRIREKYPDRIPVIVEKAEKSEVPNIDKKKYLVPSDLTVGQFVYVIRKRIKLSAEKAIFIFVDNVLPPTGELMSSVYEDKKDEDGFLYITYSGENTFGASSI

SEQ ID NO: 99769 - DNA, 1003 bp, Arabidopsis thaliana
  misc_feature (1)..(1003): Ceres Seq. ID no. 13603578
  misc_feature: MA Experiment ID: 20000184 Result: Up-regulated in Transcription
  misc_feature: MA Experiment 20000184 PARAMETER Experiment Name: At_Shoots__P Parameter: Age (day) Value: 7
  misc_feature: MA Experiment 20000184 PARAMETER Experiment Name: At_Shoots__P Parameter: Tissue Value: Shoots vs. Whole Plant
  misc_feature: MA Experiment ID: 20000185 Result: Down-regulated in Transcription
  misc_feature: MA Experiment 20000185 PARAMETER Experiment Name: At_Roots__P Parameter: Age (day) Value: 7 vs. 21
  misc_feature: MA Experiment 20000185 PARAMETER Experiment Name: At_Roots__P Parameter: Organism Value: A. thaliana
  misc_feature: MA Experiment 20000185 PARAMETER Experiment Name: At_Roots__P Parameter: Tissue Value: Roots vs. Whole Plant
  misc_feature: MA Experiment ID: 20000265 Result: Up-regulated in Transcription
  misc_feature: MA Experiment 20000265 PARAMETER Experiment Name: At_Open_Flower_P Parameter: Age (day) Value: 21
  misc_feature: MA Experiment 20000265 PARAMETER Experiment Name: At_Open_Flower_P Parameter: Plant Line Value: WS
  misc_feature: MA Experiment 20000265 PARAMETER Experiment Name: At_Open_Flower_P Parameter: Tissue Value: Closed Flower vs. Whole Plant
  misc_feature: MA Experiment ID: 20000286 Result: Up-regulated in Transcription
  misc_feature: MA Experiment 20000286 PARAMETER Experiment Name: At_Open_Flower_P Parameter: Age (day) Value: 21
  misc_feature: MA Experiment 20000286 PARAMETER Experiment Name: At_Open_Flower_P Parameter: Plant Line Value: WS
  misc_feature: MA Experiment 20000286 PARAMETER Experiment Name: At_Open_Flower_P Parameter: Tissue Value: Half Open vs. Whole Plant
  misc_feature: MA Experiment ID: 20000437 Result: Down-regulated in Transcription
  misc_feature: MA Experiment 20000437 PARAMETER Experiment Name: At_Drought_P Parameter: Age (day) Value: 8
  misc_feature: MA Experiment 20000437 PARAMETER Experiment Name: At_Drought_P Parameter: Organism Value: A. thaliana
  misc_feature: MA Experiment 20000437 PARAMETER Experiment Name: At_Drought_P Parameter: Plant Line Value: WS
  misc_feature: MA Experiment 20000437 PARAMETER Experiment Name: At_Drought_P Parameter: Timepoint (hr) Value: 24
  misc_feature: MA Experiment 20000437 PARAMETER Experiment Name: At_Drought_P Parameter: Tissue Value: Whole Plant
  misc_feature: MA Experiment 20000437 PARAMETER Experiment Name: At_Drought_P Parameter: Treatment Value: Drought vs. No Drought
  misc_feature: MA Experiment ID: 20000438 Result: Up-regulated in Transcription
  misc_feature: MA Experiment 20000438 PARAMETER Experiment Name: At_Shoots__P Parameter: Age (day) Value: 14
  misc_feature: MA Experiment 20000438 PARAMETER Experiment Name: At_Shoots__P Parameter: Tissue Value: Shoots vs. Whole Plant
  misc_feature: MA Experiment ID: 20000439 Result: Down-regulated in Transcription
  misc_feature: MA Experiment 20000439 PARAMETER Experiment Name: At_Roots__P Parameter: Age (day) Value: 14 vs. 21
  misc_feature: MA Experiment 20000439 PARAMETER Experiment Name: At_Roots__P Parameter: Organism Value: A. thaliana
  misc_feature: MA Experiment 20000439 PARAMETER Experiment Name: At_Roots__P Parameter: Tissue Value: Roots vs. Whole Plant
  misc_feature: MA Experiment ID: 20001248 Result: Down-regulated in Transcription
  misc_feature: MA Experiment 20001248 PARAMETER Experiment Name: At_Far-red-induction_P Parameter: Age (day) Value: 7
  misc_feature: MA Experiment 20001248 PARAMETER Experiment Name: At_Far-red-induction_P Parameter: Light Value: Far-red vs. White
  misc_feature: MA Experiment 20001248 PARAMETER Experiment Name: At_Far-red-induction_P Parameter: Organism Value: A. thaliana
  misc_feature: MA Experiment 20001248 PARAMETER Experiment Name: At_Far-red-induction_P Parameter: Plant Line Value: Columbia
  misc_feature: MA Experiment 20001248 PARAMETER Experiment Name: At_Far-red-induction_P Parameter: Timepoint (hr) Value: 4
  misc_feature: MA Experiment 20001248 PARAMETER Experiment Name: At_Far-red-induction_P Parameter: Tissue Value: Whole Plant
  misc_feature: MA Experiment ID: 20001757 Result: Up-regulated in Transcription
  misc_feature: MA Experiment 20001757 PARAMETER Experiment Name: At_50mM_NH4NO3_L-to-H_P Parameter: Timepoint (hr) Value: 6
  misc_feature: MA Experiment 20001757 PARAMETER Experiment Name: At_50mM_NH4NO3_L-to-H_P Parameter: Tissue Value: Leaf
  misc_feature: MA Experiment 20001757 PARAMETER Experiment Name: At_50mM_NH4NO3_L-to-H_P Parameter: Treatment Value: 50mM NH4NO3 vs 100mM Mannitol
  misc_feature: MA Experiment ID: 20001904 Result: Down-regulated in Transcription
  misc_feature: MA Experiment 20001904 PARAMETER Experiment Name: At_Drought_Reproduction_P Parameter: Age (day) Value: 37
  misc_feature: MA Experiment 20001904 PARAMETER Experiment Name: At_Drought_Reproduction_P Parameter: Organism Value: A. thaliana
  misc_feature: MA Experiment 20001904 PARAMETER Experiment Name: At_Drought_Reproduction_P Parameter: Plant Line Value: WS
  misc_feature: MA Experiment 20001904 PARAMETER Experiment Name: At_Drought_Reproduction_P Parameter: Timepoint (day) Value: 7
  misc_feature: MA Experiment 20001904 PARAMETER Experiment Name: At_Drought_Reproduction_P Parameter: Tissue Value: Rosettes
  misc_feature: MA Experiment 20001904 PARAMETER Experiment Name: At_Drought_Reproduction_P Parameter: Treatment Value: Drought vs. No Drought
  misc_feature: MA Experiment ID: 20001905 Result: Down-regulated in Transcription
  misc_feature: MA Experiment 20001905 PARAMETER Experiment Name: At_Drought_Reproduction_P Parameter: Age (day) Value: 40
  misc_feature: MA Experiment 20001905 PARAMETER Experiment Name: At_Drought_Reproduction_P Parameter: Organism Value: A. thaliana
  misc_feature: MA Experiment 20001905 PARAMETER Experiment Name: At_Drought_Reproduction_P Parameter: Plant Line Value: WS
  misc_feature: MA Experiment 20001905 PARAMETER Experiment Name: At_Drought_Reproduction_P Parameter: Timepoint (day) Value: 10
  misc_feature: MA Experiment 20001905 PARAMETER Experiment Name: At_Drought_Reproduction_P Parameter: Tissue Value: Rosettes
  misc_feature: MA Experiment 20001905 PARAMETER Experiment Name: At_Drought_Reproduction_P Parameter: Treatment Value: Drought vs. No Drought
agatcatggtggggttttttattttctccttatcaagaatcctctgatcagtcaaatacccatcaatcaatcaaatccccaaacactcccaaaaaaagatcagcttccaatatttttccccttcttacaaaaaagatgtctatgtcgtctatgtcctccccttcctcagctgtttgttcaccggaccacttctctccttccgaccatctctgctatgtccaatgcaacttttgccaaaccatccttgcggttaatgttccttacacaagcttgttcaagaccgtaactgtccgatgtggttgctgtaccaatctcctttcggtgaacatgagatcatatgtcctcccagcttctaaccagctccagctccagctcggtcctcactcttacttcaatccccaggatattctggaggagctgagagatgcaccgtctaacatgaatatgatgatgatgaatcaacatcctactatgaatgacataccatctttcatggatcttcatcaacaacatgagattcctaaagcaccacccgttaaccgccctccagagaaaagacagagagtcccatccgcatataaccgattcatcaaggaggagatccaacgtatcaaagctggtaatcctgatataagccacagagaagcctttagtgctgctgccaagaattgggcccacttcccccacatacacttcgggctcgtgccagacaatcaacccgtgaagaaaaccaacatgccccaacaggagggagaggataacatggtgatgaaagaagggttctacgctcctgcagctgctaacgttggtgtgactccttattaaagagataaatataatcgactaagtatttgaggaattgaaatccaatttcttagggtttatcatgtccaaaagttgtggtttcttttcctttcttgaacttatttatatatattataaatatgcatgtgtctttttctgttgttgtaatcaaaaatcttgctaattaatggggtttctt

SEQ ID NO: 99770 - protein, 274 aa, Arabidopsis thaliana; identical to SEQ ID NO: 39370
  peptide (1)..(274): Ceres Seq. ID no. 13603579
  misc_feature (61)..(234): Pfam Name: YABBY protein Pfam Description: YABBY protein
  misc_feature (46)..(274): Homolog of NCBI NO: 18406725 NR Description: abnormal floral organs protein (AFO) (FIL) YABBY1 [Arabidopsis thaliana] >gi|11357292|pir||T51587 filamentous
  misc_feature (55)..(274): Homolog of NCBI NO: 27804377 NR Description: MADS-box transcription factor CDM51
  misc_feature (46)..(271): Homolog of NCBI NO: 18411242 NR Description: YABBY3 axial regulator -related [Arabidopsis >gi|4928753|gb|AAD33717.1|AF136540_1 YABBY3 [Arabidopsis >gi|14335014|gb|AAK59771.1| AT4g00180/F6N15_22 [Arabidopsis
  misc_feature (109)..(274): Homolog of NCBI NO: 32330681 NR Description: yabby10 protein [Zea mays]
  misc_feature (40)..(118): Homolog of NCBI NO: 32330681 NR Description: yabby10 protein [Zea mays]
  misc_feature (179)..(274): Homolog of NCBI NO: 37535908 NR Description: hypothetical protein [Oryza sativa (japonica group)] >gi|22267600|gb|AAM94935.1| putative transcription factor
  misc_feature (47)..(118): Homolog of NCBI NO: 37535908 NR Description: hypothetical protein [Oryza sativa (japonica group)] >gi|22267600|gb|AAM94935.1| putative transcription factor
  misc_feature (177)..(274): Homolog of NCBI NO: 37551421 NR Description: FIL-like protein [Triticum aestivum]
  misc_feature (47)..(118): Homolog of NCBI NO: 37551421 NR Description: FIL-like protein [Triticum aestivum]
  misc_feature (177)..(274): Homolog of NCBI NO: 32330679 NR Description: yabby9 protein [Zea mays]

SEQ ID NO: 99771 - protein, 229 aa, Arabidopsis thaliana; identical to SEQ ID NO: 39371
  peptide (1)..(229): Ceres Seq. ID no. 13603580
  misc_feature (16)..(189): Pfam Name: YABBY protein Pfam Description: YABBY protein
  misc_feature (1)..(229): Homolog of NCBI NO: 18406725 NR Description: abnormal floral organs protein (AFO) (FIL) YABBY1 [Arabidopsis thaliana] >gi|11357292|pir||T51587 filamentous
  misc_feature (10)..(229): Homolog of NCBI NO: 27804377 NR Description: MADS-box transcription factor CDM51
  misc_feature (1)..(226): Homolog of NCBI NO: 18411242 NR Description: YABBY3 axial regulator -related [Arabidopsis >gi|4928753|gb|AAD33717.1|AF136540_1 YABBY3 [Arabidopsis >gi|14335014|gb|AAK59771.1| AT4g00180/F6N15_22 [Arabidopsis
  misc_feature (64)..(229): Homolog of NCBI NO: 32330681 NR Description: yabby10 protein [Zea mays]
  misc_feature (1)..(73): Homolog of NCBI NO: 32330681 NR Description: yabby10 protein [Zea mays]
  misc_feature (134)..(229): Homolog of NCBI NO: 37535908 NR Description: hypothetical protein [Oryza sativa (japonica group)] >gi|22267600|gb|AAM94935.1| putative transcription factor
  misc_feature (2)..(73): Homolog of NCBI NO: 37535908 NR Description: hypothetical protein [Oryza sativa (japonica group)] >gi|22267600|gb|AAM94935.1| putative transcription factor
  misc_feature (132)..(229): Homolog of NCBI NO: 37551421 NR Description: FIL-like protein [Triticum aestivum]
  misc_feature (2)..(73): Homolog of NCBI NO: 37551421 NR Description: FIL-like protein [Triticum aestivum]
  misc_feature (132)..(229): Homolog of NCBI NO: 32330679 NR Description: yabby9 protein [Zea mays]

SEQ ID NO: 99772 - protein, 227 aa, Arabidopsis thaliana; identical to SEQ ID NO: 39372
  peptide (1)..(227): Ceres Seq. ID no. 13603581
  misc_feature (14)..(187): Pfam Name: YABBY protein Pfam Description: YABBY protein
  misc_feature (1)..(227): Homolog of NCBI NO: 18406725 NR Description: abnormal floral organs protein (AFO) (FIL) YABBY1 [Arabidopsis thaliana] >gi|11357292|pir||T51587 filamentous
  misc_feature (8)..(227): Homolog of NCBI NO: 27804377 NR Description: MADS-box transcription factor CDM51
  misc_feature (1)..(224): Homolog of NCBI NO: 18411242 NR Description: YABBY3 axial regulator -related [Arabidopsis >gi|4928753|gb|AAD33717.1|AF136540_1 YABBY3 [Arabidopsis >gi|14335014|gb|AAK59771.1| AT4g00180/F6N15_22 [Arabidopsis
  misc_feature (62)..(227): Homolog of NCBI NO: 32330681 NR Description: yabby10 protein [Zea mays]
  misc_feature (1)..(71): Homolog of NCBI NO: 32330681 NR Description: yabby10 protein [Zea mays]
  misc_feature (132)..(227): Homolog of NCBI NO: 37535908 NR Description: hypothetical protein [Oryza sativa (japonica group)] >gi|22267600|gb|AAM94935.1| putative transcription factor
  misc_feature (1)..(71): Homolog of NCBI NO: 37535908 NR Description: hypothetical protein [Oryza sativa (japonica group)] >gi|22267600|gb|AAM94935.1| putative transcription factor
  misc_feature (130)..(227): Homolog of NCBI NO: 37551421 NR Description: FIL-like protein [Triticum aestivum]
  misc_feature (1)..(71): Homolog of NCBI NO: 37551421 NR Description: FIL-like protein [Triticum aestivum]
  misc_feature (130)..(227): Homolog of NCBI NO: 32330679 NR Description: yabby9 protein [Zea mays]

SEQ ID NO: 99773 - DNA, 1608 bp, Arabidopsis thaliana
  misc_feature (1)..(1608): Ceres Seq. ID no. 13603586
atttccgttcacttcctagaaaagtaagtatatacctttctctgtatttccttcacctccggctaaatctccggcgaccgcgtaacttgttctccggtctgaatagtgaataaacacacacacggagccaaatccaggagaaattaggtttgaattagagagattaggagaatacaaattggtttggtggttttcaagtatgctaccaagtgggttgaaagaaacccaactccgtgagagcaacaacaaccaaaaagtccatcctcaaccaatggaagagtctatcaatcagaatcctgaagctatggaagcacttatctccaatctcttcggaaacatctcgtctttgaaatctgcttatatcgagcttcaaagtgctcatactccttacgatcccgagaagattcaggcagcggacaaagttgtcatttctgaactcaagaatctttccgaaatgaagcatttttacagagagaataaccccaaacctgtatgtgtctctccacaagactctcgtttagctgcagagatccaagagcagcagagtttgttgaagacttatgaggttatggtgaagaagtttcagtctgagattcagaacaaggattctgagatcacgcagatgctacagaagattgaggaagcaaaccagaaacggcttaagcttgagaagaatcttaagttaagaggaatgtctacaaacgaaggttctaatggagatggaaatatgcagtttcctgacttaactactgaactctatgtatctacttacgaagctgctgctaaagccgtgcacgatttctccaagccgctaatcaacatgatgaaagcagcaggatgggatcttgattctgcagccaattctattgagcctgatgttgtttacgccaagaggcctcacaagaaatatgcatttgaatcatacatatgccaaaggatgttcagtgggtttcagcagaagaacttctcagtaaactcagagagtgctgcggttatggccaatgatgacacagacacctttttccgccagtttcttgctctcaaggacatggatccactagatgctctaggtacaaaccctgattccaactttggtatattctgcaggagcaagtatctcctcttggtccacccaaagatggaagcttctttctttggaaatctagatcagcgtgactacgtgacaggaggtgggcacccgaggactgcgttttaccaggccttcttaaaacttgcaaagtcgatatggatcttgcacaggcttgcttactcttttgatccagctgcaaagatcttccaagtgaaaaagggtagtgagttctctgattcatacatggaaagtgttgtgaagaacatagttgtggatgaaaaagaagagaacccaagagttggtcttatggttatgcctgggttttggattggtggcagtgtcattcaaagccgagtttatgtttctggtgtgaaggtccttgagtgaaggatctcaggaactctcttaatgcttcttcccactttgttgtgcaacttttattttctctttgttataagcaagcctatatgtatcatctattgttaaaaaaaaaaaggaattaatatcttcttcgtctc

SEQ ID NO: 99774 - protein, 425 aa, Arabidopsis thaliana
  peptide (1)..(425): Ceres Seq. ID no. 13603587
  misc_feature (25)..(160): Pfam Name: Plant protein of unknown function (DUF641) Pfam Description: Plant protein of unknown function (DUF641)
  misc_feature (1)..(425): Homolog of NCBI NO: 15225441 NR Description: expressed protein [Arabidopsis thaliana]
  misc_feature (25)..(290): Homolog of NCBI NO: 15235221 NR Description: expressed protein [Arabidopsis thaliana]
  misc_feature (322)..(386): Homolog of NCBI NO: 15235221 NR Description: expressed protein [Arabidopsis thaliana]
  misc_feature (25)..(310): Homolog of NCBI NO: 15234143 NR Description: hypothetical protein [Arabidopsis thaliana]
  misc_feature (35)..(419): Homolog of NCBI NO: 8777470 NR Description: gb|AAB82637.1~gene_id:K15M2.1~similar to unknown
  misc_feature (35)..(419): Homolog of NCBI NO: 15231944 NR Description: expressed protein [Arabidopsis thaliana] unknown protein [Arabidopsis thaliana]
  misc_feature (25)..(419): Homolog of NCBI NO: 15219282 NR Description: expressed protein [Arabidopsis thaliana]
  misc_feature (38)..(420): Homolog of NCBI NO: 15232398 NR Description: expressed protein [Arabidopsis thaliana]
  misc_feature (38)..(418): Homolog of NCBI NO: 37535904 NR Description: hypothetical protein [Oryza sativa (japonica group)] >gi|22267584|gb|AAM94919.1| hypothetical protein [Oryza
  misc_feature (35)..(419): Homolog of NCBI NO: 34903732 NR Description: unnamed protein product [Oryza sativa (japonica group)] >gi|7340858|dbj|BAA92948.1| unnamed protein product
MLPSGLKETQLRESNNNQKVHPQPMEESINQNPEAMEALISNLFGNISSLKSAYIELQSAHTPYDPEKIQAADKVVISELKNLSEMKHFYRENNPKPVCVSPQDSRLAAEIQEQQSLLKTYEVMVKKFQSEIQNKDSEITQMLQKIEEANQKRLKLEKNLKLRGMSTNEGSNGDGNMQFPDLTTELYVSTYEAAAKAVHDFSKPLINMMKAAGWDLDSAANSIEPDVVYAKRPHKKYAFESYICQRMFSGFQQKNFSVNSESAAVMANDDTDTFFRQFLALKDMDPLDALGTNPDSNFGIFCRSKYLLLVHPKMEASFFGNLDQRDYVTGGGHPRTAFYQAFLKLAKSIWILHRLAYSFDPAAKIFQVKKGSEFSDSYMESVVKNIVVDEKEENPRVGLMVMPGFWIGGSVIQSRVYVSGVKVLE

SEQ ID NO: 99775 - protein, 401 aa, Arabidopsis thaliana
  peptide (1)..(401): Ceres Seq. ID no. 13603588
  misc_feature (1)..(136): Pfam Name: Plant protein of unknown function (DUF641) Pfam Description: Plant protein of unknown function (DUF641)
  misc_feature (1)..(401): Homolog of NCBI NO: 15225441 NR Description: expressed protein [Arabidopsis thaliana]
  misc_feature (1)..(266): Homolog of NCBI NO: 15235221 NR Description: expressed protein [Arabidopsis thaliana]
  misc_feature (298)..(362): Homolog of NCBI NO: 15235221 NR Description: expressed protein [Arabidopsis thaliana]
  misc_feature (1)..(286): Homolog of NCBI NO: 15234143 NR Description: hypothetical protein [Arabidopsis thaliana]
  misc_feature (11)..(395): Homolog of NCBI NO: 8777470 NR Description: gb|AAB82637.1~gene_id:K15M2.1~similar to unknown
  misc_feature (11)..(395): Homolog of NCBI NO: 15231944 NR Description: expressed protein [Arabidopsis thaliana] unknown protein [Arabidopsis thaliana]
  misc_feature (1)..(395): Homolog of NCBI NO: 15219282 NR Description: expressed protein [Arabidopsis thaliana]
  misc_feature (14)..(396): Homolog of NCBI NO: 15232398 NR Description: expressed protein [Arabidopsis thaliana]
  misc_feature (14)..(394): Homolog of NCBI NO: 37535904 NR Description: hypothetical protein [Oryza sativa (japonica group)] >gi|22267584|gb|AAM94919.1| hypothetical protein [Oryza
  misc_feature (11)..(395): Homolog of NCBI NO: 34903732 NR Description: unnamed protein product [Oryza sativa (japonica group)] >gi|7340858|dbj|BAA92948.1| unnamed protein product
MEESINQNPEAMEALISNLFGNISSLKSAYIELQSAHTPYDPEKIQAADKVVISELKNLSEMKHFYRENNPKPVCVSPQDSRLAAEIQEQQSLLKTYEVMVKKFQSEIQNKDSEITQMLQKIEEANQKRLKLEKNLKLRGMSTNEGSNGDGNMQFPDLTTELYVSTYEAAAKAVHDFSKPLINMMKAAGWDLDSAANSIEPDVVYAKRPHKKYAFESYICQRMFSGFQQKNFSVNSESAAVMANDDTDTFFRQFLALKDMDPLDALGTNPDSNFGIFCRSKYLLLVHPKMEASFFGNLDQRDYVTGGGHPRTAFYQAFLKLAKSIWILHRLAYSFDPAAKIFQVKKGSEFSDSYMESVVKNIVVDEKEENPRVGLMVMPGFWIGGSVIQSRVYVSGVKVLE

SEQ ID NO: 99776 - protein, 390 aa, Arabidopsis thaliana
  peptide (1)..(390): Ceres Seq. ID no. 13603589
  misc_feature (1)..(125): Pfam Name: Plant protein of unknown function (DUF641) Pfam Description: Plant protein of unknown function (DUF641)
  misc_feature (1)..(390): Homolog of NCBI NO: 15225441 NR Description: expressed protein [Arabidopsis thaliana]
  misc_feature (1)..(255): Homolog of NCBI NO: 15235221 NR Description: expressed protein [Arabidopsis thaliana]
  misc_feature (287)..(351): Homolog of NCBI NO: 15235221 NR Description: expressed protein [Arabidopsis thaliana]
  misc_feature (1)..(275): Homolog of NCBI NO: 15234143 NR Description: hypothetical protein [Arabidopsis thaliana]
  misc_feature (1)..(384): Homolog of NCBI NO: 8777470 NR Description: gb|AAB82637.1~gene_id:K15M2.1~similar to unknown
  misc_feature (1)..(384): Homolog of NCBI NO: 15231944 NR Description: expressed protein [Arabidopsis thaliana] unknown protein [Arabidopsis thaliana]
  misc_feature (1)..(384): Homolog of NCBI NO: 15219282 NR Description: expressed protein [Arabidopsis thaliana]
  misc_feature (3)..(385): Homolog of NCBI NO: 15232398 NR Description: expressed protein [Arabidopsis thaliana]
  misc_feature (3)..(383): Homolog of NCBI NO: 37535904 NR Description: hypothetical protein [Oryza sativa (japonica group)] >gi|22267584|gb|AAM94919.1| hypothetical protein [Oryza
  misc_feature (1)..(384): Homolog of NCBI NO: 34903732 NR Description: unnamed protein product [Oryza sativa (japonica group)] >gi|7340858|dbj|BAA92948.1| unnamed protein product
MEALISNLFGNISSLKSAYIELQSAHTPYDPEKIQAADKVVISELKNLSEMKHFYRENNPKPVCVSPQDSRLAAEIQEQQSLLKTYEVMVKKFQSEIQNKDSEITQMLQKIEEANQKRLKLEKNLKLRGMSTNEGSNGDGNMQFPDLTTELYVSTYEAAAKAVHDFSKPLINMMKAAGWDLDSAANSIEPDVVYAKRPHKKYAFESYICQRMFSGFQQKNFSVNSESAAVMANDDTDTFFRQFLALKDMDPLDALGTNPDSNFGIFCRSKYLLLVHPKMEASFFGNLDQRDYVTGGGHPRTAFYQAFLKLAKSIWILHRLAYSFDPAAKIFQVKKGSEFSDSYMESVVKNIVVDEKEENPRVGLMVMPGFWIGGSVIQSRVYVSGVKVLE

SEQ ID NO: 99777 - DNA, 1741 bp, Arabidopsis thaliana
  misc_feature (1)..(1741): Ceres Seq. ID no. 13603590
  misc_feature: MA Experiment ID: 108434 Result: Down-regulated in Transcription
  misc_feature: MA Experiment 108434 PARAMETER Experiment Name: At_Root_Tips_cDNA_P Parameter: Tissue Value: Root Tips
  misc_feature: MA Experiment ID: 108573 Result: Up-regulated in Transcription
  misc_feature: MA Experiment 108573 PARAMETER Experiment Name: At_Drought_cDNA_P Parameter: Timepoint (hr) Value: 6
  misc_feature: MA Experiment 108573 PARAMETER Experiment Name: At_Drought_cDNA_P Parameter: Tissue Value: Aerial
  misc_feature: MA Experiment 108573 PARAMETER Experiment Name: At_Drought_cDNA_P Parameter: Treatment Value: Drought vs. No Drought
  misc_feature: MA Experiment ID: 108579 Result: Up-regulated in Transcription
  misc_feature: MA Experiment 108579 PARAMETER Experiment Name: At_4deg_Cold_cDNA_P Parameter: Temperature (deg C) Value: 4 vs. 22
  misc_feature: MA Experiment 108579 PARAMETER Experiment Name: At_4deg_Cold_cDNA_P Parameter: Timepoint (hr) Value: 6
  misc_feature: MA Experiment 108579 PARAMETER Experiment Name: At_4deg_Cold_cDNA_P Parameter: Tissue Value: Aerial
  misc_feature: MA Experiment ID: 20000030 Result: Down-regulated in Transcription
  misc_feature: MA Experiment 20000030 PARAMETER Experiment Name: At_CS6630_Roots_cDNA_P Parameter: Plant Line Value: CS6630 vs. WS
  misc_feature: MA Experiment 20000030 PARAMETER Experiment Name: At_CS6630_Roots_cDNA_P Parameter: Tissue Value: Roots
  misc_feature: MA Experiment ID: 20000068 Result: Down-regulated in Transcription
  misc_feature: MA Experiment ID: 20000069 Result: Down-regulated in Transcription
  misc_feature: MA Experiment 20000069 PARAMETER Experiment Name: At_100uM_ABA_Mutants_cDNA_P Parameter: Plant Line Value: CS23
  misc_feature: MA Experiment 20000069 PARAMETER Experiment Name: At_100uM_ABA_Mutants_cDNA_P Parameter: Timepoint (hr) Value: 6
  misc_feature: MA Experiment 20000069 PARAMETER Experiment Name: At_100uM_ABA_Mutants_cDNA_P Parameter: Tissue Value: Aerial
  misc_feature: MA Experiment 20000069 PARAMETER Experiment Name: At_100uM_ABA_Mutants_cDNA_P Parameter: Treatment Value: 100uM ABA vs. No Treatment
  misc_feature: MA Experiment ID: 20000087 Result: Down-regulated in Transcription
  misc_feature: MA Experiment 20000087 PARAMETER Experiment Name: At_100uM_ABA_Mutants_cDNA_P Parameter: Plant Line Value: WS
  misc_feature: MA Experiment 20000087 PARAMETER Experiment Name: At_100uM_ABA_Mutants_cDNA_P Parameter: Timepoint (hr) Value: 6
  misc_feature: MA Experiment 20000087 PARAMETER Experiment Name: At_100uM_ABA_Mutants_cDNA_P Parameter: Tissue Value: Aerial
  misc_feature: MA Experiment 20000087 PARAMETER Experiment Name: At_100uM_ABA_Mutants_cDNA_P Parameter: Treatment Value: 100uM ABA vs. No Treatment
  misc_feature: MA Experiment ID: 20000327 Result: Up-regulated in Transcription
  misc_feature: MA Experiment 20000327 PARAMETER Experiment Name: At_42deg_Heat_Sub_P Parameter: Age (day) Value: 14
  misc_feature: MA Experiment 20000327 PARAMETER Experiment Name: At_42deg_Heat_Sub_P Parameter: Organism Value: A. thaliana
  misc_feature: MA Experiment 20000327 PARAMETER Experiment Name: At_42deg_Heat_Sub_P Parameter: Plant Line Value: WS
  misc_feature: MA Experiment 20000327 PARAMETER Experiment Name: At_42deg_Heat_Sub_P Parameter: Temperature (deg C) Value: 42 vs. 22
  misc_feature: MA Experiment 20000327 PARAMETER Experiment Name: At_42deg_Heat_Sub_P Parameter: Timepoint (hr) Value: 1
  misc_feature: MA Experiment 20000327 PARAMETER Experiment Name: At_42deg_Heat_Sub_P Parameter: Tissue Value: Aerial
  misc_feature: MA Experiment ID: 20000328 Result: Up-regulated in Transcription
  misc_feature: MA Experiment 20000328 PARAMETER Experiment Name: At_42deg_Heat_Sub_P Parameter: Age (day) Value: 14
  misc_feature: MA Experiment 20000328 PARAMETER Experiment Name: At_42deg_Heat_Sub_P Parameter: Organism Value: A. thaliana
  misc_feature: MA Experiment 20000328 PARAMETER Experiment Name: At_42deg_Heat_Sub_P Parameter: Plant Line Value: WS
  misc_feature: MA Experiment 20000328 PARAMETER Experiment Name: At_42deg_Heat_Sub_P Parameter: Temperature (deg C) Value: 42 vs. 22
  misc_feature: MA Experiment 20000328 PARAMETER Experiment Name: At_42deg_Heat_Sub_P Parameter: Timepoint (hr) Value: 6
  misc_feature: MA Experiment 20000328 PARAMETER Experiment Name: At_42deg_Heat_Sub_P Parameter: Tissue Value: Aerial
  misc_feature: MA Experiment ID: 20000355 Result: Down-regulated in Transcription
  misc_feature: MA Experiment 20000355 PARAMETER Experiment Name: At_Siliques_Sub_P Parameter: Age (day) Value: 21
  misc_feature: MA Experiment 20000355 PARAMETER Experiment Name: At_Siliques_Sub_P Parameter: Organism Value: A. thaliana
  misc_feature: MA Experiment 20000355 PARAMETER Experiment Name: At_Siliques_Sub_P Parameter: Plant Line Value: WS
  misc_feature: MA Experiment 20000355 PARAMETER Experiment Name: At_Siliques_Sub_P Parameter: Tissue Value: Less Than 5mm Siliques vs. Whole Plant
atgccttcttctcatttctcaccaactccctccaaacccaacaaaagtgtttatattagcaaagccgccaaagtgtaaacgaaagtttataaatttcatttctgtgatcttacgtaattggaggaagatcaaaattttcaatccccattcttcgattgcttcaattgaagtttctccgatggcgcaagttagcagaatctgcaatggtgtgcagaacccatctcttatctccaatctctcgaaatccagtcaacgcaaatctcccttatcggtttctctgaagacgcagcagcatccacgagcttatccgatttcgtcgtcgtggggattgaagaagagtgggatgacgttaattggctctgagcttcgtcctcttaaggtcatgtcttctgtttccacggcggagaaagcgtcggagattgtacttcaacccattagagaaatctccggtcttattaagcttcctggctccaagtctctatcaaatcggatcctgcttctcgctgctctgtctgagggaacaactgtagtggacaacttgttgaatagcgatgacatcaattacatgcttgatgcgttgaagagattgggacttaatgtggaaactgacagtgaaaataatcgtgctgtagttgaaggatgtggcgggatattcccagcttccatagattcaaagagtgatatcgaactttacctcggtaatgcaggaacagcaatgcgtccacttaccgctgcggtcactgctgcaggtggaaacgcaagttatgtgcttgatggggtgcctcgtatgagagaaagacctataggggatttggttgttggtcttaagcagcttggtgctgatgttgaatgtactcttggaactaactgccctcctgttcgtgtcaacgctaatggtggccttcccggtggaaaggtgaagctttctggatcaattagtagtcagtacttgactgctctgctcatgtctgctcccttagctcttggagacgtcgagattgagattgtcgataaattaatttctgttccatatgttgaaatgacattgaagttgatggaacgtttcggggttagtgtcgagcatagtgatagctgggatcgtttctttgtcaagggcgggcaaaaatacaagtctccgggtaatgcgtatgtagaaggtgatgcttctagtgctagttatttcttggctggtgctgccattaccggtgaaactgtcacagtcgaaggttgtggaactaccagcttgcagggagatgtaaaattcgccgaggtccttgagaaaatgggatgtaaagtgtcctggacagagaacagtgtgactgtgacaggaccacctagagatgcttttggaatgagacacttgcgggctattgatgtcaacatgaacaaaatgcctgatgtagccatgacccttgccgtcgttgctctctttgctgacggtccaaccaccattagagatgtggctagctggagagtaaaggagacagaaaggatgattgccatttgcacagagcttagaaaactgggagctacagtggaagaaggttcagattattgtgtgataactccgcccaaaaaggtgaaaacggcagagattgatacatatgatgatcatagaatggcaatggcattctctcttgcagcttgtgctgatgttccaatcaccatcaacgatcctggttgcaccaggaaaaccttccccgactacttccaagtacttgaaagaatcacaaagcactaa

SEQ ID NO: 99778 - protein, 579 aa, Arabidopsis thaliana
  peptide (1)..(579): Ceres Seq. ID no. 13603591
  misc_feature (60)..(579): Homolog of NCBI NO: 15225450 NR Description: 3-phosphoshikimate 1-carboxyvinyltransferase (5-
  misc_feature (60)..(579): Homolog of NCBI NO: 66618 NR Description: 3-phosphoshikimate 1-carboxyvinyltransferase (EC
  misc_feature (60)..(579): Homolog of NCBI NO: 1351978 NR Description: 3-phosphoshikimate 1-carboxyvinyltransferase,
  misc_feature (60)..(579): Homolog of NCBI NO: 18251236 NR Description: 5-enolpyruvylshikimate-3-phosphate synthase
  misc_feature (60)..(579): Homolog of NCBI NO: 114171 NR Description: 3-phosphoshikimate 1-carboxyvinyltransferase,
  misc_feature (69)..(579): Homolog of NCBI NO: 15221986 NR Description: 3-phosphoshikimate 1-carboxyvinyltransferase (5-
  misc_feature (69)..(579): Homolog of NCBI NO: 21555078 NR Description: 5-enolpyruvylshikimate-3-phosphate (EPSP)
  misc_feature (60)..(579): Homolog of NCBI NO: 66619 NR Description: 3-phosphoshikimate 1-carboxyvinyltransferase (EC
  misc_feature (60)..(579): Homolog of NCBI NO: 114174 NR Description: 3-phosphoshikimate 1-carboxyvinyltransferase,
  misc_feature (60)..(579): Homolog of NCBI NO: 114176 NR Description: 3-phosphoshikimate 1-carboxyvinyltransferase,
CLLLISHQLPPNPTKVFILAKPPKCKRKFINFISVILRNWRKIKIFNPHSSIASIEVSPMAQVSRICNGVQNPSLISNLSKSSQRKSPLSVSLKTQQHPRAYPISSSWGLKKSGMTLIGSELRPLKVMSSVSTAEKASEIVLQPIREISGLIKLPGSKSLSNRILLLAALSEGTTVVDNLLNSDDINYMLDALKRLGLNVETDSENNRAVVEGCGGIFPASIDSKSDIELYLGNAGTAMRPLTAAVTAAGGNASYVLDGVPRMRERPIGDLVVGLKQLGADVECTLGTNCPPVRVNANGGLPGGKVKLSGSISSQYLTALLMSAPLALGDVEIEIVDKLISVPYVEMTLKLMERFGVSVEHSDSWDRFFVKGGQKYKSPGNAYVEGDASSASYFLAGAAITGETVTVEGCGTTSLQGDVKFAEVLEKMGCKVSWTENSVTVTGPPRDAFGMRHLRAIDVNMNKMPDVAMTLAVVALFADGPTTIRDVASWRVKETERMIAICTELRKLGATVEEGSDYCVITPPKKVKTAEIDTYDDHRMAMAFSLAACADVPITINDPGCTRKTFPDYFQVLERITKH

SEQ ID NO: 99779 - protein, 520 aa, Arabidopsis thaliana
  peptide (1)..(520): Ceres Seq. ID no. 13603592
  misc_feature (1)..(520): Homolog of NCBI NO: 15225450 NR Description: 3-phosphoshikimate 1-carboxyvinyltransferase (5-
  misc_feature (1)..(520): Homolog of NCBI NO: 66618 NR Description: 3-phosphoshikimate 1-carboxyvinyltransferase (EC
  misc_feature (1)..(520): Homolog of NCBI NO: 1351978 NR Description: 3-phosphoshikimate 1-carboxyvinyltransferase,
  misc_feature (1)..(520): Homolog of NCBI NO: 18251236 NR Description: 5-enolpyruvylshikimate-3-phosphate synthase
  misc_feature (1)..(520): Homolog of NCBI NO: 114171 NR Description: 3-phosphoshikimate 1-carboxyvinyltransferase,
  misc_feature (10)..(520): Homolog of NCBI NO: 15221986 NR Description: 3-phosphoshikimate 1-carboxyvinyltransferase (5-
  misc_feature (10)..(520): Homolog of NCBI NO: 21555078 NR Description: 5-enolpyruvylshikimate-3-phosphate (EPSP)
  misc_feature (1)..(520): Homolog of NCBI NO: 66619 NR Description: 3-phosphoshikimate 1-carboxyvinyltransferase (EC
  misc_feature (1)..(520): Homolog of NCBI NO: 114174 NR Description: 3-phosphoshikimate 1-carboxyvinyltransferase,
  misc_feature (1)..(520): Homolog of NCBI NO: 114176 NR Description: 3-phosphoshikimate 1-carboxyvinyltransferase,
MAQVSRICNGVQNPSLISNLSKSSQRKSPLSVSLKTQQHPRAYPISSSWGLKKSGMTLIGSELRPLKVMSSVSTAEKASEIVLQPIREISGLIKLPGSKSLSNRILLLAALSEGTTVVDNLLNSDDINYMLDALKRLGLNVETDSENNRAVVEGCGGIFPASIDSKSDIELYLGNAGTAMRPLTAAVTAAGGNASYVLDGVPRMRERPIGDLVVGLKQLGADVECTLGTNCPPVRVNANGGLPGGKVKLSGSISSQYLTALLMSAPLALGDVEIEIVDKLISVPYVEMTLKLMERFGVSVEHSDSWDRFFVKGGQKYKSPGNAYVEGDASSASYFLAGAAITGETVTVEGCGTTSLQGDVKFAEVLEKMGCKVSWTENSVTVTGPPRDAFGMRHLRAIDVNMNKMPDVAMTLAVVALFADGPTTIRDVASWRVKETERMIAICTELRKLGATVEEGSDYCVITPPKKVKTAEIDTYDDHRMAMAFSLAACADVPITINDPGCTRKTFPDYFQVLERITKH

SEQ ID NO: 99780 - protein, 465 aa, Arabidopsis thaliana
  peptide (1)..(465): Ceres Seq. ID no. 13603593
  misc_feature (1)..(465): Homolog of NCBI NO: 15225450 NR Description: 3-phosphoshikimate 1-carboxyvinyltransferase (5-
  misc_feature (1)..(465): Homolog of NCBI NO: 66618 NR Description: 3-phosphoshikimate 1-carboxyvinyltransferase (EC
  misc_feature (1)..(465): Homolog of NCBI NO: 1351978 NR Description: 3-phosphoshikimate 1-carboxyvinyltransferase,
  misc_feature (1)..(465): Homolog of NCBI NO: 18251236 NR Description: 5-enolpyruvylshikimate-3-phosphate synthase
  misc_feature (1)..(465): Homolog of NCBI NO: 114171 NR Description: 3-phosphoshikimate 1-carboxyvinyltransferase,
  misc_feature (1)..(465): Homolog of NCBI NO: 15221986 NR Description: 3-phosphoshikimate 1-carboxyvinyltransferase (5-
  misc_feature (1)..(465): Homolog of NCBI NO: 21555078 NR Description: 5-enolpyruvylshikimate-3-phosphate (EPSP)
  misc_feature (1)..(465): Homolog of NCBI NO: 66619 NR Description: 3-phosphoshikimate 1-carboxyvinyltransferase (EC
  misc_feature (1)..(465): Homolog of NCBI NO: 114174 NR Description: 3-phosphoshikimate 1-carboxyvinyltransferase,
  misc_feature (1)..(465): Homolog of NCBI NO: 114176 NR Description: 3-phosphoshikimate 1-carboxyvinyltransferase,
MTLIGSELRPLKVMSSVSTAEKASEIVLQPIREISGLIKLPGSKSLSNRILLLAALSEGTTVVDNLLNSDDINYMLDALKRLGLNVETDSENNRAVVEGCGGIFPASIDSKSDIELYLGNAGTAMRPLTAAVTAAGGNASYVLDGVPRMRERPIGDLVVGLKQLGADVECTLGTNCPPVRVNANGGLPGGKVKLSGSISSQYLTALLMSAPLALGDVEIEIVDKLISVPYVEMTLKLMERFGVSVEHSDSWDRFFVKGGQKYKSPGNAYVEGDASSASYFLAGAAITGETVTVEGCGTTSLQGDVKFAEVLEKMGCKVSWTENSVTVTGPPRDAFGMRHLRAIDVNMNKMPDVAMTLAVVALFADGPTTIRDVASWRVKETERMIAICTELRKLGATVEEGSDYCVITPPKKVKTAEIDTYDDHRMAMAFSLAACADVPITINDPGCTRKTFPDYFQVLERITKH

SEQ ID NO: 99781 - DNA, 1479 bp, Arabidopsis thaliana
  misc_feature (1)..(1479): Ceres Seq. ID no. 13603594
  misc_feature: MA Experiment ID: 108462 Result: Down-regulated in Transcription
  misc_feature: MA Experiment 108462 PARAMETER Experiment Name: At_Germinating_Seeds_cDNA_P Parameter: Age (day) Value: 2 vs. 0
  misc_feature: MA Experiment 108462 PARAMETER Experiment Name: At_Germinating_Seeds_cDNA_P Parameter: Tissue Value: Germinating Seeds
  misc_feature: MA Experiment ID: 108463 Result: Down-regulated in Transcription
  misc_feature: MA Experiment 108463 PARAMETER Experiment Name: At_Germinating_Seeds_cDNA_P Parameter: Age (day) Value: 3 vs. 0
  misc_feature: MA Experiment 108463 PARAMETER Experiment Name: At_Germinating_Seeds_cDNA_P Parameter: Tissue Value: Germinating Seeds
  misc_feature: MA Experiment ID: 108464 Result: Down-regulated in Transcription
  misc_feature: MA Experiment 108464 PARAMETER Experiment Name: At_Germinating_Seeds_cDNA_P Parameter: Age (day) Value: 4 vs. 0
  misc_feature: MA Experiment 108464 PARAMETER Experiment Name: At_Germinating_Seeds_cDNA_P Parameter: Tissue Value: Germinating Seeds
  misc_feature: MA Experiment ID: 108595 Result: Down-regulated in Transcription
  misc_feature: MA Experiment 108595 PARAMETER Experiment Name: At_Ler-pi_Ovule_cDNA_P Parameter: Plant Line Value: null
  misc_feature: MA Experiment ID: 20000234 Result: Up-regulated in Transcription
  misc_feature: MA Experiment 20000234 PARAMETER Experiment Name: At_Siliques_P Parameter: Age (day) Value: 21
  misc_feature: MA Experiment 20000234 PARAMETER Experiment Name: At_Siliques_P Parameter: Organism Value: A. thaliana
  misc_feature: MA Experiment 20000234 PARAMETER Experiment Name: At_Siliques_P Parameter: Plant Line Value: WS
  misc_feature: MA Experiment 20000234 PARAMETER Experiment Name: At_Siliques_P Parameter: Tissue Value: Less Than 5mm Siliques vs. Whole Plant
  misc_feature: MA Experiment ID: 20001556 Result: Up-regulated in Transcription
  misc_feature: MA Experiment 20001556 PARAMETER Experiment Name: At_Drought_Soil_Dry_P Parameter: Age (day) Value: 26
  misc_feature: MA Experiment 20001556 PARAMETER Experiment Name: At_Drought_Soil_Dry_P Parameter: Organism Value: A. thaliana
  misc_feature: MA Experiment 20001556 PARAMETER Experiment Name: At_Drought_Soil_Dry_P Parameter: Plant Line Value: WS
  misc_feature: MA Experiment 20001556 PARAMETER Experiment Name: At_Drought_Soil_Dry_P Parameter: Post Timepoint (hr) Value: None
  misc_feature: MA Experiment 20001556 PARAMETER Experiment Name: At_Drought_Soil_Dry_P Parameter: Post-Treatment Value: None
  misc_feature: MA Experiment 20001556 PARAMETER Experiment Name: At_Drought_Soil_Dry_P Parameter: Timepoint (day) Value: 12
  misc_feature: MA Experiment 20001556 PARAMETER Experiment Name: At_Drought_Soil_Dry_P Parameter: Treatment Value: Drought vs. No Drought
  misc_feature: MA Experiment ID: 20001557 Result: Up-regulated in Transcription
  misc_feature: MA Experiment 20001557 PARAMETER Experiment Name: At_Drought_Soil_Dry_P Parameter: Age (day) Value: 27
  misc_feature: MA Experiment 20001557 PARAMETER Experiment Name: At_Drought_Soil_Dry_P Parameter: Organism Value: A. thaliana
  misc_feature: MA Experiment 20001557 PARAMETER Experiment Name: At_Drought_Soil_Dry_P Parameter: Plant Line Value: WS
  misc_feature: MA Experiment 20001557 PARAMETER Experiment Name: At_Drought_Soil_Dry_P Parameter: Post Timepoint (hr) Value: 3
  misc_feature: MA Experiment 20001557 PARAMETER Experiment Name: At_Drought_Soil_Dry_P Parameter: Post-Treatment Value: Re-Water vs. No Drought
  misc_feature: MA Experiment 20001557 PARAMETER Experiment Name: At_Drought_Soil_Dry_P Parameter: Timepoint (day) Value: 13
  misc_feature: MA Experiment 20001557 PARAMETER Experiment Name: At_Drought_Soil_Dry_P Parameter: Treatment Value: Drought vs. No Drought
  misc_feature: MA Experiment ID: 20001558 Result: Up-regulated in Transcription
  misc_feature: MA Experiment 20001558 PARAMETER Experiment Name: At_Drought_Soil_Dry_P Parameter: Age (day) Value: 27
  misc_feature: MA Experiment 20001558 PARAMETER Experiment Name: At_Drought_Soil_Dry_P Parameter: Organism Value: A. thaliana
  misc_feature: MA Experiment 20001558 PARAMETER Experiment Name: At_Drought_Soil_Dry_P Parameter: Plant Line Value: WS
  misc_feature: MA Experiment 20001558 PARAMETER Experiment Name: At_Drought_Soil_Dry_P Parameter: Post Timepoint (hr) Value: 6
  misc_feature: MA Experiment 20001558 PARAMETER Experiment Name: At_Drought_Soil_Dry_P Parameter: Post-Treatment Value: Re-Water vs. No Drought
  misc_feature: MA Experiment 20001558 PARAMETER Experiment Name: At_Drought_Soil_Dry_P Parameter: Timepoint (day) Value: 13
  misc_feature: MA Experiment 20001558 PARAMETER Experiment Name: At_Drought_Soil_Dry_P Parameter: Treatment Value: Drought vs. No Drought
  misc_feature: MA Experiment ID: 20001560 Result: Up-regulated in Transcription
  misc_feature: MA Experiment 20001560 PARAMETER Experiment Name: At_Drought_Soil_Dry_P Parameter: Age (day) Value: 28
  misc_feature: MA Experiment 20001560 PARAMETER Experiment Name: At_Drought_Soil_Dry_P Parameter: Organism Value: A. thaliana
  misc_feature: MA Experiment 20001560 PARAMETER Experiment Name: At_Drought_Soil_Dry_P Parameter: Plant Line Value: WS
  misc_feature: MA Experiment 20001560 PARAMETER Experiment Name: At_Drought_Soil_Dry_P Parameter: Post Timepoint (hr) Value: None
  misc_feature: MA Experiment 20001560 PARAMETER Experiment Name: At_Drought_Soil_Dry_P Parameter: Post-Treatment Value: None
  misc_feature: MA Experiment 20001560 PARAMETER Experiment Name: At_Drought_Soil_Dry_P Parameter: Timepoint (day) Value: 14
  misc_feature: MA Experiment 20001560 PARAMETER Experiment Name: At_Drought_Soil_Dry_P Parameter: Treatment Value: Drought vs. No Drought
  misc_feature: MA Experiment ID: 20001905 Result: Up-regulated in Transcription
  misc_feature: MA Experiment 20001905 PARAMETER Experiment Name: At_Drought_Reproduction_P Parameter: Age (day) Value: 40
  misc_feature: MA Experiment 20001905 PARAMETER Experiment Name: At_Drought_Reproduction_P Parameter: Organism Value: A. thaliana
  misc_feature: MA Experiment 20001905 PARAMETER Experiment Name: At_Drought_Reproduction_P Parameter: Plant Line Value: WS
  misc_feature: MA Experiment 20001905 PARAMETER Experiment Name: At_Drought_Reproduction_P Parameter: Timepoint (day) Value: 10
  misc_feature: MA Experiment 20001905 PARAMETER Experiment Name: At_Drought_Reproduction_P Parameter: Tissue Value: Rosettes
  misc_feature: MA Experiment 20001905 PARAMETER Experiment Name: At_Drought_Reproduction_P Parameter: Treatment Value: Drought vs. No Drought
tagtttcgtcctccgtcaatctctctcgccgctttatccttgttacaaatcccatcgatcttttcggaatcttccctcattatgctcagccaccattaccagagctccattgtttcagttctccgttcaacgattatcggaattattcacaacactattagtatcaccgtcgccaaccgattttgattaccagctttggtgacgacagtcgtgattaaggaggttttggtaaatttcttcgttcctgtttgttttcaaagatggctgctttgaaaggttatggcttgtgttctatggactctgctcttcaattcccctgtcctaagctattcaatagctacaagagaaggagctcgaaatgggtctctcccaaagcagctgttgtacccaatttccatctcccaatgcgcagcttggaggttaaaaacaggacaaacacagacgacattaaagctctacgtgtgatcacagctatcaaaacaccgtatctacctgatggaagattcgaccttgaagcctacgatgacttggtcaacattcagatacaaaacggtgctgaaggtgtcattgttggtggtacaactggtgaaggacaactgatgagctgggacgaacacattatgcttataggccataccgttaactgttttggcggaagcatcaaagtcattggaaacactggaagcaattcgactagagaagcaatccacgcgactgaacaaggattcgcggttggaatgcatgctgctcttcatataaacccttactatggcaagacttctattgagggactgattgcacatttccagtctgttcttcatatgggaccgacgattatatacaatgtgcctggtcgaacagggcaagatataccgcctcgtgccatcttcaaactttctcagaatccgaatttagctggtgtgaaggaatgtgttgggaacaagcgagtcgaagagtacactgagaatggggttgttgtgtggagtgggaatgatgatgagtgtcatgattccagatgggattatggagcaacaggagttatatcagttactagtaatttagttccgggtttgatgaggaagttgatgtttgaaggtaggaattcatctttgaactcaaagcttctacctttgatggcttggctgttccacgagccaaacccgattggaatcaacactgctttggctcagcttggagtttcgaggccggtttttaggttaccatatgtaccattgccactgtctaagaggcttgagtttgtgaaactggtgaaggagattggacgagagcattttgtgggtgagaaagatgttcaggctcttgatgatgatgattttatccttatcggtcgatattagcatacttttttttttttaatttttggttcctttttgtttggtgttaatgaagaagagatggttctatcatttggttttatgtagctgatgaatgaatgaaaactcaaggaatgatttcatc

SEQ ID NO: 99782 - protein, 365 aa, Arabidopsis thaliana
  peptide (1)..(365): Ceres Seq. ID no. 13603595
  misc_feature (64)..(341): Pfam Name: Dihydrodipicolinate synthetase family Pfam Description: Dihydrodipicolinate synthetase family
  misc_feature (1)..(365): Homolog of NCBI NO: 15225477 NR Description: dihydrodipicolinate synthase -related thaliana] >gi|14547964|sp|Q9FVC8|DAP2_ARATH Dihydrodipicolinate
  misc_feature (1)..(365): Homolog of NCBI NO: 11066382 NR Description: dihydrodipicolinate synthase 2 [Arabidopsis
  misc_feature (1)..(365): Homolog of NCBI NO: 30695296 NR Description: dihydrodipicolinate synthase precursor thaliana] >gi|17380974|gb|AAL36299.1| putative synthase precursor [Arabidopsis thaliana]
  misc_feature (1)..(365): Homolog of NCBI NO: 15232971 NR Description: dihydrodipicolinate synthase precursor thaliana] >gi|14547977|sp|Q9LZX6|DAP1_ARATH Dihydrodipicolinate
  misc_feature (1)..(365): Homolog of NCBI NO: 1076317 NR Description: dihydrodipicolinate synthase (EC 4.2.1.52)
  misc_feature (28)..(365): Homolog of NCBI NO: 6014908 NR Description: Dihydrodipicolinate synthase, chloroplast (DHDPS) >gi|7436660|pir||T03214 dihydrodipicolinate synthase (EC
  misc_feature (1)..(364): Homolog of NCBI NO: 8648949 NR Description: dihydrodipicolinate synthase [Populus balsamifera
  misc_feature (1)..(364): Homolog of NCBI NO: 1076280 NR Description: dihydrodipicolinate synthase (EC 4.2.1.52)
  misc_feature (35)..(365): Homolog of NCBI NO: 6014907 NR Description: Dihydrodipicolinate synthase, chloroplast
  misc_feature (40)..(365): Homolog of NCBI NO: 1084359 NR Description: dihydrodipicolinate synthase (EC 4.2.1.52)
MAALKGYGLCSMDSALQFPCPKLFNSYKRRSSKWVSPKAAVVPNFHLPMRSLEVKNRTNTDDIKALRVITAIKTPYLPDGRFDLEAYDDLVNIQIQNGAEGVIVGGTTGEGQLMSWDEHIMLIGHTVNCFGGSIKVIGNTGSNSTREAIHATEQGFAVGMHAALHINPYYGKTSIEGLIAHFQSVLHMGPTIIYNVPGRTGQDIPPRAIFKLSQNPNLAGVKECVGNKRVEEYTENGVVVWSGNDDECHDSRWDYGATGVISVTSNLVPGLMRKLMFEGRNSSLNSKLLPLMAWLFHEPNPIGINTALAQLGVSRPVFRLPYVPLPLSKRLEFVKLVKEIGREHFVGEKDVQALDDDDFILIGRY

SEQ ID NO: 99783 - protein, 354 aa, Arabidopsis thaliana
  peptide (1)..(354): Ceres Seq. ID no. 13603596
  misc_feature (53)..(330): Pfam Name: Dihydrodipicolinate synthetase family Pfam Description: Dihydrodipicolinate synthetase family
  misc_feature (1)..(354): Homolog of NCBI NO: 15225477 NR Description: dihydrodipicolinate synthase -related thaliana] >gi|14547964|sp|Q9FVC8|DAP2_ARATH Dihydrodipicolinate
  misc_feature (1)..(354): Homolog of NCBI NO: 11066382 NR Description: dihydrodipicolinate synthase 2 [Arabidopsis
  misc_feature (1)..(354): Homolog of NCBI NO: 30695296 NR Description: dihydrodipicolinate synthase precursor thaliana] >gi|17380974|gb|AAL36299.1| putative synthase precursor [Arabidopsis thaliana]
  misc_feature (1)..(354): Homolog of NCBI NO: 15232971 NR Description: dihydrodipicolinate synthase precursor thaliana] >gi|14547977|sp|Q9LZX6|DAP1_ARATH Dihydrodipicolinate
  misc_feature (1)..(354): Homolog of NCBI NO: 1076317 NR Description: dihydrodipicolinate synthase (EC 4.2.1.52)
  misc_feature (17)..(354): Homolog of NCBI NO: 6014908 NR Description: Dihydrodipicolinate synthase, chloroplast (DHDPS) >gi|7436660|pir||T03214 dihydrodipicolinate synthase (EC
  misc_feature (1)..(353): Homolog of NCBI NO: 8648949 NR Description: dihydrodipicolinate synthase [Populus balsamifera
  misc_feature (1)..(353): Homolog of NCBI NO: 1076280 NR Description: dihydrodipicolinate synthase (EC 4.2.1.52)
  misc_feature (24)..(354): Homolog of NCBI NO: 6014907 NR Description: Dihydrodipicolinate synthase, chloroplast
  misc_feature (29)..(354): Homolog of NCBI NO: 1084359 NR Description: dihydrodipicolinate synthase (EC 4.2.1.52)
MDSALQFPCPKLFNSYKRRSSKWVSPKAAVVPNFHLPMRSLEVKNRTNTDDIKALRVITAIKTPYLPDGRFDLEAYDDLVNIQIQNGAEGVIVGGTTGEGQLMSWDEHIMLIGHTVNCFGGSIKVIGNTGSNSTREAIHATEQGFAVGMHAALHINPYYGKTSIEGLIAHFQSVLHMGPTIIYNVPGRTGQDIPPRAIFKLSQNPNLAGVKECVGNKRVEEYTENGVVVWSGNDDECHDSRWDYGATGVISVTSNLVPGLMRKLMFEGRNSSLNSKLLPLMAWLFHEPNPIGINTALAQLGVSRPVFRLPYVPLPLSKRLEFVKLVKEIGREHFVGEKDVQALDDDDFILIGRY

SEQ ID NO: 99784 - protein, 317 aa, Arabidopsis thaliana
  peptide (1)..(317): Ceres Seq. ID no. 13603597
  misc_feature (16)..(293): Pfam Name: Dihydrodipicolinate synthetase family Pfam Description: Dihydrodipicolinate synthetase family
  misc_feature (1)..(317): Homolog of NCBI NO: 15225477 NR Description: dihydrodipicolinate synthase -related thaliana] >gi|14547964|sp|Q9FVC8|DAP2_ARATH Dihydrodipicolinate
  misc_feature (1)..(317): Homolog of NCBI NO: 11066382 NR Description: dihydrodipicolinate synthase 2 [Arabidopsis
  misc_feature (1)..(317): Homolog of NCBI NO: 30695296 NR Description: dihydrodipicolinate synthase precursor thaliana] >gi|17380974|gb|AAL36299.1| putative synthase precursor [Arabidopsis thaliana]
  misc_feature (1)..(317): Homolog of NCBI NO: 15232971 NR Description: dihydrodipicolinate synthase precursor thaliana] >gi|14547977|sp|Q9LZX6|DAP1_ARATH Dihydrodipicolinate
  misc_feature (1)..(317): Homolog of NCBI NO: 1076317 NR Description: dihydrodipicolinate synthase (EC 4.2.1.52)
  misc_feature (1)..(317): Homolog of NCBI NO: 6014908 NR Description: Dihydrodipicolinate synthase, chloroplast (DHDPS) >gi|7436660|pir||T03214 dihydrodipicolinate synthase (EC
  misc_feature (1)..(316): Homolog of NCBI NO: 8648949 NR Description: dihydrodipicolinate synthase [Populus balsamifera
  misc_feature (1)..(316): Homolog of NCBI NO: 1076280 NR Description: dihydrodipicolinate synthase (EC 4.2.1.52)
  misc_feature (1)..(317): Homolog of NCBI NO: 6014907 NR Description: Dihydrodipicolinate synthase, chloroplast
  misc_feature (1)..(317): Homolog of NCBI NO: 1084359 NR Description: dihydrodipicolinate synthase (EC 4.2.1.52)
MRSLEVKNRTNTDDIKALRVITAIKTPYLPDGRFDLEAYDDLVNIQIQNGAEGVIVGGTTGEGQLMSWDEHIMLIGHTVNCFGGSIKVIGNTGSNSTREAIHATEQGFAVGMHAALHINPYYGKTSIEGLIAHFQSVLHMGPTIIYNVPGRTGQDIPPRAIFKLSQNPNLAGVKECVGNKRVEEYTENGVVVWSGNDDECHDSRWDYGATGVISVTSNLVPGLMRKLMFEGRNSSLNSKLLPLMAWLFHEPNPIGINTALAQLGVSRPVFRLPYVPLPLSKRLEFVKLVKEIGREHFVGEKDVQALDDDDFILIGRY

SEQ ID NO: 99785 - DNA, 1291 bp, Arabidopsis thaliana
  misc_feature (1)..(1291): Ceres Seq. ID no. 13603604
  misc_feature: MA Experiment ID: 108434 Result: Up-regulated in Transcription
  misc_feature: MA Experiment 108434 PARAMETER Experiment Name: At_Root_Tips_cDNA_P Parameter: Tissue Value: Root Tips
  misc_feature: MA Experiment ID: 108435 Result: Down-regulated in Transcription
  misc_feature: MA Experiment 108435 PARAMETER Experiment Name: At_stm_Mutants_cDNA_P Parameter: Plant Line Value: wt Landsburg vs stm
  misc_feature: MA Experiment 108435 PARAMETER Experiment Name: At_stm_Mutants_cDNA_P Parameter: Tissue Value: Shoot Apical Meristem Region
  misc_feature: MA Experiment ID: 108463 Result: Up-regulated in Transcription
  misc_feature: MA Experiment 108463 PARAMETER Experiment Name: At_Germinating_Seeds_cDNA_P Parameter: Age (day) Value: 3 vs. 0
  misc_feature: MA Experiment 108463 PARAMETER Experiment Name: At_Germinating_Seeds_cDNA_P Parameter: Tissue Value: Germinating Seeds
  misc_feature: MA Experiment ID: 108572 Result: Up-regulated in Transcription
  misc_feature: MA Experiment 108572 PARAMETER Experiment Name: At_Drought_cDNA_P Parameter: Timepoint (hr) Value: 1
  misc_feature: MA Experiment 108572 PARAMETER Experiment Name: At_Drought_cDNA_P Parameter: Tissue Value: Aerial
  misc_feature: MA Experiment 108572 PARAMETER Experiment Name: At_Drought_cDNA_P Parameter: Treatment Value: Drought vs. No Drought
  misc_feature: MA Experiment ID: 108576 Result: Down-regulated in Transcription
  misc_feature: MA Experiment 108576 PARAMETER Experiment Name: At_42deg_Heat_cDNA_P Parameter: Temperature (deg C) Value: 42 vs. 22
  misc_feature: MA Experiment 108576 PARAMETER Experiment Name: At_42deg_Heat_cDNA_P Parameter: Timepoint (hr) Value: 1
  misc_feature: MA Experiment 108576 PARAMETER Experiment Name: At_42deg_Heat_cDNA_P Parameter: Tissue Value: Aerial
  misc_feature: MA Experiment ID: 108577 Result: Down-regulated in Transcription
  misc_feature: MA Experiment 108577 PARAMETER Experiment Name: At_42deg_Heat_cDNA_P Parameter: Temperature (deg C) Value: 42 vs. 22
  misc_feature: MA Experiment 108577 PARAMETER Experiment Name: At_42deg_Heat_cDNA_P Parameter: Timepoint (hr) Value: 6
  misc_feature: MA Experiment 108577 PARAMETER Experiment Name: At_42deg_Heat_cDNA_P Parameter: Tissue Value: Aerial
  misc_feature: MA Experiment ID: 108595 Result: Down-regulated in Transcription
  misc_feature: MA Experiment 108595 PARAMETER Experiment Name: At_Ler-pi_Ovule_cDNA_P Parameter: Plant Line Value: null
  misc_feature: MA Experiment ID: 108607 Result: Up-regulated in Transcription
  misc_feature: MA Experiment 108607 PARAMETER Experiment Name: At_100uM_ABA_cDNA_P Parameter: Timepoint (hr) Value: 4
  misc_feature: MA Experiment 108607 PARAMETER Experiment Name: At_100uM_ABA_cDNA_P Parameter: Tissue Value: Aerial
  misc_feature: MA Experiment 108607 PARAMETER Experiment Name: At_100uM_ABA_cDNA_P Parameter: Treatment Value: 100uM ABA vs. No Treatment
  misc_feature: MA Experiment ID: 20000069 Result: Up-regulated in Transcription
  misc_feature: MA Experiment 20000069 PARAMETER Experiment Name: At_100uM_ABA_Mutants_cDNA_P Parameter: Plant Line Value: CS23
  misc_feature: MA Experiment 20000069 PARAMETER Experiment Name: At_100uM_ABA_Mutants_cDNA_P Parameter: Timepoint (hr) Value: 6
  misc_feature: MA Experiment 20000069 PARAMETER Experiment Name: At_100uM_ABA_Mutants_cDNA_P Parameter: Tissue Value: Aerial
  misc_feature: MA Experiment 20000069 PARAMETER Experiment Name: At_100uM_ABA_Mutants_cDNA_P Parameter: Treatment Value: 100uM ABA vs. No Treatment
  misc_feature: MA Experiment ID: 20000071 Result: Up-regulated in Transcription
  misc_feature: MA Experiment 20000071 PARAMETER Experiment Name: At_100uM_ABA_Mutants_cDNA_P Parameter: Plant Line Value: CS8104
  misc_feature: MA Experiment 20000071 PARAMETER Experiment Name: At_100uM_ABA_Mutants_cDNA_P Parameter: Timepoint (hr) Value: 6
  misc_feature: MA Experiment 20000071 PARAMETER Experiment Name: At_100uM_ABA_Mutants_cDNA_P Parameter: Tissue Value: Aerial
  misc_feature: MA Experiment 20000071 PARAMETER Experiment Name: At_100uM_ABA_Mutants_cDNA_P Parameter: Treatment Value: 100uM ABA vs. No Treatment
  misc_feature: MA Experiment ID: 20000111 Result: Down-regulated in Transcription
  misc_feature: MA Experiment 20000111 PARAMETER Experiment Name: At_42deg_Heat_cDNA_P Parameter: Temperature (deg C) Value: 42 vs. 22
  misc_feature: MA Experiment 20000111 PARAMETER Experiment Name: At_42deg_Heat_cDNA_P Parameter: Timepoint (hr) Value: 6
  misc_feature: MA Experiment 20000111 PARAMETER Experiment Name: At_42deg_Heat_cDNA_P Parameter: Tissue Value: Aerial
  misc_feature: MA Experiment ID: 20000113 Result: Down-regulated in Transcription
  misc_feature: MA Experiment 20000113 PARAMETER Experiment Name: At_42deg_Heat_cDNA_P Parameter: Temperature (deg C) Value: 42 vs. 22
  misc_feature: MA Experiment 20000113 PARAMETER Experiment Name: At_42deg_Heat_cDNA_P Parameter: Timepoint (hr) Value: 8
  misc_feature: MA Experiment 20000113 PARAMETER Experiment Name: At_42deg_Heat_cDNA_P Parameter: Tissue Value: Aerial
  misc_feature: MA Experiment ID: 20000117 Result: Up-regulated in Transcription
  misc_feature: MA Experiment 20000117 PARAMETER Experiment Name: At_100uM_ABA_Mutants_cDNA_P Parameter: Plant Line Value: Columbia
  misc_feature: MA Experiment 20000117 PARAMETER Experiment Name: At_100uM_ABA_Mutants_cDNA_P Parameter: Timepoint (hr) Value: 6
  misc_feature: MA Experiment 20000117 PARAMETER Experiment Name: At_100uM_ABA_Mutants_cDNA_P Parameter: Tissue Value: Aerial
  misc_feature: MA Experiment 20000117 PARAMETER Experiment Name: At_100uM_ABA_Mutants_cDNA_P Parameter: Treatment Value: 100uM ABA vs. No Treatment
  misc_feature: MA Experiment ID: 20000185 Result: Down-regulated in Transcription
  misc_feature: MA Experiment 20000185 PARAMETER Experiment Name: At_Roots__P Parameter: Age (day) Value: 7 vs. 21
  misc_feature: MA Experiment 20000185 PARAMETER Experiment Name: At_Roots__P Parameter: Organism Value: A. thaliana
  misc_feature: MA Experiment 20000185 PARAMETER Experiment Name: At_Roots__P Parameter: Tissue Value: Roots vs. Whole Plant
  misc_feature: MA Experiment ID: 20000224 Result: Up-regulated in Transcription
  misc_feature: MA Experiment ID: 20000234 Result: Down-regulated in Transcription
  misc_feature: MA Experiment 20000234 PARAMETER Experiment Name: At_Siliques_P Parameter: Age (day) Value: 21
  misc_feature: MA Experiment 20000234 PARAMETER Experiment Name: At_Siliques_P Parameter: Organism Value: A. thaliana
  misc_feature: MA Experiment 20000234 PARAMETER Experiment Name: At_Siliques_P Parameter: Plant Line Value: WS
  misc_feature: MA Experiment 20000234 PARAMETER Experiment Name: At_Siliques_P Parameter: Tissue Value: Less Than 5mm Siliques vs. Whole Plant
  misc_feature: MA Experiment ID: 20000235 Result: Down-regulated in Transcription
  misc_feature: MA Experiment 20000235 PARAMETER Experiment Name: At_Siliques_P Parameter: Age (day) Value: 21
  misc_feature: MA Experiment 20000235 PARAMETER Experiment Name: At_Siliques_P Parameter: Organism Value: A. thaliana
  misc_feature: MA Experiment 20000235 PARAMETER Experiment Name: At_Siliques_P Parameter: Plant Line Value: WS
  misc_feature: MA Experiment 20000235 PARAMETER Experiment Name: At_Siliques_P Parameter: Tissue Value: 5-10mm Siliques vs. Whole Plant
  misc_feature: MA Experiment ID: 20000265 Result: Down-regulated in Transcription
  misc_feature: MA Experiment 20000265 PARAMETER Experiment Name: At_Open_Flower_P Parameter: Age (day) Value: 21
  misc_feature: MA Experiment 20000265 PARAMETER Experiment Name: At_Open_Flower_P Parameter: Plant Line Value: WS
  misc_feature: MA Experiment 20000265 PARAMETER Experiment Name: At_Open_Flower_P Parameter: Tissue Value: Closed Flower vs. Whole Plant
  misc_feature: MA Experiment ID: 20000451 Result: Down-regulated in Transcription
  misc_feature: MA Experiment 20000451 PARAMETER Experiment Name: At_CS6879_Shoots-Roots_P Parameter: Age (day) Value: 14
  misc_feature: MA Experiment 20000451 PARAMETER Experiment Name: At_CS6879_Shoots-Roots_P Parameter: Organism Value: A. thaliana
  misc_feature: MA Experiment 20000451 PARAMETER Experiment Name: At_CS6879_Shoots-Roots_P Parameter: Plant Line Value: CS6879 vs. WS
  misc_feature: MA Experiment 20000451 PARAMETER Experiment Name: At_CS6879_Shoots-Roots_P Parameter: Tissue Value: Roots
  misc_feature: MA Experiment ID: 20000452 Result: Down-regulated in Transcription
  misc_feature: MA Experiment 20000452 PARAMETER Experiment Name: At_CS6879_Shoots-Roots_P Parameter: Age (day) Value: 14
  misc_feature: MA Experiment 20000452 PARAMETER Experiment Name: At_CS6879_Shoots-Roots_P Parameter: Organism Value: A. thaliana
  misc_feature: MA Experiment 20000452 PARAMETER Experiment Name: At_CS6879_Shoots-Roots_P Parameter: Plant Line Value: CS6879 vs. WS
  misc_feature: MA Experiment 20000452 PARAMETER Experiment Name: At_CS6879_Shoots-Roots_P Parameter: Tissue Value: Shoots
  misc_feature: MA Experiment ID: 20001451 Result: Up-regulated in Transcription
  misc_feature: MA Experiment 20001451 PARAMETER Experiment Name: At_Far-red-induction_P Parameter: Age (day) Value: 7
  misc_feature: MA Experiment 20001451 PARAMETER Experiment Name: At_Far-red-induction_P Parameter: Light Value: Far-red vs. White
  misc_feature: MA Experiment 20001451 PARAMETER Experiment Name: At_Far-red-induction_P Parameter: Organism Value: A. thaliana
  misc_feature: MA Experiment 20001451 PARAMETER Experiment Name: At_Far-red-induction_P Parameter: Plant Line Value: Columbia
  misc_feature: MA Experiment 20001451 PARAMETER Experiment Name: At_Far-red-induction_P Parameter: Timepoint (hr) Value: 24
  misc_feature: MA Experiment 20001451 PARAMETER Experiment Name: At_Far-red-induction_P Parameter: Tissue Value: Whole Plant
aaaagaaaatatatatggtttcacaaacaccattaccataactacaacgagaagaggatcttttttaaggagaaaagcagagagagaagagacgagtgtgtgaagtttttttgtcttttgtttcttttattacacacaaatagatgaaacgaggaaagctacttcttttgctacttccataaaaaggttcttcctttcgcagagaatcaactttgatcatcttcttccttctctttctttcttcttctccctccagtaatgcttatatagtctcctcctatatctctacctatacatacacaaaccctttatcctcgaaagcttcctcctggttaggtttttatcaaacccttttagccaatcgggaaattaactaaagaagaagatatggtgaggggcaaaactcagatgaagagaatagagaatgcaacaagcagacaagtgactttctccaaaagaaggaatggtttgttgaagaaagcctttgagctctcagtgctttgtgatgctgaagtttctcttatcatcttctctcctaaaggcaaactttatgaattcgccagctccaatatgcaagataccatagatcgttatctgaggcatactaaggatcgagtcagcaccaaaccggtttctgaagaaaatatgcagcatttgaaatatgaagcagcaaacatgatgaagaaaattgaacaactcgaagcttctaaacgtaaactcttgggagaaggcataggaacatgctcaatcgaggagctgcaacagattgagcaacagcttgagaaaagtgtcaaatgtattcgagcaagaaagactcaagtgtttaaggaacaaattgagcagctcaagcaaaaggagaaagctctagctgcagaaaacgagaagctctctgaaaagtggggatctcatgaaagcgaagtttggtcaaataagaatcaagaaagtactggaagaggtgatgaagagagtagcccaagttctgaagtagagacgcaattgttcattgggttaccttgttcttcaagaaagtgatctccactcaacaaaaaaaacaaaaaaacaaactaagtaaaaacaggtttagcagtactgagagtgtataaggacaagtaacaaaactctaaagctgcttctctcttgttgtcttatttctctctcactctctctctctcagtcacttctttaatgattctgaactgcttgtgttatgtatctatgttcttacacttgcctctctagaatgtaattttgattatgttttgttttcatgtatcaatttagctttcttccc

SEQ ID NO: 99786 - protein, 214 aa, Arabidopsis thaliana; identical to SEQ ID NO: 27115
  peptide (1)..(214): Ceres Seq. ID no. 13603605
  misc_feature (74)..(173): Pfam Name: K-box region Pfam Description: K-box region
  misc_feature (1)..(214): Homolog of NCBI NO: 15225534 NR Description: MADS-box protein (AGL20) [Arabidopsis thaliana]
  misc_feature (1)..(214): Homolog of NCBI NO: 30171309 NR Description: MADS-box protein [Cardamine flexuosa]
  misc_feature (1)..(214): Homolog of NCBI NO: 7446552 NR Description: MADS box protein A - white mustard
  misc_feature (1)..(214): Homolog of NCBI NO: 33771690 NR Description: MADS-box protein [Brassica rapa]
  misc_feature (1)..(214): Homolog of NCBI NO: 30171307 NR Description: MADS-box protein [Brassica rapa subsp. pekinensis]
  misc_feature (1)..(175): Homolog of NCBI NO: 30171311 NR Description: MADS-box protein [Draba nemorosa var. hebecarpa]
  misc_feature (1)..(214): Homolog of NCBI NO: 40641816 NR Description: putative MADS-box transcription factor DEFH68
  misc_feature (1)..(214): Homolog of NCBI NO: 31295609 NR Description: MADS-box protein PTM5 [Populus tremuloides]
  misc_feature (1)..(214): Homolog of NCBI NO: 1076646 NR Description: MADS box protein mads1 - common tobacco
  misc_feature (1)..(209): Homolog of NCBI NO: 3493647 NR Description: transcription activator [Pimpinella brachycarpa]

SEQ ID NO: 99787 - protein, 207 aa, Arabidopsis thaliana; identical to SEQ ID NO: 27116
  peptide (1)..(207): Ceres Seq. ID no. 13603606
  misc_feature (67)..(166): Pfam Name: K-box region Pfam Description: K-box region
  misc_feature (1)..(207): Homolog of NCBI NO: 15225534 NR Description: MADS-box protein (AGL20) [Arabidopsis thaliana]
  misc_feature (1)..(207): Homolog of NCBI NO: 30171309 NR Description: MADS-box protein [Cardamine flexuosa]
  misc_feature (1)..(207): Homolog of NCBI NO: 7446552 NR Description: MADS box protein A - white mustard
  misc_feature (1)..(207): Homolog of NCBI NO: 33771690 NR Description: MADS-box protein [Brassica rapa]
  misc_feature (1)..(207): Homolog of NCBI NO: 30171307 NR Description: MADS-box protein [Brassica rapa subsp. pekinensis]
  misc_feature (1)..(168): Homolog of NCBI NO: 30171311 NR Description: MADS-box protein [Draba nemorosa var. hebecarpa]
  misc_feature (1)..(207): Homolog of NCBI NO: 40641816 NR Description: putative MADS-box transcription factor DEFH68
  misc_feature (1)..(207): Homolog of NCBI NO: 31295609 NR Description: MADS-box protein PTM5 [Populus tremuloides]
  misc_feature (1)..(207): Homolog of NCBI NO: 1076646 NR Description: MADS box protein mads1 - common tobacco
  misc_feature (1)..(202): Homolog of NCBI NO: 3493647 NR Description: transcription activator [Pimpinella brachycarpa]

SEQ ID NO: 99788 - protein, 153 aa, Arabidopsis thaliana; identical to SEQ ID NO: 27117
  peptide (1)..(153): Ceres Seq. ID no. 13603607
  misc_feature (13)..(112): Pfam Name: K-box region Pfam Description: K-box region
  misc_feature (1)..(153): Homolog of NCBI NO: 15225534 NR Description: MADS-box protein (AGL20) [Arabidopsis thaliana]
  misc_feature (1)..(153): Homolog of NCBI NO: 30171309 NR Description: MADS-box protein [Cardamine flexuosa]
  misc_feature (1)..(153): Homolog of NCBI NO: 7446552 NR Description: MADS box protein A - white mustard
  misc_feature (1)..(153): Homolog of NCBI NO: 33771690 NR Description: MADS-box protein [Brassica rapa]
  misc_feature (1)..(153): Homolog of NCBI NO: 30171307 NR Description: MADS-box protein [Brassica rapa subsp. pekinensis]
  misc_feature (1)..(114): Homolog of NCBI NO: 30171311 NR Description: MADS-box protein [Draba nemorosa var. hebecarpa]
  misc_feature (1)..(153): Homolog of NCBI NO: 40641816 NR Description: putative MADS-box transcription factor DEFH68
  misc_feature (1)..(153): Homolog of NCBI NO: 31295609 NR Description: MADS-box protein PTM5 [Populus tremuloides]
  misc_feature (1)..(153): Homolog of NCBI NO: 1076646 NR Description: MADS box protein mads1 - common tobacco
  misc_feature (1)..(148): Homolog of NCBI NO: 3493647 NR Description: transcription activator [Pimpinella brachycarpa]

SEQ ID NO: 99789 - DNA, 1428 bp, Arabidopsis thaliana
  misc_feature (1)..(1428): Ceres Seq. ID no. 13603608
  misc_feature: MA Experiment ID: 108434 Result: Down-regulated in Transcription
  misc_feature: MA Experiment 108434 PARAMETER Experiment Name: At_Root_Tips_cDNA_P Parameter: Tissue Value: Root Tips
  misc_feature: MA Experiment ID: 108464 Result: Down-regulated in Transcription
  misc_feature: MA Experiment 108464 PARAMETER Experiment Name: At_Germinating_Seeds_cDNA_P Parameter: Age (day) Value: 4 vs. 0
  misc_feature: MA Experiment 108464 PARAMETER Experiment Name: At_Germinating_Seeds_cDNA_P Parameter: Tissue Value: Germinating Seeds
  misc_feature: MA Experiment ID: 108573 Result: Up-regulated in Transcription
  misc_feature: MA Experiment 108573 PARAMETER Experiment Name: At_Drought_cDNA_P Parameter: Timepoint (hr) Value: 6
  misc_feature: MA Experiment 108573 PARAMETER Experiment Name: At_Drought_cDNA_P Parameter: Tissue Value: Aerial
  misc_feature: MA Experiment 108573 PARAMETER Experiment Name: At_Drought_cDNA_P Parameter: Treatment Value: Drought vs. No Drought
  misc_feature: MA Experiment ID: 108577 Result: Down-regulated in Transcription
  misc_feature: MA Experiment 108577 PARAMETER Experiment Name: At_42deg_Heat_cDNA_P Parameter: Temperature (deg C) Value: 42 vs. 22
  misc_feature: MA Experiment 108577 PARAMETER Experiment Name: At_42deg_Heat_cDNA_P Parameter: Timepoint (hr) Value: 6
  misc_feature: MA Experiment 108577 PARAMETER Experiment Name: At_42deg_Heat_cDNA_P Parameter: Tissue Value: Aerial
  misc_feature: MA Experiment ID: 108579 Result: Down-regulated in Transcription
  misc_feature: MA Experiment 108579 PARAMETER Experiment Name: At_4deg_Cold_cDNA_P Parameter: Temperature (deg C) Value: 4 vs. 22
  misc_feature: MA Experiment 108579 PARAMETER Experiment Name: At_4deg_Cold_cDNA_P Parameter: Timepoint (hr) Value: 6
  misc_feature: MA Experiment 108579 PARAMETER Experiment Name: At_4deg_Cold_cDNA_P Parameter: Tissue Value: Aerial
  misc_feature: MA Experiment ID: 108605 Result: Up-regulated in Transcription
  misc_feature: MA Experiment 108605 PARAMETER Experiment Name: At_100uM_ABA_cDNA_P Parameter: Timepoint (hr) Value: 6
  misc_feature: MA Experiment 108605 PARAMETER Experiment Name: At_100uM_ABA_cDNA_P Parameter: Tissue Value: Aerial
  misc_feature: MA Experiment 108605 PARAMETER Experiment Name: At_100uM_ABA_cDNA_P Parameter: Treatment Value: 100uM ABA vs. No Treatment
  misc_feature: MA Experiment ID: 108609 Result: Up-regulated in Transcription
  misc_feature: MA Experiment 108609 PARAMETER Experiment Name: At_100uM_ABA_cDNA_P Parameter: Timepoint (hr) Value: 24
  misc_feature: MA Experiment 108609 PARAMETER Experiment Name: At_100uM_ABA_cDNA_P Parameter: Tissue Value: Aerial
  misc_feature: MA Experiment 108609 PARAMETER Experiment Name: At_100uM_ABA_cDNA_P Parameter: Treatment Value: 100uM ABA vs. No Treatment
  misc_feature: MA Experiment ID: 20000069 Result: Up-regulated in Transcription
  misc_feature: MA Experiment 20000069 PARAMETER Experiment Name: At_100uM_ABA_Mutants_cDNA_P Parameter: Plant Line Value: CS23
  misc_feature: MA Experiment 20000069 PARAMETER Experiment Name: At_100uM_ABA_Mutants_cDNA_P Parameter: Timepoint (hr) Value: 6
  misc_feature: MA Experiment 20000069 PARAMETER Experiment Name: At_100uM_ABA_Mutants_cDNA_P Parameter: Tissue Value: Aerial
  misc_feature: MA Experiment 20000069 PARAMETER Experiment Name: At_100uM_ABA_Mutants_cDNA_P Parameter: Treatment Value: 100uM ABA vs. No Treatment
  misc_feature: MA Experiment ID: 20000070 Result: Up-regulated in Transcription
  misc_feature: MA Experiment 20000070 PARAMETER Experiment Name: At_100uM_ABA_Mutants_cDNA_P Parameter: Plant Line Value: CS24
  misc_feature: MA Experiment 20000070 PARAMETER Experiment Name: At_100uM_ABA_Mutants_cDNA_P Parameter: Timepoint (hr) Value: 6
  misc_feature: MA Experiment 20000070 PARAMETER Experiment Name: At_100uM_ABA_Mutants_cDNA_P Parameter: Tissue Value: Aerial
  misc_feature: MA Experiment 20000070 PARAMETER Experiment Name: At_100uM_ABA_Mutants_cDNA_P Parameter: Treatment Value: 100uM ABA vs. No Treatment
  misc_feature: MA Experiment ID: 20000071 Result: Up-regulated in Transcription
  misc_feature: MA Experiment 20000071 PARAMETER Experiment Name: At_100uM_ABA_Mutants_cDNA_P Parameter: Plant Line Value: CS8104
  misc_feature: MA Experiment 20000071 PARAMETER Experiment Name: At_100uM_ABA_Mutants_cDNA_P Parameter: Timepoint (hr) Value: 6
  misc_feature: MA Experiment 20000071 PARAMETER Experiment Name: At_100uM_ABA_Mutants_cDNA_P Parameter: Tissue Value: Aerial
  misc_feature: MA Experiment 20000071 PARAMETER Experiment Name: At_100uM_ABA_Mutants_cDNA_P Parameter: Treatment Value: 100uM ABA vs. No Treatment
  misc_feature: MA Experiment ID: 20000072 Result: Up-regulated in Transcription
  misc_feature: MA Experiment 20000072 PARAMETER Experiment Name: At_100uM_ABA_Mutants_cDNA_P Parameter: Plant Line Value: CS8105
  misc_feature: MA Experiment 20000072 PARAMETER Experiment Name: At_100uM_ABA_Mutants_cDNA_P Parameter: Timepoint (hr) Value: 6
  misc_feature: MA Experiment 20000072 PARAMETER Experiment Name: At_100uM_ABA_Mutants_cDNA_P Parameter: Tissue Value: Aerial
  misc_feature: MA Experiment 20000072 PARAMETER Experiment Name: At_100uM_ABA_Mutants_cDNA_P Parameter: Treatment Value: 100uM ABA vs. No Treatment
  misc_feature: MA Experiment ID: 20000086 Result: Up-regulated in Transcription
  misc_feature: MA Experiment 20000086 PARAMETER Experiment Name: At_100uM_ABA_Mutants_cDNA_P Parameter: Plant Line Value: CS22
  misc_feature: MA Experiment 20000086 PARAMETER Experiment Name: At_100uM_ABA_Mutants_cDNA_P Parameter: Timepoint (hr) Value: 6
  misc_feature: MA Experiment 20000086 PARAMETER Experiment Name: At_100uM_ABA_Mutants_cDNA_P Parameter: Tissue Value: Aerial
  misc_feature: MA Experiment 20000086 PARAMETER Experiment Name: At_100uM_ABA_Mutants_cDNA_P Parameter: Treatment Value: 100uM ABA vs. No Treatment
  misc_feature: MA Experiment ID: 20000087 Result: Up-regulated in Transcription
  misc_feature: MA Experiment 20000087 PARAMETER Experiment Name: At_100uM_ABA_Mutants_cDNA_P Parameter: Plant Line Value: WS
  misc_feature: MA Experiment 20000087 PARAMETER Experiment Name: At_100uM_ABA_Mutants_cDNA_P Parameter: Timepoint (hr) Value: 6
  misc_feature: MA Experiment 20000087 PARAMETER Experiment Name: At_100uM_ABA_Mutants_cDNA_P Parameter: Tissue Value: Aerial
  misc_feature: MA Experiment 20000087 PARAMETER Experiment Name: At_100uM_ABA_Mutants_cDNA_P Parameter: Treatment Value: 100uM ABA vs. No Treatment
  misc_feature: MA Experiment ID: 20000088 Result: Up-regulated in Transcription
  misc_feature: MA Experiment 20000088 PARAMETER Experiment Name: At_100uM_ABA_Mutants_cDNA_P Parameter: Plant Line Value: Landsberg
  misc_feature: MA Experiment 20000088 PARAMETER Experiment Name: At_100uM_ABA_Mutants_cDNA_P Parameter: Timepoint (hr) Value: 6
  misc_feature: MA Experiment 20000088 PARAMETER Experiment Name: At_100uM_ABA_Mutants_cDNA_P Parameter: Tissue Value: Aerial
  misc_feature: MA Experiment 20000088 PARAMETER Experiment Name: At_100uM_ABA_Mutants_cDNA_P Parameter: Treatment Value: 100uM ABA vs. No Treatment
  misc_feature: MA Experiment ID: 20000090 Result: Up-regulated in Transcription
  misc_feature: MA Experiment ID: 20000169 Result: Up-regulated in Transcription
  misc_feature: MA Experiment 20000169 PARAMETER Experiment Name: At_100uM_ABA_P Parameter: Age (day) Value: 14
  misc_feature: MA Experiment 20000169 PARAMETER Experiment Name: At_100uM_ABA_P Parameter: Organism Value: A. thaliana
  misc_feature: MA Experiment 20000169 PARAMETER Experiment Name: At_100uM_ABA_P Parameter: Plant Line Value: WS
  misc_feature: MA Experiment 20000169 PARAMETER Experiment Name: At_100uM_ABA_P Parameter: Timepoint (hr) Value: 6
  misc_feature: MA Experiment 20000169 PARAMETER Experiment Name: At_100uM_ABA_P Parameter: Tissue Value: Aerial
  misc_feature: MA Experiment 20000169 PARAMETER Experiment Name: At_100uM_ABA_P Parameter: Treatment Value: 100uM ABA vs. No Treatment
  misc_feature: MA Experiment ID: 20000173 Result: Down-regulated in Transcription
  misc_feature: MA Experiment 20000173 PARAMETER Experiment Name: At_42deg_Heat_P Parameter: Age (day) Value: 14
  misc_feature: MA Experiment 20000173 PARAMETER Experiment Name: At_42deg_Heat_P Parameter: Organism Value: A. thaliana
  misc_feature: MA Experiment 20000173 PARAMETER Experiment Name: At_42deg_Heat_P Parameter: Plant Line Value: WS
  misc_feature: MA Experiment 20000173 PARAMETER Experiment Name: At_42deg_Heat_P Parameter: Temperature (deg C) Value: 42 vs. 22
  misc_feature: MA Experiment 20000173 PARAMETER Experiment Name: At_42deg_Heat_P Parameter: Timepoint (hr) Value: 6
  misc_feature: MA Experiment 20000173 PARAMETER Experiment Name: At_42deg_Heat_P Parameter: Tissue Value: Aerial
  misc_feature: MA Experiment ID: 20000182 Result: Up-regulated in Transcription
  misc_feature: MA Experiment 20000182 PARAMETER Experiment Name: At_2mM_SA_P Parameter: Age (day) Value: 14
  misc_feature: MA Experiment 20000182 PARAMETER Experiment Name: At_2mM_SA_P Parameter: Organism Value: A. thaliana
  misc_feature: MA Experiment 20000182 PARAMETER Experiment Name: At_2mM_SA_P Parameter: Plant Line Value: WS
  misc_feature: MA Experiment 20000182 PARAMETER Experiment Name: At_2mM_SA_P Parameter: Timepoint (hr) Value: 6
  misc_feature: MA Experiment 20000182 PARAMETER Experiment Name: At_2mM_SA_P Parameter: Tissue Value: Aerial
  misc_feature: MA Experiment 20000182 PARAMETER Experiment Name: At_2mM_SA_P Parameter: Treatment Value: 2mM SA vs. No Treatment
  misc_feature: MA Experiment ID: 20000234 Result: Down-regulated in Transcription
  misc_feature: MA Experiment 20000234 PARAMETER Experiment Name: At_Siliques_P Parameter: Age (day) Value: 21
  misc_feature: MA Experiment 20000234 PARAMETER Experiment Name: At_Siliques_P Parameter: Organism Value: A. thaliana
  misc_feature: MA Experiment 20000234 PARAMETER Experiment Name: At_Siliques_P Parameter: Plant Line Value: WS
  misc_feature: MA Experiment 20000234 PARAMETER Experiment Name: At_Siliques_P Parameter: Tissue Value: Less Than 5mm Siliques vs. Whole Plant
  misc_feature: MA Experiment ID: 20000436 Result: Up-regulated in Transcription
  misc_feature: MA Experiment 20000436 PARAMETER Experiment Name: At_Drought_P Parameter: Age (day) Value: 7
  misc_feature: MA Experiment 20000436 PARAMETER Experiment Name: At_Drought_P Parameter: Organism Value: A. thaliana
  misc_feature: MA Experiment 20000436 PARAMETER Experiment Name: At_Drought_P Parameter: Plant Line Value: WS
  misc_feature: MA Experiment 20000436 PARAMETER Experiment Name: At_Drought_P Parameter: Timepoint (hr) Value: 12
  misc_feature: MA Experiment 20000436 PARAMETER Experiment Name: At_Drought_P Parameter: Tissue Value: Whole Plant
  misc_feature: MA Experiment 20000436 PARAMETER Experiment Name: At_Drought_P Parameter: Treatment Value: Drought vs. No Drought
  misc_feature: MA Experiment ID: 20000437 Result: Up-regulated in Transcription
  misc_feature: MA Experiment 20000437 PARAMETER Experiment Name: At_Drought_P Parameter: Age (day) Value: 8
  misc_feature: MA Experiment 20000437 PARAMETER Experiment Name: At_Drought_P Parameter: Organism Value: A. thaliana
  misc_feature: MA Experiment 20000437 PARAMETER Experiment Name: At_Drought_P Parameter: Plant Line Value: WS
  misc_feature: MA Experiment 20000437 PARAMETER Experiment Name: At_Drought_P Parameter: Timepoint (hr) Value: 24
  misc_feature: MA Experiment 20000437 PARAMETER Experiment Name: At_Drought_P Parameter: Tissue Value: Whole Plant
  misc_feature: MA Experiment 20000437 PARAMETER Experiment Name: At_Drought_P Parameter: Treatment Value: Drought vs. No Drought
  misc_feature: MA Experiment ID: 20000453 Result: Up-regulated in Transcription
  misc_feature: MA Experiment 20000453 PARAMETER Experiment Name: At_100uM_ABA_P Parameter: Age (day) Value: 15
  misc_feature: MA Experiment 20000453 PARAMETER Experiment Name: At_100uM_ABA_P Parameter: Organism Value: A. thaliana
  misc_feature: MA Experiment 20000453 PARAMETER Experiment Name: At_100uM_ABA_P Parameter: Plant Line Value: WS
  misc_feature: MA Experiment 20000453 PARAMETER Experiment Name: At_100uM_ABA_P Parameter: Timepoint (hr) Value: 24
  misc_feature: MA Experiment 20000453 PARAMETER Experiment Name: At_100uM_ABA_P Parameter: Tissue Value: Aerial
  misc_feature: MA Experiment 20000453 PARAMETER Experiment Name: At_100uM_ABA_P Parameter: Treatment Value: 100uM ABA vs. No Treatment
  misc_feature: MA Experiment ID: 20000709 Result: Down-regulated in Transcription
  misc_feature: MA Experiment 20000709 PARAMETER Experiment Name: At_15mM_NH4NO3_L-to-H_P Parameter: Age (hr) Value: 14
  misc_feature: MA Experiment 20000709 PARAMETER Experiment Name: At_15mM_NH4NO3_L-to-H_P Parameter: Organism Value: A. thaliana
  misc_feature: MA Experiment 20000709 PARAMETER Experiment Name: At_15mM_NH4NO3_L-to-H_P Parameter: Plant Line Value: WS
  misc_feature: MA Experiment 20000709 PARAMETER Experiment Name: At_15mM_NH4NO3_L-to-H_P Parameter: Timepoint (hr) Value: 4
  misc_feature: MA Experiment 20000709 PARAMETER Experiment Name: At_15mM_NH4NO3_L-to-H_P Parameter: Tissue Value: Aerial
  misc_feature: MA Experiment 20000709 PARAMETER Experiment Name: At_15mM_NH4NO3_L-to-H_P Parameter: Treatment Value: 15mM NH4NO3 vs. 30mM Mannitol
  misc_feature: MA Experiment ID: 20000794 Result: Up-regulated in Transcription
  misc_feature: MA Experiment 20000794 PARAMETER Experiment Name: At_Petals_P Parameter: Age (day) Value: 23-25 days
  misc_feature: MA Experiment 20000794 PARAMETER Experiment Name: At_Petals_P Parameter: Plant Line Value: WS
  misc_feature: MA Experiment 20000794 PARAMETER Experiment Name: At_Petals_P Parameter: Tissue Value: Petals vs. Whole plant
  misc_feature: MA Experiment ID: 20001558 Result: Down-regulated in Transcription
  misc_feature: MA Experiment 20001558 PARAMETER Experiment Name: At_Drought_Soil_Dry_P Parameter: Age (day) Value: 27
  misc_feature: MA Experiment 20001558 PARAMETER Experiment Name: At_Drought_Soil_Dry_P Parameter: Organism Value: A. thaliana
  misc_feature: MA Experiment 20001558 PARAMETER Experiment Name: At_Drought_Soil_Dry_P Parameter: Plant Line Value: WS
  misc_feature: MA Experiment 20001558 PARAMETER Experiment Name: At_Drought_Soil_Dry_P Parameter: Post Timepoint (hr) Value: 6
  misc_feature: MA Experiment 20001558 PARAMETER Experiment Name: At_Drought_Soil_Dry_P Parameter: Post-Treatment Value: Re-Water vs. No Drought
  misc_feature: MA Experiment 20001558 PARAMETER Experiment Name: At_Drought_Soil_Dry_P Parameter: Timepoint (day) Value: 13
  misc_feature: MA Experiment 20001558 PARAMETER Experiment Name: At_Drought_Soil_Dry_P Parameter: Treatment Value: Drought vs. No Drought
  misc_feature: MA Experiment ID: 20001559 Result: Up-regulated in Transcription
  misc_feature: MA Experiment 20001559 PARAMETER Experiment Name: At_Drought_Soil_Dry_P Parameter: Age (day) Value: 28
  misc_feature: MA Experiment 20001559 PARAMETER Experiment Name: At_Drought_Soil_Dry_P Parameter: Organism Value: A. thaliana
  misc_feature: MA Experiment 20001559 PARAMETER Experiment Name: At_Drought_Soil_Dry_P Parameter: Plant Line Value: WS
  misc_feature: MA Experiment 20001559 PARAMETER Experiment Name: At_Drought_Soil_Dry_P Parameter: Post Timepoint (hr) Value: 29
  misc_feature: MA Experiment 20001559 PARAMETER Experiment Name: At_Drought_Soil_Dry_P Parameter: Post-Treatment Value: Re-Water vs. No Drought
  misc_feature: MA Experiment 20001559 PARAMETER Experiment Name: At_Drought_Soil_Dry_P Parameter: Timepoint (day) Value: 14
  misc_feature: MA Experiment 20001559 PARAMETER Experiment Name: At_Drought_Soil_Dry_P Parameter: Treatment Value: Drought vs. No Drought
  misc_feature: MA Experiment ID: 20001560 Result: Down-regulated in Transcription
  misc_feature: MA Experiment 20001560 PARAMETER Experiment Name: At_Drought_Soil_Dry_P Parameter: Age (day) Value: 28
  misc_feature: MA Experiment 20001560 PARAMETER Experiment Name: At_Drought_Soil_Dry_P Parameter: Organism Value: A. thaliana
  misc_feature: MA Experiment 20001560 PARAMETER Experiment Name: At_Drought_Soil_Dry_P Parameter: Plant Line Value: WS
  misc_feature: MA Experiment 20001560 PARAMETER Experiment Name: At_Drought_Soil_Dry_P Parameter: Post Timepoint (hr) Value: None
  misc_feature: MA Experiment 20001560 PARAMETER Experiment Name: At_Drought_Soil_Dry_P Parameter: Post-Treatment Value: None
  misc_feature: MA Experiment 20001560 PARAMETER Experiment Name: At_Drought_Soil_Dry_P Parameter: Timepoint (day) Value: 14
  misc_feature: MA Experiment 20001560 PARAMETER Experiment Name: At_Drought_Soil_Dry_P Parameter: Treatment Value: Drought vs. No Drought
  misc_feature: MA Experiment ID: 20001904 Result: Up-regulated in Transcription
  misc_feature: MA Experiment 20001904 PARAMETER Experiment Name: At_Drought_Reproduction_P Parameter: Age (day) Value: 37
  misc_feature: MA Experiment 20001904 PARAMETER Experiment Name: At_Drought_Reproduction_P Parameter: Organism Value: A. thaliana
  misc_feature: MA Experiment 20001904 PARAMETER Experiment Name: At_Drought_Reproduction_P Parameter: Plant Line Value: WS
  misc_feature: MA Experiment 20001904 PARAMETER Experiment Name: At_Drought_Reproduction_P Parameter: Timepoint (day) Value: 7
  misc_feature: MA Experiment 20001904 PARAMETER Experiment Name: At_Drought_Reproduction_P Parameter: Tissue Value: Rosettes
  misc_feature: MA Experiment 20001904 PARAMETER Experiment Name: At_Drought_Reproduction_P Parameter: Treatment Value: Drought vs. No Drought
aagaaatgtctctgtcattgtgcagtagataagccactctctctctctttctctctttttgctattataaagaaaaagattcattctcccaccattgaggtttaacttatacaaacagatctttttgaaattggattcatctaagaagcagactctgttttcatggctgtttacaataccaaactctgtttggcctctgttttcttgctcttagggcttctcttggcttttgacttgaagggtatagaagcagaaagtcttaccaaacagaaactggactcgaagatacttcaggatgagattgtgaagaaagtcaacgaaaacccaaacgctggatggaaagctgctataaatgatcgattttcaaacgccactgttgcagagtttaagcgtcttctcggtgttaaaccaacaccaaagaagcatttcttaggtgttcctattgtgagccatgatccatctttgaagctacctaaagcttttgatgctagaactgcttggccacagtgcactagtattggaaacatcttagatcagggacattgtggttcttgctgggcatttggtgctgttgaatcactatcagatagattctgtatccaatttggcatgaacatttctttatcagtaaatgatctcctagcttgttgtggattccgttgtggtgatggttgtgacggtggctatccaattgctgcttggcaatacttttcgtatagcggtgttgtcacagaagagtgtgatccatactttgataataccggatgctctcacccgggttgcgaaccggcatatcctacaccgaaatgttcgaggaaatgcgttagcgacaacaaactatggagcgagtcgaagcattacagtgttagtacatacactgtgaaatctaatccacaagatatcatggcagaggtttataagaatggacctgttgaagtctcttttaccgtttatgaggattttgctcattacaaatctggagtctataagcacataacaggttctaacattggaggtcatgctgttaaacttattggttggggaactagcagtgaaggagaagattattggttgatggcaaatcaatggaacagaggctggggtgatgatggttatttcatgataaggagaggaactaatgaatgtggaattgaagatgaaccagtagctggtttgccttcaagcaagaatgtgtttagggttgataccggttcgaatgatcttccggttgcatcggtttaagatcaaagatggaaatgttgcatcggtttaatatcaaagatgaaaagttgtttgtaagatatatatgttatggttgttgtttccagtaaaagattccggtgactagaaattgttttctggttggctgtgaaaatgttatacaaataaacacttcaacttaagcaatataatatcatttctactttt

SEQ ID NO: 99790 - protein, 359 aa, Arabidopsis thaliana; identical to SEQ ID NO: 34764
  peptide (1)..(359): Ceres Seq. ID no. 13603609
  misc_feature (103)..(338): Pfam Name: Papain family cysteine protease Pfam Description: Papain family cysteine protease
  misc_feature (1)..(359): Homolog of NCBI NO: 18411686 NR Description: cathepsin B-like cysteine protease, putative thaliana] >gi|13877861|gb|AAK44008.1|AF370193_1 putative B cysteine protease [Arabidopsis thaliana]
  misc_feature (1)..(359): Homolog of NCBI NO: 30678927 NR Description: cathepsin B-like cysteine protease, putative
  misc_feature (11)..(358): Homolog of NCBI NO: 18378947 NR Description: expressed protein [Arabidopsis thaliana] At1g02300/T6A9_10 [Arabidopsis thaliana] At1g02300/T6A9_10 [Arabidopsis thaliana]
  misc_feature (10)..(359): Homolog of NCBI NO: 2317912 NR Description: cathepsin B-like cysteine proteinase [Arabidopsis
  misc_feature (126)..(359): Homolog of NCBI NO: 18378945 NR Description: cathepsin B-like cysteine protease, putative
  misc_feature (10)..(123): Homolog of NCBI NO: 18378945 NR Description: cathepsin B-like cysteine protease, putative
  misc_feature (8)..(344): Homolog of NCBI NO: 609175 NR Description: cathepsin B-like cysteine proteinase [Nicotiana
  misc_feature (8)..(344): Homolog of NCBI NO: 2129942 NR Description: cathepsin B-like cysteine proteinase (EC
  misc_feature (15)..(359): Homolog of NCBI NO: 14582576 NR Description: cathepsin B-like cysteine proteinase [Ipomoea
  misc_feature (15)..(350): Homolog of NCBI NO: 38639325 NR Description: cathepsin B-like cysteine proteinase [Solanum

SEQ ID NO: 99791 - protein, 210 aa, Arabidopsis thaliana; identical to SEQ ID NO: 34765
  peptide (1)..(210): Ceres Seq. ID no. 13603610
  misc_feature (1)..(189): Pfam Name: Papain family cysteine protease Pfam Description: Papain family cysteine protease
  misc_feature (1)..(210): Homolog of NCBI NO: 18411686 NR Description: cathepsin B-like cysteine protease, putative thaliana] >gi|13877861|gb|AAK44008.1|AF370193_1 putative B cysteine protease [Arabidopsis thaliana]
  misc_feature (1)..(210): Homolog of NCBI NO: 30678927 NR Description: cathepsin B-like cysteine protease, putative
  misc_feature (1)..(209): Homolog of NCBI NO: 18378947 NR Description: expressed protein [Arabidopsis thaliana] At1g02300/T6A9_10 [Arabidopsis thaliana] At1g02300/T6A9_10 [Arabidopsis thaliana]
  misc_feature (1)..(210): Homolog of NCBI NO: 2317912 NR Description: cathepsin B-like cysteine proteinase [Arabidopsis
  misc_feature (1)..(210): Homolog of NCBI NO: 18378945 NR Description: cathepsin B-like cysteine protease, putative
  misc_feature (1)..(195): Homolog of NCBI NO: 609175 NR Description: cathepsin B-like cysteine proteinase [Nicotiana
  misc_feature (1)..(195): Homolog of NCBI NO: 2129942 NR Description: cathepsin B-like cysteine proteinase (EC
  misc_feature (1)..(210): Homolog of NCBI NO: 14582576 NR Description: cathepsin B-like cysteine proteinase [Ipomoea
  misc_feature (1)..(201): Homolog of NCBI NO: 38639325 NR Description: cathepsin B-like cysteine proteinase [Solanum
  misc_feature (1)..(210): Homolog of NCBI NO: 6165885 NR Description: cathepsin B-like cysteine proteinase [Ipomoea

SEQ ID NO: 99792 - DNA, 2535 bp, Arabidopsis thaliana
  misc_feature (1)..(2535): Ceres Seq. ID no. 13603635
  misc_feature: MA Experiment ID: 108434 Result: Up-regulated in Transcription
  misc_feature: MA Experiment 108434 PARAMETER Experiment Name: At_Root_Tips_cDNA_P Parameter: Tissue Value: Root Tips
  misc_feature: MA Experiment ID: 108461 Result: Up-regulated in Transcription
  misc_feature: MA Experiment 108461 PARAMETER Experiment Name: At_Germinating_Seeds_cDNA_P Parameter: Age (day) Value: 1 vs. 0
  misc_feature: MA Experiment 108461 PARAMETER Experiment Name: At_Germinating_Seeds_cDNA_P Parameter: Tissue Value: Germinating Seeds
  misc_feature: MA Experiment ID: 108585 Result: Down-regulated in Transcription
  misc_feature: MA Experiment 108585 PARAMETER Experiment Name: At_5mM_NaNP_cDNA_P Parameter: Timepoint (hr) Value: 6
  misc_feature: MA Experiment 108585 PARAMETER Experiment Name: At_5mM_NaNP_cDNA_P Parameter: Tissue Value: Aerial
  misc_feature: MA Experiment 108585 PARAMETER Experiment Name: At_5mM_NaNP_cDNA_P Parameter: Treatment Value: null
  misc_feature: MA Experiment ID: 20000179 Result: Up-regulated in Transcription
  misc_feature: MA Experiment 20000179 PARAMETER Experiment Name: At_Germinating_Seeds_P Parameter: Age (hr) Value: 6 vs. 0
  misc_feature: MA Experiment 20000179 PARAMETER Experiment Name: At_Germinating_Seeds_P Parameter: Tissue Value: Germinating Seeds
  misc_feature: MA Experiment ID: 20000180 Result: Up-regulated in Transcription
  misc_feature: MA Experiment 20000180 PARAMETER Experiment Name: At_Germinating_Seeds_P Parameter: Age (hr) Value: 24 vs. 0
  misc_feature: MA Experiment 20000180 PARAMETER Experiment Name: At_Germinating_Seeds_P Parameter: Tissue Value: Germinating Seeds
  misc_feature: MA Experiment ID: 20000184 Result: Down-regulated in Transcription
  misc_feature: MA Experiment 20000184 PARAMETER Experiment Name: At_Shoots__P Parameter: Age (day) Value: 7
  misc_feature: MA Experiment 20000184 PARAMETER Experiment Name: At_Shoots__P Parameter: Tissue Value: Shoots vs. Whole Plant
atgcaattgctgacgctaaatccggcggccatttccaggacgccgccgcaagccatagacccttcctcatcctcgagtcttcttcttccttttcctcagattttgagctcccaacgcgctcttggtcttgtagctaggccttgtaatccacttcgacgaggattatctaggtttttatcaagtcgacagcttttccgacgatccaaagttgtcaaggcagtagcaaccccagaccccatcttggaagtacctttaactgaggaaaatgtagaaagcgttttggatgaaatccgaccttaccttatgtctgatggtggtaatgtggcattacatgagatcgatggaaatattgtgcgggttaagctgcagggagcatgcggatcatgtccaagttctactatgacaatgaagatgggtattgagcgtcgtctaatggaaaagatccctgaaatagtggctgtagaagctcttccagatgaagagactggccttgaactgaatgaggaaaacattgaaaaggtgctggaagaaatcaggccttacttaatcggaacagcagatggatcgcttgatctagtggagattgaagatccaatcgtgaagataagaatcacaggacctgcagctggagtcatgacagttcgtgtagcagtcactcagaaactaagagagaaaattccatcaatcgcaaaaaaaagtccttattatttacttgagagcagagacttatttgattcttccatcgttttcataatgagccgatatttctccttcttcttcttagctctcttcctccattatcgtattatcgtagcttctccattcgaaggatttgatgctgaagaagacgacgttaccgacgattcctctcaccttcttcaccactcactccctccgcctcttctcactcagtctcactcatcactctccgatcccgatccggagccggaaccttcttccgccgaatgtaaatccgatctcatcactgaatcagatctcgagcatcaatccgattcgaaaactccctcgtctacaccatttgagtactgggacgaagacgagttcgaaggactaccagttgagatagagacacttgaatctccattgattacagaaaacggaactcatgctgatccaaagacgccagatctcaagacttcatcggaagctcaaggagacactaatgatcaaacgaagaagaagaagtcgtacgcggtggagatcgcttgcgtctgtttcttaatcgcactcgcaatcaactacttcgttggtaaacgtgagaacgagagtctcgcattagcttgggcggcgaaatttgcttctaaggatacaatattccagaagaattttagtatgcttggagttagtgaattagaggattcgccattgttgttaaaagaagccttaaatgtgttcaaattctacgcgagtggtcgtaggtattgccatggattgttagctactatggagcttaagagtagacatgatttgatctctagggtgtttaatttggttgttccttgtaaagatgagatcacttttgaggtttatatgaatgaagaaactatggatcatgttgtgtttgctatgacgaagaagaaggctgcaaaaactatgcaaaaggagatgagggatttgcaaagatttgctgggattgtgtctcctcctgctggaaggaaatgggtgtcggaggagttcgccttgatctctgaatccaaggaagttgctgcggatttgatcactgacactgttcttgatcaggtttttggtgacaaggctgtggataagtatgggaagaatttcatgtcgatgcatatatctgaccaacaccctggcaagcacaagaagatgatgcttttcaagttttctttacctgatgctaaacatatggatgatattgtccggttggtggcgctaattccatattacatcgacttagtaggacgatacagactcagctcgcaggcgcggaacaaaactgagagtggtaggcaaaaggcagcagaggaagcatacaaggaacttcataacgcgaggcaagaggcattgcagaagaagaaagcagaaaagaagaaaatgatggaggaagcggaagcaaagatgagcgcagaagtgataaggaagaaagaggcaaaagagagagcaaggcaggtgaaaaaggcagtaccaaaaatgaagatgagccgtagtcactagctaaaagcttaatcaaagagagccatccagaattaatgcattaaaatcactctccagagttcaaactctaaaaagcttagaaaacatcagcacgtgttttactcgatggctgctttgcttcataatactctcccttaaagtagtaccatgtttgacttgataatggagtttttgatgttgaggtggaaagtcatgcgagagctttgtatagtatggatggcaaatggctaattgtacccatattgtctcatagaagaaagctgatctatgcacactactttgttctttgcatctatatgttgagccctgagagtttgtataacattgacggcaaatagc

SEQ ID NO: 99793 - protein, 731 aa, Arabidopsis thaliana
  peptide (1)..(731): Ceres Seq. ID no. 13603636
  misc_feature (90)..(157): Pfam Name: NifU-like domain Pfam Description: NifU-like domain
  misc_feature (252)..(731): Homolog of NCBI NO: 18423086 NR Description: expressed protein [Arabidopsis thaliana] unknown protein [Arabidopsis thaliana]
  misc_feature (252)..(731): Homolog of NCBI NO: 15233789 NR Description: expressed protein [Arabidopsis thaliana]
  misc_feature (252)..(731): Homolog of NCBI NO: 20465626 NR Description: unknown protein [Arabidopsis thaliana]
  misc_feature (252)..(731): Homolog of NCBI NO: 21595706 NR Description: unknown [Arabidopsis thaliana]
  misc_feature (1)..(230): Homolog of NCBI NO: 18423084 NR Description: expressed protein [Arabidopsis thaliana] unknown protein [Arabidopsis thaliana] AT5g49940/K9P8_8 [Arabidopsis thaliana]
  misc_feature (48)..(229): Homolog of NCBI NO: 30698492 NR Description: NifU1 [Oryza sativa (japonica cultivar-group)]
  misc_feature (20)..(229): Homolog of NCBI NO: 7485833 NR Description: hypothetical protein F20B18.20 - Arabidopsis >gi|4538920|emb|CAB39656.1| nitrogen fixation like protein thaliana] >gi|7269442|emb|CAB79446.1| nitrogen fixation like
  misc_feature (20)..(229): Homolog of NCBI NO: 18416645 NR Description: nitrogen fixation protein, putative (NifU) thaliana] >gi|28207820|emb|CAD55560.1| NFU3 protein [Arabidopsis
  misc_feature (34)..(229): Homolog of NCBI NO: 21554503 NR Description: nitrogen fixation like protein [Arabidopsis
  misc_feature (275)..(726): Homolog of NCBI NO: 31234929 NR Description: ENSANGP00000011982 [Anopheles gambiae]
MQLLTLNPAAISRTPPQAIDPSSSSSLLLPFPQILSSQRALGLVARPCNPLRRGLSRFLSSRQLFRRSKVVKAVATPDPILEVPLTEENVESVLDEIRPYLMSDGGNVALHEIDGNIVRVKLQGACGSCPSSTMTMKMGIERRLMEKIPEIVAVEALPDEETGLELNEENIEKVLEEIRPYLIGTADGSLDLVEIEDPIVKIRITGPAAGVMTVRVAVTQKLREKIPSIAKKSPYYLLESRDLFDSSIVFIMSRYFSFFFLALFLHYRIIVASPFEGFDAEEDDVTDDSSHLLHHSLPPPLLTQSHSSLSDPDPEPEPSSAECKSDLITESDLEHQSDSKTPSSTPFEYWDEDEFEGLPVEIETLESPLITENGTHADPKTPDLKTSSEAQGDTNDQTKKKKSYAVEIACVCFLIALAINYFVGKRENESLALAWAAKFASKDTIFQKNFSMLGVSELEDSPLLLKEALNVFKFYASGRRYCHGLLATMELKSRHDLISRVFNLVVPCKDEITFEVYMNEETMDHVVFAMTKKKAAKTMQKEMRDLQRFAGIVSPPAGRKWVSEEFALISESKEVAADLITDTVLDQVFGDKAVDKYGKNFMSMHISDQHPGKHKKMMLFKFSLPDAKHMDDIVRLVALIPYYIDLVGRYRLSSQARNKTESGRQKAAEEAYKELHNARQEALQKKKAEKKKMMEEAEAKMSAEVIRKKEAKERARQVKKAVPKMKMSRSH

SEQ ID NO: 99794 - protein, 630 aa, Arabidopsis thaliana
  peptide (1)..(630): Ceres Seq. ID no. 13603637
  misc_feature (1)..(56): Pfam Name: NifU-like domain Pfam Description: NifU-like domain
  misc_feature (151)..(630): Homolog of NCBI NO: 18423086 NR Description: expressed protein [Arabidopsis thaliana] unknown protein [Arabidopsis thaliana]
  misc_feature (151)..(630): Homolog of NCBI NO: 15233789 NR Description: expressed protein [Arabidopsis thaliana]
  misc_feature (151)..(630): Homolog of NCBI NO: 20465626 NR Description: unknown protein [Arabidopsis thaliana]
  misc_feature (151)..(630): Homolog of NCBI NO: 21595706 NR Description: unknown [Arabidopsis thaliana]
  misc_feature (1)..(129): Homolog of NCBI NO: 18423084 NR Description: expressed protein [Arabidopsis thaliana] unknown protein [Arabidopsis thaliana] AT5g49940/K9P8_8 [Arabidopsis thaliana]
  misc_feature (1)..(128): Homolog of NCBI NO: 30698492 NR Description: NifU1 [Oryza sativa (japonica cultivar-group)]
  misc_feature (1)..(128): Homolog of NCBI NO: 7485833 NR Description: hypothetical protein F20B18.20 - Arabidopsis >gi|4538920|emb|CAB39656.1| nitrogen fixation like protein thaliana] >gi|7269442|emb|CAB79446.1| nitrogen fixation like
  misc_feature (1)..(128): Homolog of NCBI NO: 18416645 NR Description: nitrogen fixation protein, putative (NifU) thaliana] >gi|28207820|emb|CAD55560.1| NFU3 protein [Arabidopsis
  misc_feature (1)..(128): Homolog of NCBI NO: 21554503 NR Description: nitrogen fixation like protein [Arabidopsis
  misc_feature (174)..(625): Homolog of NCBI NO: 31234929 NR Description: ENSANGP00000011982 [Anopheles gambiae]
MSDGGNVALHEIDGNIVRVKLQGACGSCPSSTMTMKMGIERRLMEKIPEIVAVEALPDEETGLELNEENIEKVLEEIRPYLIGTADGSLDLVEIEDPIVKIRITGPAAGVMTVRVAVTQKLREKIPSIAKKSPYYLLESRDLFDSSIVFIMSRYFSFFFLALFLHYRIIVASPFEGFDAEEDDVTDDSSHLLHHSLPPPLLTQSHSSLSDPDPEPEPSSAECKSDLITESDLEHQSDSKTPSSTPFEYWDEDEFEGLPVEIETLESPLITENGTHADPKTPDLKTSSEAQGDTNDQTKKKKSYAVEIACVCFLIALAINYFVGKRENESLALAWAAKFASKDTIFQKNFSMLGVSELEDSPLLLKEALNVFKFYASGRRYCHGLLATMELKSRHDLISRVFNLVVPCKDEITFEVYMNEETMDHVVFAMTKKKAAKTMQKEMRDLQRFAGIVSPPAGRKWVSEEFALISESKEVAADLITDTVLDQVFGDKAVDKYGKNFMSMHISDQHPGKHKKMMLFKFSLPDAKHMDDIVRLVALIPYYIDLVGRYRLSSQARNKTESGRQKAAEEAYKELHNARQEALQKKKAEKKKMMEEAEAKMSAEVIRKKEAKERARQVKKAVPKMKMSRSH

SEQ ID NO: 99795 - protein, 598 aa, Arabidopsis thaliana
  peptide (1)..(598): Ceres Seq. ID no. 13603638
  misc_feature (119)..(598): Homolog of NCBI NO: 18423086 NR Description: expressed protein [Arabidopsis thaliana] unknown protein [Arabidopsis thaliana]
  misc_feature (119)..(598): Homolog of NCBI NO: 15233789 NR Description: expressed protein [Arabidopsis thaliana]
  misc_feature (119)..(598): Homolog of NCBI NO: 20465626 NR Description: unknown protein [Arabidopsis thaliana]
  misc_feature (119)..(598): Homolog of NCBI NO: 21595706 NR Description: unknown [Arabidopsis thaliana]
  misc_feature (1)..(97): Homolog of NCBI NO: 18423084 NR Description: expressed protein [Arabidopsis thaliana] unknown protein [Arabidopsis thaliana] AT5g49940/K9P8_8 [Arabidopsis thaliana]
  misc_feature (1)..(96): Homolog of NCBI NO: 30698492 NR Description: NifU1 [Oryza sativa (japonica cultivar-group)]
  misc_feature (1)..(96): Homolog of NCBI NO: 7485833 NR Description: hypothetical protein F20B18.20 - Arabidopsis >gi|4538920|emb|CAB39656.1| nitrogen fixation like protein thaliana] >gi|7269442|emb|CAB79446.1| nitrogen fixation like
  misc_feature (1)..(96): Homolog of NCBI NO: 18416645 NR Description: nitrogen fixation protein, putative (NifU) thaliana] >gi|28207820|emb|CAD55560.1| NFU3 protein [Arabidopsis
  misc_feature (1)..(96): Homolog of NCBI NO: 21554503 NR Description: nitrogen fixation like protein [Arabidopsis
  misc_feature (142)..(593): Homolog of NCBI NO: 31234929 NR Description: ENSANGP00000011982 [Anopheles gambiae]
MTMKMGIERRLMEKIPEIVAVEALPDEETGLELNEENIEKVLEEIRPYLIGTADGSLDLVEIEDPIVKIRITGPAAGVMTVRVAVTQKLREKIPSIAKKSPYYLLESRDLFDSSIVFIMSRYFSFFFLALFLHYRIIVASPFEGFDAEEDDVTDDSSHLLHHSLPPPLLTQSHSSLSDPDPEPEPSSAECKSDLITESDLEHQSDSKTPSSTPFEYWDEDEFEGLPVEIETLESPLITENGTHADPKTPDLKTSSEAQGDTNDQTKKKKSYAVEIACVCFLIALAINYFVGKRENESLALAWAAKFASKDTIFQKNFSMLGVSELEDSPLLLKEALNVFKFYASGRRYCHGLLATMELKSRHDLISRVFNLVVPCKDEITFEVYMNEETMDHVVFAMTKKKAAKTMQKEMRDLQRFAGIVSPPAGRKWVSEEFALISESKEVAADLITDTVLDQVFGDKAVDKYGKNFMSMHISDQHPGKHKKMMLFKFSLPDAKHMDDIVRLVALIPYYIDLVGRYRLSSQARNKTESGRQKAAEEAYKELHNARQEALQKKKAEKKKMMEEAEAKMSAEVIRKKEAKERARQVKKAVPKMKMSRSH

SEQ ID NO: 99796 - DNA, 1511 bp, Arabidopsis thaliana
  misc_feature (1)..(1511): Ceres Seq. ID no. 13603647
  misc_feature: MA Experiment ID: 108434 Result: Up-regulated in Transcription
  misc_feature: MA Experiment 108434 PARAMETER Experiment Name: At_Root_Tips_cDNA_P Parameter: Tissue Value: Root Tips
  misc_feature: MA Experiment ID: 108462 Result: Up-regulated in Transcription
  misc_feature: MA Experiment 108462 PARAMETER Experiment Name: At_Germinating_Seeds_cDNA_P Parameter: Age (day) Value: 2 vs. 0
  misc_feature: MA Experiment 108462 PARAMETER Experiment Name: At_Germinating_Seeds_cDNA_P Parameter: Tissue Value: Germinating Seeds
  misc_feature: MA Experiment ID: 108463 Result: Up-regulated in Transcription
  misc_feature: MA Experiment 108463 PARAMETER Experiment Name: At_Germinating_Seeds_cDNA_P Parameter: Age (day) Value: 3 vs. 0
  misc_feature: MA Experiment 108463 PARAMETER Experiment Name: At_Germinating_Seeds_cDNA_P Parameter: Tissue Value: Germinating Seeds
  misc_feature: MA Experiment ID: 108464 Result: Up-regulated in Transcription
  misc_feature: MA Experiment 108464 PARAMETER Experiment Name: At_Germinating_Seeds_cDNA_P Parameter: Age (day) Value: 4 vs. 0
  misc_feature: MA Experiment 108464 PARAMETER Experiment Name: At_Germinating_Seeds_cDNA_P Parameter: Tissue Value: Germinating Seeds
  misc_feature: MA Experiment ID: 108576 Result: Down-regulated in Transcription
  misc_feature: MA Experiment 108576 PARAMETER Experiment Name: At_42deg_Heat_cDNA_P Parameter: Temperature (deg C) Value: 42 vs. 22
  misc_feature: MA Experiment 108576 PARAMETER Experiment Name: At_42deg_Heat_cDNA_P Parameter: Timepoint (hr) Value: 1
  misc_feature: MA Experiment 108576 PARAMETER Experiment Name: At_42deg_Heat_cDNA_P Parameter: Tissue Value: Aerial
  misc_feature: MA Experiment ID: 108577 Result: Down-regulated in Transcription
  misc_feature: MA Experiment 108577 PARAMETER Experiment Name: At_42deg_Heat_cDNA_P Parameter: Temperature (deg C) Value: 42 vs. 22
  misc_feature: MA Experiment 108577 PARAMETER Experiment Name: At_42deg_Heat_cDNA_P Parameter: Timepoint (hr) Value: 6
  misc_feature: MA Experiment 108577 PARAMETER Experiment Name: At_42deg_Heat_cDNA_P Parameter: Tissue Value: Aerial
  misc_feature: MA Experiment ID: 108595 Result: Down-regulated in Transcription
  misc_feature: MA Experiment 108595 PARAMETER Experiment Name: At_Ler-pi_Ovule_cDNA_P Parameter: Plant Line Value: null
  misc_feature: MA Experiment ID: 20000111 Result: Down-regulated in Transcription
  misc_feature: MA Experiment 20000111 PARAMETER Experiment Name: At_42deg_Heat_cDNA_P Parameter: Temperature (deg C) Value: 42 vs. 22
  misc_feature: MA Experiment 20000111 PARAMETER Experiment Name: At_42deg_Heat_cDNA_P Parameter: Timepoint (hr) Value: 6
  misc_feature: MA Experiment 20000111 PARAMETER Experiment Name: At_42deg_Heat_cDNA_P Parameter: Tissue Value: Aerial
  misc_feature: MA Experiment ID: 20000112 Result: Down-regulated in Transcription
  misc_feature: MA Experiment 20000112 PARAMETER Experiment Name: At_42deg_Heat_cDNA_P Parameter: Temperature (deg C) Value: 42 vs. 22
  misc_feature: MA Experiment 20000112 PARAMETER Experiment Name: At_42deg_Heat_cDNA_P Parameter: Timepoint (hr) Value: 2
  misc_feature: MA Experiment 20000112 PARAMETER Experiment Name: At_42deg_Heat_cDNA_P Parameter: Tissue Value: Aerial
  misc_feature: MA Experiment ID: 20000113 Result: Down-regulated in Transcription
  misc_feature: MA Experiment 20000113 PARAMETER Experiment Name: At_42deg_Heat_cDNA_P Parameter: Temperature (deg C) Value: 42 vs. 22
  misc_feature: MA Experiment 20000113 PARAMETER Experiment Name: At_42deg_Heat_cDNA_P Parameter: Timepoint (hr) Value: 8
  misc_feature: MA Experiment 20000113 PARAMETER Experiment Name: At_42deg_Heat_cDNA_P Parameter: Tissue Value: Aerial
  misc_feature: MA Experiment ID: 20000171 Result: Down-regulated in Transcription
  misc_feature: MA Experiment 20000171 PARAMETER Experiment Name: At_42deg_Heat_P Parameter: Age (day) Value: 14
  misc_feature: MA Experiment 20000171 PARAMETER Experiment Name: At_42deg_Heat_P Parameter: Organism Value: A. thaliana
  misc_feature: MA Experiment 20000171 PARAMETER Experiment Name: At_42deg_Heat_P Parameter: Plant Line Value: WS
  misc_feature: MA Experiment 20000171 PARAMETER Experiment Name: At_42deg_Heat_P Parameter: Temperature (deg C) Value: 42 vs. 22
  misc_feature: MA Experiment 20000171 PARAMETER Experiment Name: At_42deg_Heat_P Parameter: Timepoint (hr) Value: 1
  misc_feature: MA Experiment 20000171 PARAMETER Experiment Name: At_42deg_Heat_P Parameter: Tissue Value: Aerial
  misc_feature: MA Experiment ID: 20000173 Result: Down-regulated in Transcription
  misc_feature: MA Experiment 20000173 PARAMETER Experiment Name: At_42deg_Heat_P Parameter: Age (day) Value: 14
  misc_feature: MA Experiment 20000173 PARAMETER Experiment Name: At_42deg_Heat_P Parameter: Organism Value: A. thaliana
  misc_feature: MA Experiment 20000173 PARAMETER Experiment Name: At_42deg_Heat_P Parameter: Plant Line Value: WS
  misc_feature: MA Experiment 20000173 PARAMETER Experiment Name: At_42deg_Heat_P Parameter: Temperature (deg C) Value: 42 vs. 22
  misc_feature: MA Experiment 20000173 PARAMETER Experiment Name: At_42deg_Heat_P Parameter: Timepoint (hr) Value: 6
  misc_feature: MA Experiment 20000173 PARAMETER Experiment Name: At_42deg_Heat_P Parameter: Tissue Value: Aerial
  misc_feature: MA Experiment ID: 20000180 Result: Up-regulated in Transcription
  misc_feature: MA Experiment 20000180 PARAMETER Experiment Name: At_Germinating_Seeds_P Parameter: Age (hr) Value: 24 vs. 0
  misc_feature: MA Experiment 20000180 PARAMETER Experiment Name: At_Germinating_Seeds_P Parameter: Tissue Value: Germinating Seeds
  misc_feature: MA Experiment ID: 20000794 Result: Up-regulated in Transcription
  misc_feature: MA Experiment 20000794 PARAMETER Experiment Name: At_Petals_P Parameter: Age (day) Value: 23-25 days
  misc_feature: MA Experiment 20000794 PARAMETER Experiment Name: At_Petals_P Parameter: Plant Line Value: WS
  misc_feature: MA Experiment 20000794 PARAMETER Experiment Name: At_Petals_P Parameter: Tissue Value: Petals vs. Whole plant
  misc_feature: MA Experiment ID: 20001905 Result: Down-regulated in Transcription
  misc_feature: MA Experiment 20001905 PARAMETER Experiment Name: At_Drought_Reproduction_P Parameter: Age (day) Value: 40
  misc_feature: MA Experiment 20001905 PARAMETER Experiment Name: At_Drought_Reproduction_P Parameter: Organism Value: A. thaliana
  misc_feature: MA Experiment 20001905 PARAMETER Experiment Name: At_Drought_Reproduction_P Parameter: Plant Line Value: WS
  misc_feature: MA Experiment 20001905 PARAMETER Experiment Name: At_Drought_Reproduction_P Parameter: Timepoint (day) Value: 10
  misc_feature: MA Experiment 20001905 PARAMETER Experiment Name: At_Drought_Reproduction_P Parameter: Tissue Value: Rosettes
  misc_feature: MA Experiment 20001905 PARAMETER Experiment Name: At_Drought_Reproduction_P Parameter: Treatment Value: Drought vs. No Drought
tttgattatctgagagagagagagaagaaacttgttgaaacaaaatcaacaacaacttatagaagaccaaaaaaagattcataggatcttttgcttgacaatgaaagaaggaaaggatgggtttgttcgagcagatcagattgatctaaaaagcttagacgagcaactagagagacacttaagcagagctttgactttagagaagaacaagaagaaagatgaagaagacacaaccgccgtcgccatcggtggctctgcttcttcttcccctgtcactctaaacggcggcggatttgttggcaagaggaaacagagacttgagtgggagatcgatccttctaaacttatcatcaagactgttcttgctcgtggcacttttggtaccgttcatcgtggtatctacgacggtcaagatgttgccgtgaagttgcttgattggggtgaagaaggtcatagatcagaagctgagattgtgtctttgagagctgattttgctcaggaggttgctgtttggcataaattggatcatcctaatgtcaccaagtttataggagcaacaatgggtgcatcagggttacagttgcaaacagagagtggtccattagctatgccaaacaatatatgttgtgttgttgttgaatatcttccaggtggtgctttaaaatcttacctgatcaagaacagaagaagaaaactaacatttaaaattgttgttcagctcgctcttgatctcgctagagggttgagttaccttcattcgcagaagattgttcaccgagatgtaaagacagagaatatgttgttagacaaaacccggactgttaaaatcgcagattttggagttgcgagagttgaagcatctaaccctaatgacatgacaggagagactggcacacttggctacatggcgcctgaggttctcaatggaaacccgtataatcgaaaatgcgatgtatacagtttcgggatctgcttatgggagatatattgctgtgacatgccataccctgaccttactttctctgaggtcacttcagccgtcgtccgccagaacctgagacccgatataccgaggtgttgcccgagcgcacttgcagctgtgatgaagcgatgttgggatgcaaatccggacaagagaccggagatggatgaggttgtaccaatgttggagagtattgacacaaccaagggaggagggatgattcctaacgaccagcaacagggttgcctatgcttccgaaggaaacgtggtccttaattcccaaagaccaatctaagatcattcaaaactcaagattcgtgtccttgcttcttttctttttctttttataatccagaaggaaaaaaaatgggaaggcttgttagggatctaatggttgctaaaatttacgtaaagagtatgatttggtttccatattcttcaacatttcttgttttgctctatttgtgagagttgcttattaaatatttatggtcacgtatatcatcatctctaatcatatatttgatat

SEQ ID NO: 99797 - protein, 385 aa, Arabidopsis thaliana
  peptide (1)..(385): Ceres Seq. ID no. 13603648
  misc_feature (82)..(356): Pfam Name: Protein kinase domain Pfam Description: Protein kinase domain
  misc_feature (1)..(385): Homolog of NCBI NO: 15240597 NR Description: protein kinase, putative [Arabidopsis thaliana]
  misc_feature (1)..(385): Homolog of NCBI NO: 21553402 NR Description: protein kinase [Arabidopsis thaliana]
  misc_feature (70)..(385): Homolog of NCBI NO: 15232131 NR Description: protein kinase, putative [Arabidopsis thaliana] putative protein kinase [Arabidopsis thaliana]
  misc_feature (4)..(43): Homolog of NCBI NO: 15232131 NR Description: protein kinase, putative [Arabidopsis thaliana] putative protein kinase [Arabidopsis thaliana]
  misc_feature (1)..(385): Homolog of NCBI NO: 29367399 NR Description: putative protein kinase [Oryza sativa (japonica
  misc_feature (4)..(385): Homolog of NCBI NO: 34911620 NR Description: protein kinase -like [Oryza sativa (japonica
  misc_feature (70)..(385): Homolog of NCBI NO: 18403507 NR Description: protein kinase, putative [Arabidopsis thaliana]
  misc_feature (5)..(42): Homolog of NCBI NO: 18403507 NR Description: protein kinase, putative [Arabidopsis thaliana]
  misc_feature (70)..(385): Homolog of NCBI NO: 15233574 NR Description: protein kinase, putative [Arabidopsis thaliana]
  misc_feature (51)..(385): Homolog of NCBI NO: 15229398 NR Description: protein kinase, putative (ATMRK1) [Arabidopsis
MKEGKDGFVRADQIDLKSLDEQLERHLSRALTLEKNKKKDEEDTTAVAIGGSASSSPVTLNGGGFVGKRKQRLEWEIDPSKLIIKTVLARGTFGTVHRGIYDGQDVAVKLLDWGEEGHRSEAEIVSLRADFAQEVAVWHKLDHPNVTKFIGATMGASGLQLQTESGPLAMPNNICCVVVEYLPGGALKSYLIKNRRRKLTFKIVVQLALDLARGLSYLHSQKIVHRDVKTENMLLDKTRTVKIADFGVARVEASNPNDMTGETGTLGYMAPEVLNGNPYNRKCDVYSFGICLWEIYCCDMPYPDLTFSEVTSAVVRQNLRPDIPRCCPSALAAVMKRCWDANPDKRPEMDEVVPMLESIDTTKGGGMIPNDQQQGCLCFRRKRGP

SEQ ID NO: 99798 - protein, 232 aa, Arabidopsis thaliana; identical to SEQ ID NO: 42195
  peptide (1)..(232): Ceres Seq. ID no. 13603649
  misc_feature (1)..(203): Pfam Name: Protein kinase domain Pfam Description: Protein kinase domain
  misc_feature (1)..(232): Homolog of NCBI NO: 15240597 NR Description: protein kinase, putative [Arabidopsis thaliana]
  misc_feature (1)..(232): Homolog of NCBI NO: 21553402 NR Description: protein kinase [Arabidopsis thaliana]
  misc_feature (1)..(232): Homolog of NCBI NO: 15232131 NR Description: protein kinase, putative [Arabidopsis thaliana] putative protein kinase [Arabidopsis thaliana]
  misc_feature (1)..(232): Homolog of NCBI NO: 29367399 NR Description: putative protein kinase [Oryza sativa (japonica
  misc_feature (1)..(232): Homolog of NCBI NO: 34911620 NR Description: protein kinase -like [Oryza sativa (japonica
  misc_feature (1)..(232): Homolog of NCBI NO: 18403507 NR Description: protein kinase, putative [Arabidopsis thaliana]
  misc_feature (1)..(232): Homolog of NCBI NO: 15233574 NR Description: protein kinase, putative [Arabidopsis thaliana]
  misc_feature (1)..(232): Homolog of NCBI NO: 15229398 NR Description: protein kinase, putative (ATMRK1) [Arabidopsis
  misc_feature (1)..(232): Homolog of NCBI NO: 21554375 NR Description: ATMRK1 [Arabidopsis thaliana]
  misc_feature (1)..(231): Homolog of NCBI NO: 14626298 NR Description: putative protein kinase [Oryza sativa (japonica

SEQ ID NO: 99799 - protein, 216 aa, Arabidopsis thaliana; identical to SEQ ID NO: 42196
  peptide (1)..(216): Ceres Seq. ID no. 13603650
  misc_feature (1)..(187): Pfam Name: Protein kinase domain Pfam Description: Protein kinase domain
  misc_feature (1)..(216): Homolog of NCBI NO: 15240597 NR Description: protein kinase, putative [Arabidopsis thaliana]
  misc_feature (1)..(216): Homolog of NCBI NO: 21553402 NR Description: protein kinase [Arabidopsis thaliana]
  misc_feature (1)..(216): Homolog of NCBI NO: 15232131 NR Description: protein kinase, putative [Arabidopsis thaliana] putative protein kinase [Arabidopsis thaliana]
  misc_feature (1)..(216): Homolog of NCBI NO: 29367399 NR Description: putative protein kinase [Oryza sativa (japonica
  misc_feature (1)..(216): Homolog of NCBI NO: 34911620 NR Description: protein kinase -like [Oryza sativa (japonica
  misc_feature (1)..(216): Homolog of NCBI NO: 18403507 NR Description: protein kinase, putative [Arabidopsis thaliana]
  misc_feature (1)..(216): Homolog of NCBI NO: 15233574 NR Description: protein kinase, putative [Arabidopsis thaliana]
  misc_feature (1)..(216): Homolog of NCBI NO: 15229398 NR Description: protein kinase, putative (ATMRK1) [Arabidopsis
  misc_feature (1)..(216): Homolog of NCBI NO: 21554375 NR Description: ATMRK1 [Arabidopsis thaliana]
  misc_feature (1)..(215): Homolog of NCBI NO: 14626298 NR Description: putative protein kinase [Oryza sativa (japonica

SEQ ID NO: 99800 - DNA, 877 bp, Arabidopsis thaliana
  misc_feature (1)..(877): Ceres Seq. ID no. 13603655
  misc_feature: MA Experiment ID: 108434 Result: Down-regulated in Transcription
  misc_feature: MA Experiment 108434 PARAMETER Experiment Name: At_Root_Tips_cDNA_P Parameter: Tissue Value: Root Tips
  misc_feature: MA Experiment ID: 108435 Result: Down-regulated in Transcription
  misc_feature: MA Experiment 108435 PARAMETER Experiment Name: At_stm_Mutants_cDNA_P Parameter: Plant Line Value: wt Landsburg vs stm
  misc_feature: MA Experiment 108435 PARAMETER Experiment Name: At_stm_Mutants_cDNA_P Parameter: Tissue Value: Shoot Apical Meristem Region
  misc_feature: MA Experiment ID: 108461 Result: Down-regulated in Transcription
  misc_feature: MA Experiment 108461 PARAMETER Experiment Name: At_Germinating_Seeds_cDNA_P Parameter: Age (day) Value: 1 vs. 0
  misc_feature: MA Experiment 108461 PARAMETER Experiment Name: At_Germinating_Seeds_cDNA_P Parameter: Tissue Value: Germinating Seeds
  misc_feature: MA Experiment ID: 108462 Result: Down-regulated in Transcription
  misc_feature: MA Experiment 108462 PARAMETER Experiment Name: At_Germinating_Seeds_cDNA_P Parameter: Age (day) Value: 2 vs. 0
  misc_feature: MA Experiment 108462 PARAMETER Experiment Name: At_Germinating_Seeds_cDNA_P Parameter: Tissue Value: Germinating Seeds
  misc_feature: MA Experiment ID: 108463 Result: Down-regulated in Transcription
  misc_feature: MA Experiment 108463 PARAMETER Experiment Name: At_Germinating_Seeds_cDNA_P Parameter: Age (day) Value: 3 vs. 0
  misc_feature: MA Experiment 108463 PARAMETER Experiment Name: At_Germinating_Seeds_cDNA_P Parameter: Tissue Value: Germinating Seeds
  misc_feature: MA Experiment ID: 108464 Result: Down-regulated in Transcription
  misc_feature: MA Experiment 108464 PARAMETER Experiment Name: At_Germinating_Seeds_cDNA_P Parameter: Age (day) Value: 4 vs. 0
  misc_feature: MA Experiment 108464 PARAMETER Experiment Name: At_Germinating_Seeds_cDNA_P Parameter: Tissue Value: Germinating Seeds
  misc_feature: MA Experiment ID: 108469 Result: Up-regulated in Transcription
  misc_feature: MA Experiment ID: 108474 Result: Down-regulated in Transcription
  misc_feature: MA Experiment 108474 PARAMETER Experiment Name: At_Drought_Flowers_cDNA_P Parameter: Timepoint (hr) Value: null
  misc_feature: MA Experiment 108474 PARAMETER Experiment Name: At_Drought_Flowers_cDNA_P Parameter: Treatment Value: Drought vs. No Drought
  misc_feature: MA Experiment ID: 108488 Result: Up-regulated in Transcription
  misc_feature: MA Experiment ID: 108501 Result: Up-regulated in Transcription
  misc_feature: MA Experiment 108501 PARAMETER Experiment Name: At_ap2_floral_buds_cDNA_P Parameter: Plant Line Value: ap2 (Ler.)
  misc_feature: MA Experiment 108501 PARAMETER Experiment Name: At_ap2_floral_buds_cDNA_P Parameter: Tissue Value: Closed Flower
  misc_feature: MA Experiment ID: 108569 Result: Up-regulated in Transcription
  misc_feature: MA Experiment 108569 PARAMETER Experiment Name: At_0.001%_MeJA__cDNA_P Parameter: Timepoint (hr) Value: 6
  misc_feature: MA Experiment 108569 PARAMETER Experiment Name: At_0.001%_MeJA__cDNA_P Parameter: Tissue Value: Aerial
  misc_feature: MA Experiment 108569 PARAMETER Experiment Name: At_0.001%_MeJA__cDNA_P Parameter: Treatment Value: 0.001% MeJA vs. No Treatment
  misc_feature: MA Experiment ID: 108573 Result: Up-regulated in Transcription
  misc_feature: MA Experiment 108573 PARAMETER Experiment Name: At_Drought_cDNA_P Parameter: Timepoint (hr) Value: 6
  misc_feature: MA Experiment 108573 PARAMETER Experiment Name: At_Drought_cDNA_P Parameter: Tissue Value: Aerial
  misc_feature: MA Experiment 108573 PARAMETER Experiment Name: At_Drought_cDNA_P Parameter: Treatment Value: Drought vs. No Drought
  misc_feature: MA Experiment ID: 108585 Result: Up-regulated in Transcription
  misc_feature: MA Experiment 108585 PARAMETER Experiment Name: At_5mM_NaNP_cDNA_P Parameter: Timepoint (hr) Value: 6
  misc_feature: MA Experiment 108585 PARAMETER Experiment Name: At_5mM_NaNP_cDNA_P Parameter: Tissue Value: Aerial
  misc_feature: MA Experiment 108585 PARAMETER Experiment Name: At_5mM_NaNP_cDNA_P Parameter: Treatment Value: null
  misc_feature: MA Experiment ID: 108595 Result: Down-regulated in Transcription
  misc_feature: MA Experiment 108595 PARAMETER Experiment Name: At_Ler-pi_Ovule_cDNA_P Parameter: Plant Line Value: null
  misc_feature: MA Experiment ID: 108605 Result: Up-regulated in Transcription
  misc_feature: MA Experiment 108605 PARAMETER Experiment Name: At_100uM_ABA_cDNA_P Parameter: Timepoint (hr) Value: 6
  misc_feature: MA Experiment 108605 PARAMETER Experiment Name: At_100uM_ABA_cDNA_P Parameter: Tissue Value: Aerial
  misc_feature: MA Experiment 108605 PARAMETER Experiment Name: At_100uM_ABA_cDNA_P Parameter: Treatment Value: 100uM ABA vs. No Treatment
  misc_feature: MA Experiment ID: 108668 Result: Up-regulated in Transcription
  misc_feature: MA Experiment 108668 PARAMETER Experiment Name: At_2mM_SA_cDNA_P Parameter: Plant Line Value: WS
  misc_feature: MA Experiment 108668 PARAMETER Experiment Name: At_2mM_SA_cDNA_P Parameter: Timepoint (hr) Value: 6
  misc_feature: MA Experiment 108668 PARAMETER Experiment Name: At_2mM_SA_cDNA_P Parameter: Treatment Value: 2mM SA vs. No Treatment
  misc_feature: MA Experiment ID: 20000030 Result: Up-regulated in Transcription
  misc_feature: MA Experiment 20000030 PARAMETER Experiment Name: At_CS6630_Roots_cDNA_P Parameter: Plant Line Value: CS6630 vs. WS
  misc_feature: MA Experiment 20000030 PARAMETER Experiment Name: At_CS6630_Roots_cDNA_P Parameter: Tissue Value: Roots
  misc_feature: MA Experiment ID: 20000069 Result: Up-regulated in Transcription
  misc_feature: MA Experiment 20000069 PARAMETER Experiment Name: At_100uM_ABA_Mutants_cDNA_P Parameter: Plant Line Value: CS23
  misc_feature: MA Experiment 20000069 PARAMETER Experiment Name: At_100uM_ABA_Mutants_cDNA_P Parameter: Timepoint (hr) Value: 6
  misc_feature: MA Experiment 20000069 PARAMETER Experiment Name: At_100uM_ABA_Mutants_cDNA_P Parameter: Tissue Value: Aerial
  misc_feature: MA Experiment 20000069 PARAMETER Experiment Name: At_100uM_ABA_Mutants_cDNA_P Parameter: Treatment Value: 100uM ABA vs. No Treatment
  misc_feature: MA Experiment ID: 20000070 Result: Up-regulated in Transcription
  misc_feature: MA Experiment 20000070 PARAMETER Experiment Name: At_100uM_ABA_Mutants_cDNA_P Parameter: Plant Line Value: CS24
  misc_feature: MA Experiment 20000070 PARAMETER Experiment Name: At_100uM_ABA_Mutants_cDNA_P Parameter: Timepoint (hr) Value: 6
  misc_feature: MA Experiment 20000070 PARAMETER Experiment Name: At_100uM_ABA_Mutants_cDNA_P Parameter: Tissue Value: Aerial
  misc_feature: MA Experiment 20000070 PARAMETER Experiment Name: At_100uM_ABA_Mutants_cDNA_P Parameter: Treatment Value: 100uM ABA vs. No Treatment
  misc_feature: MA Experiment ID: 20000071 Result: Up-regulated in Transcription
  misc_feature: MA Experiment 20000071 PARAMETER Experiment Name: At_100uM_ABA_Mutants_cDNA_P Parameter: Plant Line Value: CS8104
  misc_feature: MA Experiment 20000071 PARAMETER Experiment Name: At_100uM_ABA_Mutants_cDNA_P Parameter: Timepoint (hr) Value: 6
  misc_feature: MA Experiment 20000071 PARAMETER Experiment Name: At_100uM_ABA_Mutants_cDNA_P Parameter: Tissue Value: Aerial
  misc_feature: MA Experiment 20000071 PARAMETER Experiment Name: At_100uM_ABA_Mutants_cDNA_P Parameter: Treatment Value: 100uM ABA vs. No Treatment
  misc_feature: MA Experiment ID: 20000072 Result: Up-regulated in Transcription
  misc_feature: MA Experiment 20000072 PARAMETER Experiment Name: At_100uM_ABA_Mutants_cDNA_P Parameter: Plant Line Value: CS8105
  misc_feature: MA Experiment 20000072 PARAMETER Experiment Name: At_100uM_ABA_Mutants_cDNA_P Parameter: Timepoint (hr) Value: 6
  misc_feature: MA Experiment 20000072 PARAMETER Experiment Name: At_100uM_ABA_Mutants_cDNA_P Parameter: Tissue Value: Aerial
  misc_feature: MA Experiment 20000072 PARAMETER Experiment Name: At_100uM_ABA_Mutants_cDNA_P Parameter: Treatment Value: 100uM ABA vs. No Treatment
  misc_feature: MA Experiment ID: 20000087 Result: Up-regulated in Transcription
  misc_feature: MA Experiment 20000087 PARAMETER Experiment Name: At_100uM_ABA_Mutants_cDNA_P Parameter: Plant Line Value: WS
  misc_feature: MA Experiment 20000087 PARAMETER Experiment Name: At_100uM_ABA_Mutants_cDNA_P Parameter: Timepoint (hr) Value: 6
  misc_feature: MA Experiment 20000087 PARAMETER Experiment Name: At_100uM_ABA_Mutants_cDNA_P Parameter: Tissue Value: Aerial
  misc_feature: MA Experiment 20000087 PARAMETER Experiment Name: At_100uM_ABA_Mutants_cDNA_P Parameter: Treatment Value: 100uM ABA vs. No Treatment
  misc_feature: MA Experiment ID: 20000090 Result: Up-regulated in Transcription
  misc_feature: MA Experiment ID: 20000111 Result: Down-regulated in Transcription
  misc_feature: MA Experiment 20000111 PARAMETER Experiment Name: At_42deg_Heat_cDNA_P Parameter: Temperature (deg C) Value: 42 vs. 22
  misc_feature: MA Experiment 20000111 PARAMETER Experiment Name: At_42deg_Heat_cDNA_P Parameter: Timepoint (hr) Value: 6
  misc_feature: MA Experiment 20000111 PARAMETER Experiment Name: At_42deg_Heat_cDNA_P Parameter: Tissue Value: Aerial
  misc_feature: MA Experiment ID: 20000113 Result: Down-regulated in Transcription
  misc_feature: MA Experiment 20000113 PARAMETER Experiment Name: At_42deg_Heat_cDNA_P Parameter: Temperature (deg C) Value: 42 vs. 22
  misc_feature: MA Experiment 20000113 PARAMETER Experiment Name: At_42deg_Heat_cDNA_P Parameter: Timepoint (hr) Value: 8
  misc_feature: MA Experiment 20000113 PARAMETER Experiment Name: At_42deg_Heat_cDNA_P Parameter: Tissue Value: Aerial
  misc_feature: MA Experiment ID: 20000117 Result: Up-regulated in Transcription
  misc_feature: MA Experiment 20000117 PARAMETER Experiment Name: At_100uM_ABA_Mutants_cDNA_P Parameter: Plant Line Value: Columbia
  misc_feature: MA Experiment 20000117 PARAMETER Experiment Name: At_100uM_ABA_Mutants_cDNA_P Parameter: Timepoint (hr) Value: 6
  misc_feature: MA Experiment 20000117 PARAMETER Experiment Name: At_100uM_ABA_Mutants_cDNA_P Parameter: Tissue Value: Aerial
  misc_feature: MA Experiment 20000117 PARAMETER Experiment Name: At_100uM_ABA_Mutants_cDNA_P Parameter: Treatment Value: 100uM ABA vs. No Treatment
  misc_feature: MA Experiment ID: 20000144 Result: Down-regulated in Transcription
  misc_feature: MA Experiment 20000144 PARAMETER Experiment Name: At_42deg_Heat_cDNA_P Parameter: Temperature (deg C) Value: 42 vs. 22
  misc_feature: MA Experiment 20000144 PARAMETER Experiment Name: At_42deg_Heat_cDNA_P Parameter: Timepoint (hr) Value: 1
  misc_feature: MA Experiment 20000144 PARAMETER Experiment Name: At_42deg_Heat_cDNA_P Parameter: Tissue Value: Aerial
  misc_feature: MA Experiment ID: 20000171 Result: Down-regulated in Transcription
  misc_feature: MA Experiment 20000171 PARAMETER Experiment Name: At_42deg_Heat_P Parameter: Age (day) Value: 14
  misc_feature: MA Experiment 20000171 PARAMETER Experiment Name: At_42deg_Heat_P Parameter: Organism Value: A. thaliana
  misc_feature: MA Experiment 20000171 PARAMETER Experiment Name: At_42deg_Heat_P Parameter: Plant Line Value: WS
  misc_feature: MA Experiment 20000171 PARAMETER Experiment Name: At_42deg_Heat_P Parameter: Temperature (deg C) Value: 42 vs. 22
  misc_feature: MA Experiment 20000171 PARAMETER Experiment Name: At_42deg_Heat_P Parameter: Timepoint (hr) Value: 1
  misc_feature: MA Experiment 20000171 PARAMETER Experiment Name: At_42deg_Heat_P Parameter: Tissue Value: Aerial
  misc_feature: MA Experiment ID: 20000173 Result: Down-regulated in Transcription
  misc_feature: MA Experiment 20000173 PARAMETER Experiment Name: At_42deg_Heat_P Parameter: Age (day) Value: 14
  misc_feature: MA Experiment 20000173 PARAMETER Experiment Name: At_42deg_Heat_P Parameter: Organism Value: A. thaliana
  misc_feature: MA Experiment 20000173 PARAMETER Experiment Name: At_42deg_Heat_P Parameter: Plant Line Value: WS
  misc_feature: MA Experiment 20000173 PARAMETER Experiment Name: At_42deg_Heat_P Parameter: Temperature (deg C) Value: 42 vs. 22
  misc_feature: MA Experiment 20000173 PARAMETER Experiment Name: At_42deg_Heat_P Parameter: Timepoint (hr) Value: 6
  misc_feature: MA Experiment 20000173 PARAMETER Experiment Name: At_42deg_Heat_P Parameter: Tissue Value: Aerial
  misc_feature: MA Experiment ID: 20000180 Result: Down-regulated in Transcription
  misc_feature: MA Experiment 20000180 PARAMETER Experiment Name: At_Germinating_Seeds_P Parameter: Age (hr) Value: 24 vs. 0
  misc_feature: MA Experiment 20000180 PARAMETER Experiment Name: At_Germinating_Seeds_P Parameter: Tissue Value: Germinating Seeds
  misc_feature: MA Experiment ID: 20000182 Result: Up-regulated in Transcription
  misc_feature: MA Experiment 20000182 PARAMETER Experiment Name: At_2mM_SA_P Parameter: Age (day) Value: 14
  misc_feature: MA Experiment 20000182 PARAMETER Experiment Name: At_2mM_SA_P Parameter: Organism Value: A. thaliana
  misc_feature: MA Experiment 20000182 PARAMETER Experiment Name: At_2mM_SA_P Parameter: Plant Line Value: WS
  misc_feature: MA Experiment 20000182 PARAMETER Experiment Name: At_2mM_SA_P Parameter: Timepoint (hr) Value: 6
  misc_feature: MA Experiment 20000182 PARAMETER Experiment Name: At_2mM_SA_P Parameter: Tissue Value: Aerial
  misc_feature: MA Experiment 20000182 PARAMETER Experiment Name: At_2mM_SA_P Parameter: Treatment Value: 2mM SA vs. No Treatment
  misc_feature: MA Experiment ID: 20000185 Result: Up-regulated in Transcription
  misc_feature: MA Experiment 20000185 PARAMETER Experiment Name: At_Roots__P Parameter: Age (day) Value: 7 vs. 21
  misc_feature: MA Experiment 20000185 PARAMETER Experiment Name: At_Roots__P Parameter: Organism Value: A. thaliana
  misc_feature: MA Experiment 20000185 PARAMETER Experiment Name: At_Roots__P Parameter: Tissue Value: Roots vs. Whole Plant
  misc_feature: MA Experiment ID: 20000213 Result: Up-regulated in Transcription
  misc_feature: MA Experiment 20000213 PARAMETER Experiment Name: At_4deg_Cold_P Parameter: Timepoint (hr) Value: 2
  misc_feature: MA Experiment ID: 20000227 Result: Down-regulated in Transcription
  misc_feature: MA Experiment 20000227 PARAMETER Experiment Name: At_Root-Tips-vs-Tops_P Parameter: Tissue Value: Root Tips vs. Root Tops
  misc_feature: MA Experiment ID: 20000234 Result: Down-regulated in Transcription
  misc_feature: MA Experiment 20000234 PARAMETER Experiment Name: At_Siliques_P Parameter: Age (day) Value: 21
  misc_feature: MA Experiment 20000234 PARAMETER Experiment Name: At_Siliques_P Parameter: Organism Value: A. thaliana
  misc_feature: MA Experiment 20000234 PARAMETER Experiment Name: At_Siliques_P Parameter: Plant Line Value: WS
  misc_feature: MA Experiment 20000234 PARAMETER Experiment Name: At_Siliques_P Parameter: Tissue Value: Less Than 5mm Siliques vs. Whole Plant
  misc_feature: MA Experiment ID: 20000235 Result: Down-regulated in Transcription
  misc_feature: MA Experiment 20000235 PARAMETER Experiment Name: At_Siliques_P Parameter: Age (day) Value: 21
  misc_feature: MA Experiment 20000235 PARAMETER Experiment Name: At_Siliques_P Parameter: Organism Value: A. thaliana
  misc_feature: MA Experiment 20000235 PARAMETER Experiment Name: At_Siliques_P Parameter: Plant Line Value: WS
  misc_feature: MA Experiment 20000235 PARAMETER Experiment Name: At_Siliques_P Parameter: Tissue Value: 5-10mm Siliques vs. Whole Plant
  misc_feature: MA Experiment ID: 20000269 Result: Up-regulated in Transcription
  misc_feature: MA Experiment 20000269 PARAMETER Experiment Name: At_1mM_KNO3_L-vs-H_Roots_P Parameter: Age (day) Value: 7,10,12
  misc_feature: MA Experiment 20000269 PARAMETER Experiment Name: At_1mM_KNO3_L-vs-H_Roots_P Parameter: Organism Value: A. thaliana
  misc_feature: MA Experiment 20000269 PARAMETER Experiment Name: At_1mM_KNO3_L-vs-H_Roots_P Parameter: Plant Line Value: WS
  misc_feature: MA Experiment 20000269 PARAMETER Experiment Name: At_1mM_KNO3_L-vs-H_Roots_P Parameter: Timepoint (day) Value: 7,10,12
  misc_feature: MA Experiment 20000269 PARAMETER Experiment Name: At_1mM_KNO3_L-vs-H_Roots_P Parameter: Tissue Value: Roots
  misc_feature: MA Experiment 20000269 PARAMETER Experiment Name: At_1mM_KNO3_L-vs-H_Roots_P Parameter: Treatment Value: 1mM KNO3 vs. 50mM KNO3
  misc_feature: MA Experiment ID: 20000286 Result: Down-regulated in Transcription
  misc_feature: MA Experiment 20000286 PARAMETER Experiment Name: At_Open_Flower_P Parameter: Age (day) Value: 21
  misc_feature: MA Experiment 20000286 PARAMETER Experiment Name: At_Open_Flower_P Parameter: Plant Line Value: WS
  misc_feature: MA Experiment 20000286 PARAMETER Experiment Name: At_Open_Flower_P Parameter: Tissue Value: Half Open vs. Whole Plant
  misc_feature: MA Experiment ID: 20000438 Result: Down-regulated in Transcription
  misc_feature: MA Experiment 20000438 PARAMETER Experiment Name: At_Shoots__P Parameter: Age (day) Value: 14
  misc_feature: MA Experiment 20000438 PARAMETER Experiment Name: At_Shoots__P Parameter: Tissue Value: Shoots vs. Whole Plant
  misc_feature: MA Experiment ID: 20000453 Result: Up-regulated in Transcription
  misc_feature: MA Experiment 20000453 PARAMETER Experiment Name: At_100uM_ABA_P Parameter: Age (day) Value: 15
  misc_feature: MA Experiment 20000453 PARAMETER Experiment Name: At_100uM_ABA_P Parameter: Organism Value: A. thaliana
  misc_feature: MA Experiment 20000453 PARAMETER Experiment Name: At_100uM_ABA_P Parameter: Plant Line Value: WS
  misc_feature: MA Experiment 20000453 PARAMETER Experiment Name: At_100uM_ABA_P Parameter: Timepoint (hr) Value: 24
  misc_feature: MA Experiment 20000453 PARAMETER Experiment Name: At_100uM_ABA_P Parameter: Tissue Value: Aerial
  misc_feature: MA Experiment 20000453 PARAMETER Experiment Name: At_100uM_ABA_P Parameter: Treatment Value: 100uM ABA vs. No Treatment
  misc_feature: MA Experiment ID: 20000460 Result: Down-regulated in Transcription
  misc_feature: MA Experiment 20000460 PARAMETER Experiment Name: At_10percent_PEG_P Parameter: Age (day) Value: 12
  misc_feature: MA Experiment 20000460 PARAMETER Experiment Name: At_10percent_PEG_P Parameter: Organism Value: A. thaliana
  misc_feature: MA Experiment 20000460 PARAMETER Experiment Name: At_10percent_PEG_P Parameter: Plant Line Value: WS
  misc_feature: MA Experiment 20000460 PARAMETER Experiment Name: At_10percent_PEG_P Parameter: Timepoint (day) Value: 12
  misc_feature: MA Experiment 20000460 PARAMETER Experiment Name: At_10percent_PEG_P Parameter: Tissue Value: Whole Plant
  misc_feature: MA Experiment 20000460 PARAMETER Experiment Name: At_10percent_PEG_P Parameter: Treatment Value: 10percent PEG vs. No Treatment
  misc_feature: MA Experiment ID: 20000527 Result: Down-regulated in Transcription
  misc_feature: MA Experiment 20000527 PARAMETER Experiment Name: At_10percent_PEG_P Parameter: Age (day) Value: 20
  misc_feature: MA Experiment 20000527 PARAMETER Experiment Name: At_10percent_PEG_P Parameter: Organism Value: A. thaliana
  misc_feature: MA Experiment 20000527 PARAMETER Experiment Name: At_10percent_PEG_P Parameter: Plant Line Value: WS
  misc_feature: MA Experiment 20000527 PARAMETER Experiment Name: At_10percent_PEG_P Parameter: Timepoint (day) Value: 20
  misc_feature: MA Experiment 20000527 PARAMETER Experiment Name: At_10percent_PEG_P Parameter: Tissue Value: Whole Plant
  misc_feature: MA Experiment 20000527 PARAMETER Experiment Name: At_10percent_PEG_P Parameter: Treatment Value: 10percent PEG vs. No Treatment
  misc_feature: MA Experiment ID: 20000794 Result: Down-regulated in Transcription
  misc_feature: MA Experiment 20000794 PARAMETER Experiment Name: At_Petals_P Parameter: Age (day) Value: 23-25 days
  misc_feature: MA Experiment 20000794 PARAMETER Experiment Name: At_Petals_P Parameter: Plant Line Value: WS
  misc_feature: MA Experiment 20000794 PARAMETER Experiment Name: At_Petals_P Parameter: Tissue Value: Petals vs. Whole plant
  misc_feature: MA Experiment ID: 20001557 Result: Up-regulated in Transcription
  misc_feature: MA Experiment 20001557 PARAMETER Experiment Name: At_Drought_Soil_Dry_P Parameter: Age (day) Value: 27
  misc_feature: MA Experiment 20001557 PARAMETER Experiment Name: At_Drought_Soil_Dry_P Parameter: Organism Value: A. thaliana
  misc_feature: MA Experiment 20001557 PARAMETER Experiment Name: At_Drought_Soil_Dry_P Parameter: Plant Line Value: WS
  misc_feature: MA Experiment 20001557 PARAMETER Experiment Name: At_Drought_Soil_Dry_P Parameter: Post Timepoint (hr) Value: 3
  misc_feature: MA Experiment 20001557 PARAMETER Experiment Name: At_Drought_Soil_Dry_P Parameter: Post-Treatment Value: Re-Water vs. No Drought
  misc_feature: MA Experiment 20001557 PARAMETER Experiment Name: At_Drought_Soil_Dry_P Parameter: Timepoint (day) Value: 13
  misc_feature: MA Experiment 20001557 PARAMETER Experiment Name: At_Drought_Soil_Dry_P Parameter: Treatment Value: Drought vs. No Drought
  misc_feature: MA Experiment ID: 20001757 Result: Up-regulated in Transcription
  misc_feature: MA Experiment 20001757 PARAMETER Experiment Name: At_50mM_NH4NO3_L-to-H_P Parameter: Timepoint (hr) Value: 6
  misc_feature: MA Experiment 20001757 PARAMETER Experiment Name: At_50mM_NH4NO3_L-to-H_P Parameter: Tissue Value: Leaf
  misc_feature: MA Experiment 20001757 PARAMETER Experiment Name: At_50mM_NH4NO3_L-to-H_P Parameter: Treatment Value: 50mM NH4NO3 vs 100mM Mannitol
  misc_feature: MA Experiment ID: 20001905 Result: Up-regulated in Transcription
  misc_feature: MA Experiment 20001905 PARAMETER Experiment Name: At_Drought_Reproduction_P Parameter: Age (day) Value: 40
  misc_feature: MA Experiment 20001905 PARAMETER Experiment Name: At_Drought_Reproduction_P Parameter: Organism Value: A. thaliana
  misc_feature: MA Experiment 20001905 PARAMETER Experiment Name: At_Drought_Reproduction_P Parameter: Plant Line Value: WS
  misc_feature: MA Experiment 20001905 PARAMETER Experiment Name: At_Drought_Reproduction_P Parameter: Timepoint (day) Value: 10
  misc_feature: MA Experiment 20001905 PARAMETER Experiment Name: At_Drought_Reproduction_P Parameter: Tissue Value: Rosettes
  misc_feature: MA Experiment 20001905 PARAMETER Experiment Name: At_Drought_Reproduction_P Parameter: Treatment Value: Drought vs. No Drought
taaaagtcagcaaaacacaaggcatattcctcttctcttcctcagccttatttttctgatattcagtttcaaggatatatccatggcgatccagaagatcctctttgcttcacttctcatatgctcactgatccaatccatccacggggcggaaaaagtaagactcttcaaagagctggacaaaggtgcacttgatgtcaccactaaacccagccgagaaggaccaggtgttgttttggatgccggcaaggatacgttgaacattacatggacgctaagctcgattgggtctaaaagagaggctgaatttaagatcatcaaagttaagctatgctacgctccacctagccaagttgaccgaccatggcgcaaaacccatgacgagctcttcaaagacaagacctgcccacacaagatcatagccaagccttatgacaaaacacttcaatcaactacttggactcttgagcgtgacatccccaccggaacctacttcgttcgtgcctacgcggttgatgccattggccatgaagttgcctatggacagagcaccgacgatgccaagaaaaccaatctcttcagcgttcaggctatcagtggccgccacgcgtccctagatattgcctccatctgtttcagtgtcttctccgtcgtggctcttgtcgtcttctttgtcaatgagaagaggaaggccaagatagagcaaagcaaatgagtcgtttactttgcgtatttgtgacgttgaacccaaaaaaagttgactttgaactttcttgtttaccaattccttttgtcttgttgcacacttcttctttcttatatgcttttatttatgtgtttgtacaattaagccattgatatggaacaaaactaatcc

SEQ ID NO: 99801 - protein, 237 aa, Arabidopsis thaliana
  peptide (1)..(237): Ceres Seq. ID no. 13603656
  misc_feature (28)..(237): Homolog of NCBI NO: 15240632 NR Description: expressed protein [Arabidopsis thaliana] expressed protein [Arabidopsis thaliana] expressed protein [Arabidopsis thaliana]
  misc_feature (28)..(237): Homolog of NCBI NO: 13624657 NR Description: putative component of high affinity nitrate
  misc_feature (28)..(237): Homolog of NCBI NO: 21553714 NR Description: putative component of high affinity nitrate
  misc_feature (28)..(235): Homolog of NCBI NO: 15233944 NR Description: hypothetical protein [Arabidopsis thaliana]
  misc_feature (33)..(232): Homolog of NCBI NO: 20149062 NR Description: unknown [Capsicum annuum]
  misc_feature (30)..(230): Homolog of NCBI NO: 32488147 NR Description: OSJNBa0044K18.32 [Oryza sativa (japonica
KSQQNTRHIPLLFLSLIFLIFSFKDISMAIQKILFASLLICSLIQSIHGAEKVRLFKELDKGALDVTTKPSREGPGVVLDAGKDTLNITWTLSSIGSKREAEFKIIKVKLCYAPPSQVDRPWRKTHDELFKDKTCPHKIIAKPYDKTLQSTTWTLERDIPTGTYFVRAYAVDAIGHEVAYGQSTDDAKKTNLFSVQAISGRHASLDIASICFSVFSVVALVVFFVNEKRKAKIEQSK

SEQ ID NO: 99802 - protein, 210 aa, Arabidopsis thaliana; identical to SEQ ID NO: 77734
  peptide (1)..(210): Ceres Seq. ID no. 13603657
  misc_feature (1)..(210): Homolog of NCBI NO: 15240632 NR Description: expressed protein [Arabidopsis thaliana] expressed protein [Arabidopsis thaliana] expressed protein [Arabidopsis thaliana]
  misc_feature (1)..(210): Homolog of NCBI NO: 13624657 NR Description: putative component of high affinity nitrate
  misc_feature (1)..(210): Homolog of NCBI NO: 21553714 NR Description: putative component of high affinity nitrate
  misc_feature (1)..(208): Homolog of NCBI NO: 15233944 NR Description: hypothetical protein [Arabidopsis thaliana]
  misc_feature (6)..(205): Homolog of NCBI NO: 20149062 NR Description: unknown [Capsicum annuum]
  misc_feature (3)..(203): Homolog of NCBI NO: 32488147 NR Description: OSJNBa0044K18.32 [Oryza sativa (japonica

SEQ ID NO: 99803 - DNA, 1275 bp, Arabidopsis thaliana
  misc_feature (1)..(1275): Ceres Seq. ID no. 13603682
  misc_feature: MA Experiment ID: 108434 Result: Down-regulated in Transcription
  misc_feature: MA Experiment 108434 PARAMETER Experiment Name: At_Root_Tips_cDNA_P Parameter: Tissue Value: Root Tips
  misc_feature: MA Experiment ID: 108464 Result: Up-regulated in Transcription
  misc_feature: MA Experiment 108464 PARAMETER Experiment Name: At_Germinating_Seeds_cDNA_P Parameter: Age (day) Value: 4 vs. 0
  misc_feature: MA Experiment 108464 PARAMETER Experiment Name: At_Germinating_Seeds_cDNA_P Parameter: Tissue Value: Germinating Seeds
  misc_feature: MA Experiment ID: 108573 Result: Up-regulated in Transcription
  misc_feature: MA Experiment 108573 PARAMETER Experiment Name: At_Drought_cDNA_P Parameter: Timepoint (hr) Value: 6
  misc_feature: MA Experiment 108573 PARAMETER Experiment Name: At_Drought_cDNA_P Parameter: Tissue Value: Aerial
  misc_feature: MA Experiment 108573 PARAMETER Experiment Name: At_Drought_cDNA_P Parameter: Treatment Value: Drought vs. No Drought
  misc_feature: MA Experiment ID: 108579 Result: Up-regulated in Transcription
  misc_feature: MA Experiment 108579 PARAMETER Experiment Name: At_4deg_Cold_cDNA_P Parameter: Temperature (deg C) Value: 4 vs. 22
  misc_feature: MA Experiment 108579 PARAMETER Experiment Name: At_4deg_Cold_cDNA_P Parameter: Timepoint (hr) Value: 6
  misc_feature: MA Experiment 108579 PARAMETER Experiment Name: At_4deg_Cold_cDNA_P Parameter: Tissue Value: Aerial
  misc_feature: MA Experiment ID: 20000069 Result: Up-regulated in Transcription
  misc_feature: MA Experiment 20000069 PARAMETER Experiment Name: At_100uM_ABA_Mutants_cDNA_P Parameter: Plant Line Value: CS23
  misc_feature: MA Experiment 20000069 PARAMETER Experiment Name: At_100uM_ABA_Mutants_cDNA_P Parameter: Timepoint (hr) Value: 6
  misc_feature: MA Experiment 20000069 PARAMETER Experiment Name: At_100uM_ABA_Mutants_cDNA_P Parameter: Tissue Value: Aerial
  misc_feature: MA Experiment 20000069 PARAMETER Experiment Name: At_100uM_ABA_Mutants_cDNA_P Parameter: Treatment Value: 100uM ABA vs. No Treatment
  misc_feature: MA Experiment ID: 20000070 Result: Up-regulated in Transcription
  misc_feature: MA Experiment 20000070 PARAMETER Experiment Name: At_100uM_ABA_Mutants_cDNA_P Parameter: Plant Line Value: CS24
  misc_feature: MA Experiment 20000070 PARAMETER Experiment Name: At_100uM_ABA_Mutants_cDNA_P Parameter: Timepoint (hr) Value: 6
  misc_feature: MA Experiment 20000070 PARAMETER Experiment Name: At_100uM_ABA_Mutants_cDNA_P Parameter: Tissue Value: Aerial
  misc_feature: MA Experiment 20000070 PARAMETER Experiment Name: At_100uM_ABA_Mutants_cDNA_P Parameter: Treatment Value: 100uM ABA vs. No Treatment
  misc_feature: MA Experiment ID: 20000071 Result: Up-regulated in Transcription
  misc_feature: MA Experiment 20000071 PARAMETER Experiment Name: At_100uM_ABA_Mutants_cDNA_P Parameter: Plant Line Value: CS8104
  misc_feature: MA Experiment 20000071 PARAMETER Experiment Name: At_100uM_ABA_Mutants_cDNA_P Parameter: Timepoint (hr) Value: 6
  misc_feature: MA Experiment 20000071 PARAMETER Experiment Name: At_100uM_ABA_Mutants_cDNA_P Parameter: Tissue Value: Aerial
  misc_feature: MA Experiment 20000071 PARAMETER Experiment Name: At_100uM_ABA_Mutants_cDNA_P Parameter: Treatment Value: 100uM ABA vs. No Treatment
  misc_feature: MA Experiment ID: 20000072 Result: Up-regulated in Transcription
  misc_feature: MA Experiment 20000072 PARAMETER Experiment Name: At_100uM_ABA_Mutants_cDNA_P Parameter: Plant Line Value: CS8105
  misc_feature: MA Experiment 20000072 PARAMETER Experiment Name: At_100uM_ABA_Mutants_cDNA_P Parameter: Timepoint (hr) Value: 6
  misc_feature: MA Experiment 20000072 PARAMETER Experiment Name: At_100uM_ABA_Mutants_cDNA_P Parameter: Tissue Value: Aerial
  misc_feature: MA Experiment 20000072 PARAMETER Experiment Name: At_100uM_ABA_Mutants_cDNA_P Parameter: Treatment Value: 100uM ABA vs. No Treatment
  misc_feature: MA Experiment ID: 20000086 Result: Up-regulated in Transcription
  misc_feature: MA Experiment 20000086 PARAMETER Experiment Name: At_100uM_ABA_Mutants_cDNA_P Parameter: Plant Line Value: CS22
  misc_feature: MA Experiment 20000086 PARAMETER Experiment Name: At_100uM_ABA_Mutants_cDNA_P Parameter: Timepoint (hr) Value: 6
  misc_feature: MA Experiment 20000086 PARAMETER Experiment Name: At_100uM_ABA_Mutants_cDNA_P Parameter: Tissue Value: Aerial
  misc_feature: MA Experiment 20000086 PARAMETER Experiment Name: At_100uM_ABA_Mutants_cDNA_P Parameter: Treatment Value: 100uM ABA vs. No Treatment
  misc_feature: MA Experiment ID: 20000087 Result: Up-regulated in Transcription
  misc_feature: MA Experiment 20000087 PARAMETER Experiment Name: At_100uM_ABA_Mutants_cDNA_P Parameter: Plant Line Value: WS
  misc_feature: MA Experiment 20000087 PARAMETER Experiment Name: At_100uM_ABA_Mutants_cDNA_P Parameter: Timepoint (hr) Value: 6
  misc_feature: MA Experiment 20000087 PARAMETER Experiment Name: At_100uM_ABA_Mutants_cDNA_P Parameter: Tissue Value: Aerial
  misc_feature: MA Experiment 20000087 PARAMETER Experiment Name: At_100uM_ABA_Mutants_cDNA_P Parameter: Treatment Value: 100uM ABA vs. No Treatment
  misc_feature: MA Experiment ID: 20000088 Result: Up-regulated in Transcription
  misc_feature: MA Experiment 20000088 PARAMETER Experiment Name: At_100uM_ABA_Mutants_cDNA_P Parameter: Plant Line Value: Landsberg
  misc_feature: MA Experiment 20000088 PARAMETER Experiment Name: At_100uM_ABA_Mutants_cDNA_P Parameter: Timepoint (hr) Value: 6
  misc_feature: MA Experiment 20000088 PARAMETER Experiment Name: At_100uM_ABA_Mutants_cDNA_P Parameter: Tissue Value: Aerial
  misc_feature: MA Experiment 20000088 PARAMETER Experiment Name: At_100uM_ABA_Mutants_cDNA_P Parameter: Treatment Value: 100uM ABA vs. No Treatment
  misc_feature: MA Experiment ID: 20000089 Result: Up-regulated in Transcription
  misc_feature: MA Experiment ID: 20000090 Result: Up-regulated in Transcription
  misc_feature: MA Experiment ID: 20000117 Result: Up-regulated in Transcription
  misc_feature: MA Experiment 20000117 PARAMETER Experiment Name: At_100uM_ABA_Mutants_cDNA_P Parameter: Plant Line Value: Columbia
  misc_feature: MA Experiment 20000117 PARAMETER Experiment Name: At_100uM_ABA_Mutants_cDNA_P Parameter: Timepoint (hr) Value: 6
  misc_feature: MA Experiment 20000117 PARAMETER Experiment Name: At_100uM_ABA_Mutants_cDNA_P Parameter: Tissue Value: Aerial
  misc_feature: MA Experiment 20000117 PARAMETER Experiment Name: At_100uM_ABA_Mutants_cDNA_P Parameter: Treatment Value: 100uM ABA vs. No Treatment
  misc_feature: MA Experiment ID: 20000171 Result: Up-regulated in Transcription
  misc_feature: MA Experiment 20000171 PARAMETER Experiment Name: At_42deg_Heat_P Parameter: Age (day) Value: 14
  misc_feature: MA Experiment 20000171 PARAMETER Experiment Name: At_42deg_Heat_P Parameter: Organism Value: A. thaliana
  misc_feature: MA Experiment 20000171 PARAMETER Experiment Name: At_42deg_Heat_P Parameter: Plant Line Value: WS
  misc_feature: MA Experiment 20000171 PARAMETER Experiment Name: At_42deg_Heat_P Parameter: Temperature (deg C) Value: 42 vs. 22
  misc_feature: MA Experiment 20000171 PARAMETER Experiment Name: At_42deg_Heat_P Parameter: Timepoint (hr) Value: 1
  misc_feature: MA Experiment 20000171 PARAMETER Experiment Name: At_42deg_Heat_P Parameter: Tissue Value: Aerial
  misc_feature: MA Experiment ID: 20000185 Result: Down-regulated in Transcription
  misc_feature: MA Experiment 20000185 PARAMETER Experiment Name: At_Roots__P Parameter: Age (day) Value: 7 vs. 21
  misc_feature: MA Experiment 20000185 PARAMETER Experiment Name: At_Roots__P Parameter: Organism Value: A. thaliana
  misc_feature: MA Experiment 20000185 PARAMETER Experiment Name: At_Roots__P Parameter: Tissue Value: Roots vs. Whole Plant
  misc_feature: MA Experiment ID: 20000213 Result: Up-regulated in Transcription
  misc_feature: MA Experiment 20000213 PARAMETER Experiment Name: At_4deg_Cold_P Parameter: Timepoint (hr) Value: 2
  misc_feature: MA Experiment ID: 20000224 Result: Down-regulated in Transcription
  misc_feature: MA Experiment ID: 20000265 Result: Down-regulated in Transcription
  misc_feature: MA Experiment 20000265 PARAMETER Experiment Name: At_Open_Flower_P Parameter: Age (day) Value: 21
  misc_feature: MA Experiment 20000265 PARAMETER Experiment Name: At_Open_Flower_P Parameter: Plant Line Value: WS
  misc_feature: MA Experiment 20000265 PARAMETER Experiment Name: At_Open_Flower_P Parameter: Tissue Value: Closed Flower vs. Whole Plant
  misc_feature: MA Experiment ID: 20000286 Result: Down-regulated in Transcription
  misc_feature: MA Experiment 20000286 PARAMETER Experiment Name: At_Open_Flower_P Parameter: Age (day) Value: 21
  misc_feature: MA Experiment 20000286 PARAMETER Experiment Name: At_Open_Flower_P Parameter: Plant Line Value: WS
  misc_feature: MA Experiment 20000286 PARAMETER Experiment Name: At_Open_Flower_P Parameter: Tissue Value: Half Open vs. Whole Plant
  misc_feature: MA Experiment ID: 20000437 Result: Up-regulated in Transcription
  misc_feature: MA Experiment 20000437 PARAMETER Experiment Name: At_Drought_P Parameter: Age (day) Value: 8
  misc_feature: MA Experiment 20000437 PARAMETER Experiment Name: At_Drought_P Parameter: Organism Value: A. thaliana
  misc_feature: MA Experiment 20000437 PARAMETER Experiment Name: At_Drought_P Parameter: Plant Line Value: WS
  misc_feature: MA Experiment 20000437 PARAMETER Experiment Name: At_Drought_P Parameter: Timepoint (hr) Value: 24
  misc_feature: MA Experiment 20000437 PARAMETER Experiment Name: At_Drought_P Parameter: Tissue Value: Whole Plant
  misc_feature: MA Experiment 20000437 PARAMETER Experiment Name: At_Drought_P Parameter: Treatment Value: Drought vs. No Drought
  misc_feature: MA Experiment ID: 20000438 Result: Down-regulated in Transcription
  misc_feature: MA Experiment 20000438 PARAMETER Experiment Name: At_Shoots__P Parameter: Age (day) Value: 14
  misc_feature: MA Experiment 20000438 PARAMETER Experiment Name: At_Shoots__P Parameter: Tissue Value: Shoots vs. Whole Plant
  misc_feature: MA Experiment ID: 20000439 Result: Down-regulated in Transcription
  misc_feature: MA Experiment 20000439 PARAMETER Experiment Name: At_Roots__P Parameter: Age (day) Value: 14 vs. 21
  misc_feature: MA Experiment 20000439 PARAMETER Experiment Name: At_Roots__P Parameter: Organism Value: A. thaliana
  misc_feature: MA Experiment 20000439 PARAMETER Experiment Name: At_Roots__P Parameter: Tissue Value: Roots vs. Whole Plant
  misc_feature: MA Experiment ID: 20000456 Result: Down-regulated in Transcription
  misc_feature: MA Experiment 20000456 PARAMETER Experiment Name: At_100uM_BA_P Parameter: Age (day) Value: 14
  misc_feature: MA Experiment 20000456 PARAMETER Experiment Name: At_100uM_BA_P Parameter: Organism Value: A. thaliana
  misc_feature: MA Experiment 20000456 PARAMETER Experiment Name: At_100uM_BA_P Parameter: Plant Line Value: WS
  misc_feature: MA Experiment 20000456 PARAMETER Experiment Name: At_100uM_BA_P Parameter: Timepoint (hr) Value: 6
  misc_feature: MA Experiment 20000456 PARAMETER Experiment Name: At_100uM_BA_P Parameter: Tissue Value: Aerial
  misc_feature: MA Experiment 20000456 PARAMETER Experiment Name: At_100uM_BA_P Parameter: Treatment Value: 100uM BA vs. No Treatment
  misc_feature: MA Experiment ID: 20000495 Result: Down-regulated in Transcription
  misc_feature: MA Experiment 20000495 PARAMETER Experiment Name: At_Guard_Cells_P Parameter: Harvest Date Value: 8/2/2002
  misc_feature: MA Experiment 20000495 PARAMETER Experiment Name: At_Guard_Cells_P Parameter: Organism Value: A. thaliana
  misc_feature: MA Experiment 20000495 PARAMETER Experiment Name: At_Guard_Cells_P Parameter: Tissue Value: Guard Cells vs. Leaves
  misc_feature: MA Experiment ID: 20000527 Result: Up-regulated in Transcription
  misc_feature: MA Experiment 20000527 PARAMETER Experiment Name: At_10percent_PEG_P Parameter: Age (day) Value: 20
  misc_feature: MA Experiment 20000527 PARAMETER Experiment Name: At_10percent_PEG_P Parameter: Organism Value: A. thaliana
  misc_feature: MA Experiment 20000527 PARAMETER Experiment Name: At_10percent_PEG_P Parameter: Plant Line Value: WS
  misc_feature: MA Experiment 20000527 PARAMETER Experiment Name: At_10percent_PEG_P Parameter: Timepoint (day) Value: 20
  misc_feature: MA Experiment 20000527 PARAMETER Experiment Name: At_10percent_PEG_P Parameter: Tissue Value: Whole Plant
  misc_feature: MA Experiment 20000527 PARAMETER Experiment Name: At_10percent_PEG_P Parameter: Treatment Value: 10percent PEG vs. No Treatment
  misc_feature: MA Experiment ID: 20001248 Result: Up-regulated in Transcription
  misc_feature: MA Experiment 20001248 PARAMETER Experiment Name: At_Far-red-induction_P Parameter: Age (day) Value: 7
  misc_feature: MA Experiment 20001248 PARAMETER Experiment Name: At_Far-red-induction_P Parameter: Light Value: Far-red vs. White
  misc_feature: MA Experiment 20001248 PARAMETER Experiment Name: At_Far-red-induction_P Parameter: Organism Value: A. thaliana
  misc_feature: MA Experiment 20001248 PARAMETER Experiment Name: At_Far-red-induction_P Parameter: Plant Line Value: Columbia
  misc_feature: MA Experiment 20001248 PARAMETER Experiment Name: At_Far-red-induction_P Parameter: Timepoint (hr) Value: 4
  misc_feature: MA Experiment 20001248 PARAMETER Experiment Name: At_Far-red-induction_P Parameter: Tissue Value: Whole Plant
  misc_feature: MA Experiment ID: 20001451 Result: Up-regulated in Transcription
  misc_feature: MA Experiment 20001451 PARAMETER Experiment Name: At_Far-red-induction_P Parameter: Age (day) Value: 7
  misc_feature: MA Experiment 20001451 PARAMETER Experiment Name: At_Far-red-induction_P Parameter: Light Value: Far-red vs. White
  misc_feature: MA Experiment 20001451 PARAMETER Experiment Name: At_Far-red-induction_P Parameter: Organism Value: A. thaliana
  misc_feature: MA Experiment 20001451 PARAMETER Experiment Name: At_Far-red-induction_P Parameter: Plant Line Value: Columbia
  misc_feature: MA Experiment 20001451 PARAMETER Experiment Name: At_Far-red-induction_P Parameter: Timepoint (hr) Value: 24
  misc_feature: MA Experiment 20001451 PARAMETER Experiment Name: At_Far-red-induction_P Parameter: Tissue Value: Whole Plant
  misc_feature: MA Experiment ID: 20001557 Result: Up-regulated in Transcription
  misc_feature: MA Experiment 20001557 PARAMETER Experiment Name: At_Drought_Soil_Dry_P Parameter: Age (day) Value: 27
  misc_feature: MA Experiment 20001557 PARAMETER Experiment Name: At_Drought_Soil_Dry_P Parameter: Organism Value: A. thaliana
  misc_feature: MA Experiment 20001557 PARAMETER Experiment Name: At_Drought_Soil_Dry_P Parameter: Plant Line Value: WS
  misc_feature: MA Experiment 20001557 PARAMETER Experiment Name: At_Drought_Soil_Dry_P Parameter: Post Timepoint (hr) Value: 3
  misc_feature: MA Experiment 20001557 PARAMETER Experiment Name: At_Drought_Soil_Dry_P Parameter: Post-Treatment Value: Re-Water vs. No Drought
  misc_feature: MA Experiment 20001557 PARAMETER Experiment Name: At_Drought_Soil_Dry_P Parameter: Timepoint (day) Value: 13
  misc_feature: MA Experiment 20001557 PARAMETER Experiment Name: At_Drought_Soil_Dry_P Parameter: Treatment Value: Drought vs. No Drought
  misc_feature: MA Experiment ID: 20001904 Result: Down-regulated in Transcription
  misc_feature: MA Experiment 20001904 PARAMETER Experiment Name: At_Drought_Reproduction_P Parameter: Age (day) Value: 37
  misc_feature: MA Experiment 20001904 PARAMETER Experiment Name: At_Drought_Reproduction_P Parameter: Organism Value: A. thaliana
  misc_feature: MA Experiment 20001904 PARAMETER Experiment Name: At_Drought_Reproduction_P Parameter: Plant Line Value: WS
  misc_feature: MA Experiment 20001904 PARAMETER Experiment Name: At_Drought_Reproduction_P Parameter: Timepoint (day) Value: 7
  misc_feature: MA Experiment 20001904 PARAMETER Experiment Name: At_Drought_Reproduction_P Parameter: Tissue Value: Rosettes
  misc_feature: MA Experiment 20001904 PARAMETER Experiment Name: At_Drought_Reproduction_P Parameter: Treatment Value: Drought vs. No Drought
ctctccactctctcaatctcttaacttaaacaaaaccaacaattatcaatcttcaatgacgcatctcaacaaaaaacagaggttagagaataaccataacaatactgtgaacaaccatttcgaagacttacatgacgatctcatcatctctatcctccgcaaactcgctacctccgcttcttctccttccgatttcctcaccgttctctccacatgcaagagattgaatcggttaggattacatcctctggttttatctaaagccggtactcaaaccctagccgtcacggcggagaaatggtcagattcttctcataaattcctcaaactctgtgttaatgccggaaacatcgacgcttcgtactctctcggaatgatccgattttactgtctacaaaatccagtgagcggcgcgtcattaatggctaaagcggcgattaaatcacacgcgccggcgctttattcgttatcggtgattcagtttaacggaagcggcggttcaaaaaccgataagaatctacgcgccggcgttgctctttgtgcacgctctgcttatttaggccacgtcgatgcgttacgagagcttggtcactgtcttcaagacggttacggtgttcctcgtgacgtctccgaaggtcgtcgtcttttgattcaagctaacgcgcgtgagctcgcgtgttctctacgctcttacctctctctgaaatctggggacgagaacgagaccttaactgatttaagcgtggttccggttcaggagattcatccggttaaccggtttttaaaagagtggtttagttcgggtcgggttgatttagcggaagggttaaggatgtgttcgcatggtggttgtggaaggccggagactcgggctcatgagtttcggcgatgttctgtttgtgggaaggttaattattgctcgcgtggttgtcaggcgttggattggagagcgaagcataaggttgaatgtacgccgttggatttgtgggttgcggcagcggcggagattggcgacgacggtgaagcggtggcggtggagattgatgataatcatggtgagcggtaacggctctaacgctttttttcaaggaaatgactgaaatgccaacagtttctttgactgttgagtttttttttttttgggttatttaattatgttttaaaaaatttaatgttaatttcttctcttaattaattagttttggctaatggcgtttctgaatcttctgatactaaactggcatgttattttaaataatatagttttttgccgtt

SEQ ID NO: 99804 - protein, 354 aa, Arabidopsis thaliana; identical to SEQ ID NO: 22407
  peptide (1)..(354): Ceres Seq. ID no. 13603683
  misc_feature (279)..(323): Pfam Name: MYND finger Pfam Description: MYND finger
  misc_feature (19)..(354): Homolog of NCBI NO: 15240674 NR Description: expressed protein [Arabidopsis thaliana] gb|AAB95234.1~gene_id:MXI22.17~strong similarity to unknown [Arabidopsis thaliana] >gi|20466554|gb|AAM20594.1| putative
  misc_feature (33)..(236): Homolog of NCBI NO: 18408746 NR Description: F-box protein family [Arabidopsis thaliana]
  misc_feature (243)..(350): Homolog of NCBI NO: 18408746 NR Description: F-box protein family [Arabidopsis thaliana]
  misc_feature (37)..(267): Homolog of NCBI NO: 32489984 NR Description: OSJNBa0044M19.1 [Oryza sativa (japonica
  misc_feature (267)..(344): Homolog of NCBI NO: 32489984 NR Description: OSJNBa0044M19.1 [Oryza sativa (japonica
  misc_feature (38)..(267): Homolog of NCBI NO: 19386803 NR Description: OJ1485_B09.11 [Oryza sativa (japonica
  misc_feature (266)..(335): Homolog of NCBI NO: 19386803 NR Description: OJ1485_B09.11 [Oryza sativa (japonica

SEQ ID NO: 99805 - protein, 336 aa, Arabidopsis thaliana; identical to SEQ ID NO: 22408
  peptide (1)..(336): Ceres Seq. ID no. 13603684
  misc_feature (261)..(305): Pfam Name: MYND finger Pfam Description: MYND finger
  misc_feature (1)..(336): Homolog of NCBI NO: 15240674 NR Description: expressed protein [Arabidopsis thaliana] gb|AAB95234.1~gene_id:MXI22.17~strong similarity to unknown [Arabidopsis thaliana] >gi|20466554|gb|AAM20594.1| putative
  misc_feature (15)..(218): Homolog of NCBI NO: 18408746 NR Description: F-box protein family [Arabidopsis thaliana]
  misc_feature (225)..(332): Homolog of NCBI NO: 18408746 NR Description: F-box protein family [Arabidopsis thaliana]
  misc_feature (19)..(249): Homolog of NCBI NO: 32489984 NR Description: OSJNBa0044M19.1 [Oryza sativa (japonica
  misc_feature (249)..(326): Homolog of NCBI NO: 32489984 NR Description: OSJNBa0044M19.1 [Oryza sativa (japonica
  misc_feature (20)..(249): Homolog of NCBI NO: 19386803 NR Description: OJ1485_B09.11 [Oryza sativa (japonica
  misc_feature (248)..(317): Homolog of NCBI NO: 19386803 NR Description: OJ1485_B09.11 [Oryza sativa (japonica

SEQ ID NO: 99806 - protein, 230 aa, Arabidopsis thaliana; identical to SEQ ID NO: 22409
  peptide (1)..(230): Ceres Seq. ID no. 13603685
  misc_feature (155)..(199): Pfam Name: MYND finger Pfam Description: MYND finger
  misc_feature (1)..(230): Homolog of NCBI NO: 15240674 NR Description: expressed protein [Arabidopsis thaliana] gb|AAB95234.1~gene_id:MXI22.17~strong similarity to unknown [Arabidopsis thaliana] >gi|20466554|gb|AAM20594.1| putative
  misc_feature (1)..(112): Homolog of NCBI NO: 18408746 NR Description: F-box protein family [Arabidopsis thaliana]
  misc_feature (119)..(226): Homolog of NCBI NO: 18408746 NR Description: F-box protein family [Arabidopsis thaliana]
  misc_feature (1)..(143): Homolog of NCBI NO: 32489984 NR Description: OSJNBa0044M19.1 [Oryza sativa (japonica
  misc_feature (143)..(220): Homolog of NCBI NO: 32489984 NR Description: OSJNBa0044M19.1 [Oryza sativa (japonica
  misc_feature (1)..(143): Homolog of NCBI NO: 19386803 NR Description: OJ1485_B09.11 [Oryza sativa (japonica
  misc_feature (142)..(211): Homolog of NCBI NO: 19386803 NR Description: OJ1485_B09.11 [Oryza sativa (japonica

SEQ ID NO: 99807 - DNA, 1247 bp, Arabidopsis thaliana
  misc_feature (1)..(1247): Ceres Seq. ID no. 13603686
  misc_feature: MA Experiment ID: 20000180 Result: Down-regulated in Transcription
  misc_feature: MA Experiment 20000180 PARAMETER Experiment Name: At_Germinating_Seeds_P Parameter: Age (hr) Value: 24 vs. 0
  misc_feature: MA Experiment 20000180 PARAMETER Experiment Name: At_Germinating_Seeds_P Parameter: Tissue Value: Germinating Seeds
  misc_feature: MA Experiment ID: 20000184 Result: Down-regulated in Transcription
  misc_feature: MA Experiment 20000184 PARAMETER Experiment Name: At_Shoots__P Parameter: Age (day) Value: 7
  misc_feature: MA Experiment 20000184 PARAMETER Experiment Name: At_Shoots__P Parameter: Tissue Value: Shoots vs. Whole Plant
aaactcagtgagtgagtcaccgaaaacctcttgtagtagattcgtgacgggtttgatcatctcttcgaggtcggttctagggtttcactacgagaatggacggagatgagctcaccgagcaggaaactgctctttatgaccgtcaaattagggtatggggagctggtgctcaaagaagattgagtaaatctcatgttttggtatctggaattaagggcactgttgctgagttttgtaagaacattgtgttggcaggagtaggtagtgtgactctgttggatgatcgattggttacaacggaagtcttcaacgcaaacttcttgattcttcctgatgaaaatgcttatgtaggcaaaaccgtagctgagatttgttgtgattcacttaaggattttaaccctatggttcatgtttcaatagagaaaggtgatttgtcaacacttggtgttgattttttcgagaagtttgatgttgtggttatcggctacagttctcgtgctactaagaaagcagttaatgaaaagtgtaggaacctagcaaaagatgtagcgttctatacagttgattgtagaggctcatgtggcgaaatatttgtcgaccttcagaattataagtacacaaagaaaaagcttgatgaaacagtggaatgtgaactaacatttccaagttttgaggaggcagtttcagtaccgtggaaaccgatgccaaggagaacagcaaagctctactttgcaatgagagtgatagaactatttgaggaaactgaaggacgtaaacctggggaatgttcgctgtctgatctcccaagagttttgaaactcaaaaaggaactatgtgaaggaaattcggtcagcgagaatcatattccagatatcctcttggagagactcgtatctaataacacagaattcccaccggcttgtgccatcattggagggattctaggacaggaggtgataaaagttatatcaggcaaaggagagccgttgaagaacttcttctactttgatgcagaggatgggaaaggtgtaatcgaggacctatcccacaagctttaacttccaaacatgaaaggtgctgtgaaacgctgctcttagtaattagttccttgttgaagattgtattggaaattagactttagagtacttagaacttggctccttgtcttttgtatctactaacttggttcgctcctaaagacaatctgtaacccactatttactttaatccatcaatttacacactcc

SEQ ID NO: 99808 - protein, 320 aa, Arabidopsis thaliana; identical to SEQ ID NO: 36234
  peptide (1)..(320): Ceres Seq. ID no. 13603687
  misc_feature (30)..(168): Pfam Name: ThiF family Pfam Description: ThiF family
  misc_feature (1)..(320): Homolog of NCBI NO: 18423184 NR Description: SUMO activating enzyme 1b (SAE1b) [Arabidopsis >gi|30695915|ref|NP_568732.2| SUMO activating enzyme 1b (SAE1b) thaliana] >gi|8777391|dbj|BAA96981.1| ubiquitin activating enzyme
  misc_feature (1)..(320): Homolog of NCBI NO: 22652852 NR Description: SUMO activating enzyme 1b [Arabidopsis thaliana]
  misc_feature (1)..(320): Homolog of NCBI NO: 30695912 NR Description: SUMO activating enzyme 1b (SAE1b) [Arabidopsis
  misc_feature (1)..(320): Homolog of NCBI NO: 21554965 NR Description: ubiquitin activating enzyme [Arabidopsis thaliana]
  misc_feature (1)..(317): Homolog of NCBI NO: 18416454 NR Description: SUMO activating enzyme, putative [Arabidopsis
  misc_feature (1)..(317): Homolog of NCBI NO: 7488411 NR Description: ubiquitin-activating enzyme homolog F13M23.80 -
  misc_feature (3)..(317): Homolog of NCBI NO: 3647283 NR Description: ubiquitin activating enzyme [Lycopersicon
  misc_feature (86)..(319): Homolog of NCBI NO: 25494393 NR Description: probable ubiquitin activating enzyme 2 [imported] Picea mariana (fragment) >gi|2982309|gb|AAC32140.1| probable
  misc_feature (3)..(178): Homolog of NCBI NO: 9790247 NR Description: ubiquitin-like 1 (sentrin) activating enzyme
  misc_feature (176)..(316): Homolog of NCBI NO: 9790247 NR Description: ubiquitin-like 1 (sentrin) activating enzyme

SEQ ID NO: 99809 - protein, 218 aa, Arabidopsis thaliana; identical to SEQ ID NO: 36235
  peptide (1)..(218): Ceres Seq. ID no. 13603688
  misc_feature (1)..(66): Pfam Name: ThiF family Pfam Description: ThiF family
  misc_feature (1)..(218): Homolog of NCBI NO: 18423184 NR Description: SUMO activating enzyme 1b (SAE1b) [Arabidopsis >gi|30695915|ref|NP_568732.2| SUMO activating enzyme 1b (SAE1b) thaliana] >gi|8777391|dbj|BAA96981.1| ubiquitin activating enzyme
  misc_feature (1)..(218): Homolog of NCBI NO: 22652852 NR Description: SUMO activating enzyme 1b [Arabidopsis thaliana]
  misc_feature (1)..(218): Homolog of NCBI NO: 30695912 NR Description: SUMO activating enzyme 1b (SAE1b) [Arabidopsis
  misc_feature (1)..(218): Homolog of NCBI NO: 21554965 NR Description: ubiquitin activating enzyme [Arabidopsis thaliana]
  misc_feature (1)..(215): Homolog of NCBI NO: 18416454 NR Description: SUMO activating enzyme, putative [Arabidopsis
  misc_feature (1)..(215): Homolog of NCBI NO: 7488411 NR Description: ubiquitin-activating enzyme homolog F13M23.80 -
  misc_feature (1)..(215): Homolog of NCBI NO: 3647283 NR Description: ubiquitin activating enzyme [Lycopersicon
  misc_feature (1)..(217): Homolog of NCBI NO: 25494393 NR Description: probable ubiquitin activating enzyme 2 [imported] Picea mariana (fragment) >gi|2982309|gb|AAC32140.1| probable
  misc_feature (1)..(76): Homolog of NCBI NO: 9790247 NR Description: ubiquitin-like 1 (sentrin) activating enzyme
  misc_feature (74)..(214): Homolog of NCBI NO: 9790247 NR Description: ubiquitin-like 1 (sentrin) activating enzyme

SEQ ID NO: 99810 - DNA, 983 bp, Arabidopsis thaliana
  misc_feature (1)..(983): Ceres Seq. ID no. 13603693
  misc_feature: MA Experiment ID: 20000169 Result: Down-regulated in Transcription
  misc_feature: MA Experiment 20000169 PARAMETER Experiment Name: At_100uM_ABA_P Parameter: Age (day) Value: 14
  misc_feature: MA Experiment 20000169 PARAMETER Experiment Name: At_100uM_ABA_P Parameter: Organism Value: A. thaliana
  misc_feature: MA Experiment 20000169 PARAMETER Experiment Name: At_100uM_ABA_P Parameter: Plant Line Value: WS
  misc_feature: MA Experiment 20000169 PARAMETER Experiment Name: At_100uM_ABA_P Parameter: Timepoint (hr) Value: 6
  misc_feature: MA Experiment 20000169 PARAMETER Experiment Name: At_100uM_ABA_P Parameter: Tissue Value: Aerial
  misc_feature: MA Experiment 20000169 PARAMETER Experiment Name: At_100uM_ABA_P Parameter: Treatment Value: 100uM ABA vs. No Treatment
  misc_feature: MA Experiment ID: 20000171 Result: Down-regulated in Transcription
  misc_feature: MA Experiment 20000171 PARAMETER Experiment Name: At_42deg_Heat_P Parameter: Age (day) Value: 14
  misc_feature: MA Experiment 20000171 PARAMETER Experiment Name: At_42deg_Heat_P Parameter: Organism Value: A. thaliana
  misc_feature: MA Experiment 20000171 PARAMETER Experiment Name: At_42deg_Heat_P Parameter: Plant Line Value: WS
  misc_feature: MA Experiment 20000171 PARAMETER Experiment Name: At_42deg_Heat_P Parameter: Temperature (deg C) Value: 42 vs. 22
  misc_feature: MA Experiment 20000171 PARAMETER Experiment Name: At_42deg_Heat_P Parameter: Timepoint (hr) Value: 1
  misc_feature: MA Experiment 20000171 PARAMETER Experiment Name: At_42deg_Heat_P Parameter: Tissue Value: Aerial
  misc_feature: MA Experiment ID: 20000173 Result: Down-regulated in Transcription
  misc_feature: MA Experiment 20000173 PARAMETER Experiment Name: At_42deg_Heat_P Parameter: Age (day) Value: 14
  misc_feature: MA Experiment 20000173 PARAMETER Experiment Name: At_42deg_Heat_P Parameter: Organism Value: A. thaliana
  misc_feature: MA Experiment 20000173 PARAMETER Experiment Name: At_42deg_Heat_P Parameter: Plant Line Value: WS
  misc_feature: MA Experiment 20000173 PARAMETER Experiment Name: At_42deg_Heat_P Parameter: Temperature (deg C) Value: 42 vs. 22
  misc_feature: MA Experiment 20000173 PARAMETER Experiment Name: At_42deg_Heat_P Parameter: Timepoint (hr) Value: 6
  misc_feature: MA Experiment 20000173 PARAMETER Experiment Name: At_42deg_Heat_P Parameter: Tissue Value: Aerial
  misc_feature: MA Experiment ID: 20000182 Result: Down-regulated in Transcription
  misc_feature: MA Experiment 20000182 PARAMETER Experiment Name: At_2mM_SA_P Parameter: Age (day) Value: 14
  misc_feature: MA Experiment 20000182 PARAMETER Experiment Name: At_2mM_SA_P Parameter: Organism Value: A. thaliana
  misc_feature: MA Experiment 20000182 PARAMETER Experiment Name: At_2mM_SA_P Parameter: Plant Line Value: WS
  misc_feature: MA Experiment 20000182 PARAMETER Experiment Name: At_2mM_SA_P Parameter: Timepoint (hr) Value: 6
  misc_feature: MA Experiment 20000182 PARAMETER Experiment Name: At_2mM_SA_P Parameter: Tissue Value: Aerial
  misc_feature: MA Experiment 20000182 PARAMETER Experiment Name: At_2mM_SA_P Parameter: Treatment Value: 2mM SA vs. No Treatment
  misc_feature: MA Experiment ID: 20000227 Result: Up-regulated in Transcription
  misc_feature: MA Experiment 20000227 PARAMETER Experiment Name: At_Root-Tips-vs-Tops_P Parameter: Tissue Value: Root Tips vs. Root Tops
  misc_feature: MA Experiment ID: 20000234 Result: Up-regulated in Transcription
  misc_feature: MA Experiment 20000234 PARAMETER Experiment Name: At_Siliques_P Parameter: Age (day) Value: 21
  misc_feature: MA Experiment 20000234 PARAMETER Experiment Name: At_Siliques_P Parameter: Organism Value: A. thaliana
  misc_feature: MA Experiment 20000234 PARAMETER Experiment Name: At_Siliques_P Parameter: Plant Line Value: WS
  misc_feature: MA Experiment 20000234 PARAMETER Experiment Name: At_Siliques_P Parameter: Tissue Value: Less Than 5mm Siliques vs. Whole Plant
  misc_feature: MA Experiment ID: 20000265 Result: Up-regulated in Transcription
  misc_feature: MA Experiment 20000265 PARAMETER Experiment Name: At_Open_Flower_P Parameter: Age (day) Value: 21
  misc_feature: MA Experiment 20000265 PARAMETER Experiment Name: At_Open_Flower_P Parameter: Plant Line Value: WS
  misc_feature: MA Experiment 20000265 PARAMETER Experiment Name: At_Open_Flower_P Parameter: Tissue Value: Closed Flower vs. Whole Plant
  misc_feature: MA Experiment ID: 20000436 Result: Down-regulated in Transcription
  misc_feature: MA Experiment 20000436 PARAMETER Experiment Name: At_Drought_P Parameter: Age (day) Value: 7
  misc_feature: MA Experiment 20000436 PARAMETER Experiment Name: At_Drought_P Parameter: Organism Value: A. thaliana
  misc_feature: MA Experiment 20000436 PARAMETER Experiment Name: At_Drought_P Parameter: Plant Line Value: WS
  misc_feature: MA Experiment 20000436 PARAMETER Experiment Name: At_Drought_P Parameter: Timepoint (hr) Value: 12
  misc_feature: MA Experiment 20000436 PARAMETER Experiment Name: At_Drought_P Parameter: Tissue Value: Whole Plant
  misc_feature: MA Experiment 20000436 PARAMETER Experiment Name: At_Drought_P Parameter: Treatment Value: Drought vs. No Drought
  misc_feature: MA Experiment ID: 20000437 Result: Down-regulated in Transcription
  misc_feature: MA Experiment 20000437 PARAMETER Experiment Name: At_Drought_P Parameter: Age (day) Value: 8
  misc_feature: MA Experiment 20000437 PARAMETER Experiment Name: At_Drought_P Parameter: Organism Value: A. thaliana
  misc_feature: MA Experiment 20000437 PARAMETER Experiment Name: At_Drought_P Parameter: Plant Line Value: WS
  misc_feature: MA Experiment 20000437 PARAMETER Experiment Name: At_Drought_P Parameter: Timepoint (hr) Value: 24
  misc_feature: MA Experiment 20000437 PARAMETER Experiment Name: At_Drought_P Parameter: Tissue Value: Whole Plant
  misc_feature: MA Experiment 20000437 PARAMETER Experiment Name: At_Drought_P Parameter: Treatment Value: Drought vs. No Drought
  misc_feature: MA Experiment ID: 20000453 Result: Down-regulated in Transcription
  misc_feature: MA Experiment 20000453 PARAMETER Experiment Name: At_100uM_ABA_P Parameter: Age (day) Value: 15
  misc_feature: MA Experiment 20000453 PARAMETER Experiment Name: At_100uM_ABA_P Parameter: Organism Value: A. thaliana
  misc_feature: MA Experiment 20000453 PARAMETER Experiment Name: At_100uM_ABA_P Parameter: Plant Line Value: WS
  misc_feature: MA Experiment 20000453 PARAMETER Experiment Name: At_100uM_ABA_P Parameter: Timepoint (hr) Value: 24
  misc_feature: MA Experiment 20000453 PARAMETER Experiment Name: At_100uM_ABA_P Parameter: Tissue Value: Aerial
  misc_feature: MA Experiment 20000453 PARAMETER Experiment Name: At_100uM_ABA_P Parameter: Treatment Value: 100uM ABA vs. No Treatment
  misc_feature: MA Experiment ID: 20000496 Result: Up-regulated in Transcription
  misc_feature: MA Experiment 20000496 PARAMETER Experiment Name: At_Guard_Cells_P Parameter: Harvest Date Value: 7/19/2002
  misc_feature: MA Experiment 20000496 PARAMETER Experiment Name: At_Guard_Cells_P Parameter: Organism Value: Canola
  misc_feature: MA Experiment 20000496 PARAMETER Experiment Name: At_Guard_Cells_P Parameter: Tissue Value: Guard Cells vs. Leaves
  misc_feature: MA Experiment ID: 20000573 Result: Down-regulated in Transcription
  misc_feature: MA Experiment 20000573 PARAMETER Experiment Name: At_100uM_ABA_Mutants__P Parameter: Organism Value: A. thaliana
  misc_feature: MA Experiment 20000573 PARAMETER Experiment Name: At_100uM_ABA_Mutants__P Parameter: Plant Line Value: CS22 vs. Ler wt
  misc_feature: MA Experiment 20000573 PARAMETER Experiment Name: At_100uM_ABA_Mutants__P Parameter: Timepoint (hr) Value: N/A
  misc_feature: MA Experiment 20000573 PARAMETER Experiment Name: At_100uM_ABA_Mutants__P Parameter: Tissue Value: Whole Plant
  misc_feature: MA Experiment 20000573 PARAMETER Experiment Name: At_100uM_ABA_Mutants__P Parameter: Treatment Value: None
  misc_feature: MA Experiment ID: 20000794 Result: Down-regulated in Transcription
  misc_feature: MA Experiment 20000794 PARAMETER Experiment Name: At_Petals_P Parameter: Age (day) Value: 23-25 days
  misc_feature: MA Experiment 20000794 PARAMETER Experiment Name: At_Petals_P Parameter: Plant Line Value: WS
  misc_feature: MA Experiment 20000794 PARAMETER Experiment Name: At_Petals_P Parameter: Tissue Value: Petals vs. Whole plant
  misc_feature: MA Experiment ID: 20001248 Result: Down-regulated in Transcription
  misc_feature: MA Experiment 20001248 PARAMETER Experiment Name: At_Far-red-induction_P Parameter: Age (day) Value: 7
  misc_feature: MA Experiment 20001248 PARAMETER Experiment Name: At_Far-red-induction_P Parameter: Light Value: Far-red vs. White
  misc_feature: MA Experiment 20001248 PARAMETER Experiment Name: At_Far-red-induction_P Parameter: Organism Value: A. thaliana
  misc_feature: MA Experiment 20001248 PARAMETER Experiment Name: At_Far-red-induction_P Parameter: Plant Line Value: Columbia
  misc_feature: MA Experiment 20001248 PARAMETER Experiment Name: At_Far-red-induction_P Parameter: Timepoint (hr) Value: 4
  misc_feature: MA Experiment 20001248 PARAMETER Experiment Name: At_Far-red-induction_P Parameter: Tissue Value: Whole Plant
  misc_feature: MA Experiment ID: 20001450 Result: Down-regulated in Transcription
  misc_feature: MA Experiment 20001450 PARAMETER Experiment Name: At_Far-red-induction_P Parameter: Age (day) Value: 7
  misc_feature: MA Experiment 20001450 PARAMETER Experiment Name: At_Far-red-induction_P Parameter: Light Value: Far-red vs. White
  misc_feature: MA Experiment 20001450 PARAMETER Experiment Name: At_Far-red-induction_P Parameter: Organism Value: A. thaliana
  misc_feature: MA Experiment 20001450 PARAMETER Experiment Name: At_Far-red-induction_P Parameter: Plant Line Value: Columbia
  misc_feature: MA Experiment 20001450 PARAMETER Experiment Name: At_Far-red-induction_P Parameter: Timepoint (hr) Value: 8
  misc_feature: MA Experiment 20001450 PARAMETER Experiment Name: At_Far-red-induction_P Parameter: Tissue Value: Whole Plant
  misc_feature: MA Experiment ID: 20001554 Result: Down-regulated in Transcription
  misc_feature: MA Experiment 20001554 PARAMETER Experiment Name: At_Drought_Soil_Dry_P Parameter: Age (day) Value: 21
  misc_feature: MA Experiment 20001554 PARAMETER Experiment Name: At_Drought_Soil_Dry_P Parameter: Organism Value: A. thaliana
  misc_feature: MA Experiment 20001554 PARAMETER Experiment Name: At_Drought_Soil_Dry_P Parameter: Plant Line Value: WS
  misc_feature: MA Experiment 20001554 PARAMETER Experiment Name: At_Drought_Soil_Dry_P Parameter: Post Timepoint (hr) Value: None
  misc_feature: MA Experiment 20001554 PARAMETER Experiment Name: At_Drought_Soil_Dry_P Parameter: Post-Treatment Value: None
  misc_feature: MA Experiment 20001554 PARAMETER Experiment Name: At_Drought_Soil_Dry_P Parameter: Timepoint (day) Value: 7
  misc_feature: MA Experiment 20001554 PARAMETER Experiment Name: At_Drought_Soil_Dry_P Parameter: Treatment Value: Drought vs. No Drought
  misc_feature: MA Experiment ID: 20001555 Result: Down-regulated in Transcription
  misc_feature: MA Experiment 20001555 PARAMETER Experiment Name: At_Drought_Soil_Dry_P Parameter: Age (day) Value: 24
  misc_feature: MA Experiment 20001555 PARAMETER Experiment Name: At_Drought_Soil_Dry_P Parameter: Organism Value: A. thaliana
  misc_feature: MA Experiment 20001555 PARAMETER Experiment Name: At_Drought_Soil_Dry_P Parameter: Plant Line Value: WS
  misc_feature: MA Experiment 20001555 PARAMETER Experiment Name: At_Drought_Soil_Dry_P Parameter: Post Timepoint (hr) Value: None
  misc_feature: MA Experiment 20001555 PARAMETER Experiment Name: At_Drought_Soil_Dry_P Parameter: Post-Treatment Value: None
  misc_feature: MA Experiment 20001555 PARAMETER Experiment Name: At_Drought_Soil_Dry_P Parameter: Timepoint (day) Value: 10
  misc_feature: MA Experiment 20001555 PARAMETER Experiment Name: At_Drought_Soil_Dry_P Parameter: Treatment Value: Drought vs. No Drought
  misc_feature: MA Experiment ID: 20001558 Result: Up-regulated in Transcription
  misc_feature: MA Experiment 20001558 PARAMETER Experiment Name: At_Drought_Soil_Dry_P Parameter: Age (day) Value: 27
  misc_feature: MA Experiment 20001558 PARAMETER Experiment Name: At_Drought_Soil_Dry_P Parameter: Organism Value: A. thaliana
  misc_feature: MA Experiment 20001558 PARAMETER Experiment Name: At_Drought_Soil_Dry_P Parameter: Plant Line Value: WS
  misc_feature: MA Experiment 20001558 PARAMETER Experiment Name: At_Drought_Soil_Dry_P Parameter: Post Timepoint (hr) Value: 6
  misc_feature: MA Experiment 20001558 PARAMETER Experiment Name: At_Drought_Soil_Dry_P Parameter: Post-Treatment Value: Re-Water vs. No Drought
  misc_feature: MA Experiment 20001558 PARAMETER Experiment Name: At_Drought_Soil_Dry_P Parameter: Timepoint (day) Value: 13
  misc_feature: MA Experiment 20001558 PARAMETER Experiment Name: At_Drought_Soil_Dry_P Parameter: Treatment Value: Drought vs. No Drought
  misc_feature: MA Experiment ID: 20001560 Result: Up-regulated in Transcription
  misc_feature: MA Experiment 20001560 PARAMETER Experiment Name: At_Drought_Soil_Dry_P Parameter: Age (day) Value: 28
  misc_feature: MA Experiment 20001560 PARAMETER Experiment Name: At_Drought_Soil_Dry_P Parameter: Organism Value: A. thaliana
  misc_feature: MA Experiment 20001560 PARAMETER Experiment Name: At_Drought_Soil_Dry_P Parameter: Plant Line Value: WS
  misc_feature: MA Experiment 20001560 PARAMETER Experiment Name: At_Drought_Soil_Dry_P Parameter: Post Timepoint (hr) Value: None
  misc_feature: MA Experiment 20001560 PARAMETER Experiment Name: At_Drought_Soil_Dry_P Parameter: Post-Treatment Value: None
  misc_feature: MA Experiment 20001560 PARAMETER Experiment Name: At_Drought_Soil_Dry_P Parameter: Timepoint (day) Value: 14
  misc_feature: MA Experiment 20001560 PARAMETER Experiment Name: At_Drought_Soil_Dry_P Parameter: Treatment Value: Drought vs. No Drought
aggaagataagaaaatggaggagaagaaatctgaagagccacaagcgaaatcagaagataagaaaccagaagaagagaaaaagaaagaacctcaagagattgtgcttaagatttttatgcattgtgaaggttgtgctaaaaaaatccatagatgtcttaaaggctttgaaggagtggaggatgtaactactgattgtaagactagtaaagttgtggtgaaaggagagaaggcagatccattaaaagtgttgcaaagattgcagaggaagagccatcgtcaagtggagcttatctcaccgattccggagcctaaaccggtttctgatgaaccggagaaaaaggagaaggagaaacctaaacctgaggagaaaaaagaagaggtagtgacagtggtgctgagagttcacatgcattgtgaagcatgtgccatggagattcaaaagaggatcatgagaatgaaaggagtggagtctgtggaaccagattttaaagcatcacaagtgagcgtgaaaggagtttttacgccggaaaagctagttgagttcatttacaagagaatcgggaagcatgccgcggttgtcaagcaagatccgccgccaaaacctccggagaaagaaaaagaaacgaaagacaaagacgagaagaaaaaggaagagggacagcccaaagaaggaaaagaggccaaggaaaacggtggtggaggaggtgctaaaggcgatggtgctgccgcggaggaggggaacaaagtggtagacttgaagaagaacgaatatcagtaccagccaccgaggtaccccgtggagatgtttgcttatccaccgcagatattcagtgatgaaaaccccaatgcttgtaccattatataataaaatcgtcggtttaaggggttgtaggatttgttatttttttactttatttctatgcagaattttaatttaaatgtatttttggtaatttttagtttcaaccgaattgaatgatcg

SEQ ID NO: 99811 - protein, 287 aa, Arabidopsis thaliana
  peptide (1)..(287): Ceres Seq. ID no. 13603694
  misc_feature (1)..(117): Pfam Name: Dehydrin Pfam Description: Dehydrin
  misc_feature (1)..(273): Homolog of NCBI NO: 9758294 NR Description: contains similarity to ATFP3~gene_id:MLE2.16
  misc_feature (1)..(273): Homolog of NCBI NO: 18424719 NR Description: copper chaperone (CCH)-related [Arabidopsis >gi|13430830|gb|AAK26037.1|AF360327_1 unknown protein thaliana] >gi|15810597|gb|AAL07186.1| unknown protein
  misc_feature (5)..(155): Homolog of NCBI NO: 15241256 NR Description: copper chaperone (CCH)-related [Arabidopsis >gi|8777397|dbj|BAA96987.1| contains similarity to
  misc_feature (30)..(259): Homolog of NCBI NO: 4097547 NR Description: ATFP3 [Arabidopsis thaliana]
  misc_feature (6)..(262): Homolog of NCBI NO: 38344582 NR Description: OSJNBa0053B21.14 [Oryza sativa (japonica
  misc_feature (259)..(287): Homolog of NCBI NO: 38344582 NR Description: OSJNBa0053B21.14 [Oryza sativa (japonica
  misc_feature (154)..(287): Homolog of NCBI NO: 15241255 NR Description: hypothetical protein [Arabidopsis thaliana] contains similarity to ATFP3~gene_id:MFB16.13 [Arabidopsis
  misc_feature (5)..(229): Homolog of NCBI NO: 37532382 NR Description: putative ATFP3 [Oryza sativa (japonica
  misc_feature (7)..(274): Homolog of NCBI NO: 31193908 NR Description: putative heavy-metal-associated protein [Oryza
  misc_feature (272)..(286): Homolog of NCBI NO: 31193908 NR Description: putative heavy-metal-associated protein [Oryza
EDKKMEEKKSEEPQAKSEDKKPEEEKKKEPQEIVLKIFMHCEGCAKKIHRCLKGFEGVEDVTTDCKTSKVVVKGEKADPLKVLQRLQRKSHRQVELISPIPEPKPVSDEPEKKEKEKPKPEEKKEEVVTVVLRVHMHCEACAMEIQKRIMRMKGVESVEPDFKASQVSVKGVFTPEKLVEFIYKRIGKHAAVVKQDPPPKPPEKEKETKDKDEKKKEEGQPKEGKEAKENGGGGGAKGDGAAAEEGNKVVDLKKNEYQYQPPRYPVEMFAYPPQIFSDENPNACTII

SEQ ID NO: 99812 - protein, 283 aa, Arabidopsis thaliana
  peptide (1)..(283): Ceres Seq. ID no. 13603695
  misc_feature (1)..(113): Pfam Name: Dehydrin Pfam Description: Dehydrin
  misc_feature (1)..(269): Homolog of NCBI NO: 9758294 NR Description: contains similarity to ATFP3~gene_id:MLE2.16
  misc_feature (1)..(269): Homolog of NCBI NO: 18424719 NR Description: copper chaperone (CCH)-related [Arabidopsis >gi|13430830|gb|AAK26037.1|AF360327_1 unknown protein thaliana] >gi|15810597|gb|AAL07186.1| unknown protein
  misc_feature (1)..(151): Homolog of NCBI NO: 15241256 NR Description: copper chaperone (CCH)-related [Arabidopsis >gi|8777397|dbj|BAA96987.1| contains similarity to
  misc_feature (26)..(255): Homolog of NCBI NO: 4097547 NR Description: ATFP3 [Arabidopsis thaliana]
  misc_feature (2)..(258): Homolog of NCBI NO: 38344582 NR Description: OSJNBa0053B21.14 [Oryza sativa (japonica
  misc_feature (255)..(283): Homolog of NCBI NO: 38344582 NR Description: OSJNBa0053B21.14 [Oryza sativa (japonica
  misc_feature (150)..(283): Homolog of NCBI NO: 15241255 NR Description: hypothetical protein [Arabidopsis thaliana] contains similarity to ATFP3~gene_id:MFB16.13 [Arabidopsis
  misc_feature (1)..(225): Homolog of NCBI NO: 37532382 NR Description: putative ATFP3 [Oryza sativa (japonica
  misc_feature (3)..(270): Homolog of NCBI NO: 31193908 NR Description: putative heavy-metal-associated protein [Oryza
  misc_feature (268)..(282): Homolog of NCBI NO: 31193908 NR Description: putative heavy-metal-associated protein [Oryza
MEEKKSEEPQAKSEDKKPEEEKKKEPQEIVLKIFMHCEGCAKKIHRCLKGFEGVEDVTTDCKTSKVVVKGEKADPLKVLQRLQRKSHRQVELISPIPEPKPVSDEPEKKEKEKPKPEEKKEEVVTVVLRVHMHCEACAMEIQKRIMRMKGVESVEPDFKASQVSVKGVFTPEKLVEFIYKRIGKHAAVVKQDPPPKPPEKEKETKDKDEKKKEEGQPKEGKEAKENGGGGGAKGDGAAAEEGNKVVDLKKNEYQYQPPRYPVEMFAYPPQIFSDENPNACTII

SEQ ID NO: 99813 - protein, 249 aa, Arabidopsis thaliana
  peptide (1)..(249): Ceres Seq. ID no. 13603696
  misc_feature (1)..(79): Pfam Name: Dehydrin Pfam Description: Dehydrin
  misc_feature (1)..(235): Homolog of NCBI NO: 9758294 NR Description: contains similarity to ATFP3~gene_id:MLE2.16
  misc_feature (1)..(235): Homolog of NCBI NO: 18424719 NR Description: copper chaperone (CCH)-related [Arabidopsis >gi|13430830|gb|AAK26037.1|AF360327_1 unknown protein thaliana] >gi|15810597|gb|AAL07186.1| unknown protein
  misc_feature (1)..(117): Homolog of NCBI NO: 15241256 NR Description: copper chaperone (CCH)-related [Arabidopsis >gi|8777397|dbj|BAA96987.1| contains similarity to
  misc_feature (1)..(221): Homolog of NCBI NO: 4097547 NR Description: ATFP3 [Arabidopsis thaliana]
  misc_feature (1)..(224): Homolog of NCBI NO: 38344582 NR Description: OSJNBa0053B21.14 [Oryza sativa (japonica
  misc_feature (221)..(249): Homolog of NCBI NO: 38344582 NR Description: OSJNBa0053B21.14 [Oryza sativa (japonica
  misc_feature (116)..(249): Homolog of NCBI NO: 15241255 NR Description: hypothetical protein [Arabidopsis thaliana] contains similarity to ATFP3~gene_id:MFB16.13 [Arabidopsis
  misc_feature (1)..(191): Homolog of NCBI NO: 37532382 NR Description: putative ATFP3 [Oryza sativa (japonica
  misc_feature (1)..(236): Homolog of NCBI NO: 31193908 NR Description: putative heavy-metal-associated protein [Oryza
  misc_feature (234)..(248): Homolog of NCBI NO: 31193908 NR Description: putative heavy-metal-associated protein [Oryza
MHCEGCAKKIHRCLKGFEGVEDVTTDCKTSKVVVKGEKADPLKVLQRLQRKSHRQVELISPIPEPKPVSDEPEKKEKEKPKPEEKKEEVVTVVLRVHMHCEACAMEIQKRIMRMKGVESVEPDFKASQVSVKGVFTPEKLVEFIYKRIGKHAAVVKQDPPPKPPEKEKETKDKDEKKKEEGQPKEGKEAKENGGGGGAKGDGAAAEEGNKVVDLKKNEYQYQPPRYPVEMFAYPPQIFSDENPNACTII

SEQ ID NO: 99814 - DNA, 987 bp, Arabidopsis thaliana
  misc_feature (1)..(987): Ceres Seq. ID no. 13603713
  misc_feature: MA Experiment ID: 108595 Result: Down-regulated in Transcription
  misc_feature: MA Experiment 108595 PARAMETER Experiment Name: At_Ler-pi_Ovule_cDNA_P Parameter: Plant Line Value: null
  misc_feature: MA Experiment ID: 20000090 Result: Down-regulated in Transcription
  misc_feature: MA Experiment ID: 20000438 Result: Up-regulated in Transcription
  misc_feature: MA Experiment 20000438 PARAMETER Experiment Name: At_Shoots__P Parameter: Age (day) Value: 14
  misc_feature: MA Experiment 20000438 PARAMETER Experiment Name: At_Shoots__P Parameter: Tissue Value: Shoots vs. Whole Plant
taatcggcaaaattttctgctcctgagaaacaagtagagatactaaagatggaatctttgaactaaattcgaaaccttttaatgggtaccgagtcgggttcggatccagaatcgagctcaaacgggtggagccgtgctcgtggtctagttgtcaagactctggttttaattggcggtgctcttctcatcaagcgtctcactaaatccaccactcgtagagatcacgcccgtgtcgtctctcgttctctcaccggagagaagtttacgagggagcaagcgtcaagagatcctgataattacttcaacataagaatgctgagttgtccagctgctgaaatggtggatggttcagaggttttgtatctcgaacaggcattttggaggactcctcagaaaccgtttcgacaaagattatatatggtgaaaccgtgtccaaaagagctaaaatgtgatgttgaggtaagttcatatgcgatcagagatgctgaggaatacaaaaatttctgtgaccggcctaaggaccaacgcccacttcctgaagaagttattggtgacattggagagcatttgacgactatacacctgaattgttgtgaccgtgggaaacgttgcttgtacgaaggctcaacttcacctggtggatttccaaattcatggaacggggctagctattgtacttcagatcttgcagttctgaaaaacaatgagatacacctctgggatcgcggctttgatgagaatcgaaaccaggtttggggaccaaaggaaggtccgtacgagttcaagccagcgacatcatcgagcatcaacgaaaacttgtctgctttgaacatcctttatcaatcttctatcgataaaccaatccaagggtccctcatcttgcaagactagccaatttgcacccccttttctattgtctgatcttctctgtatcacacttagcctctttattcatctcatctcagccactttcaatatagttttggt

SEQ ID NO: 99815 - protein, 269 aa, Arabidopsis thaliana; identical to SEQ ID NO: 36927
  peptide (1)..(269): Ceres Seq. ID no. 13603714
  misc_feature (1)..(269): Homolog of NCBI NO: 15241343 NR Description: expressed protein [Arabidopsis thaliana] gene_id:K3K7.20~pir||S76207~similar to unknown protein thaliana] >gi|13877867|gb|AAK44011.1|AF370196_1 unknown protein
  misc_feature (1)..(269): Homolog of NCBI NO: 21554618 NR Description: unknown [Arabidopsis thaliana]
  misc_feature (44)..(238): Homolog of NCBI NO: 37520007 NR Description: hypothetical protein glr0438 [Gloeobacter

SEQ ID NO: 99816 - protein, 192 aa, Arabidopsis thaliana; identical to SEQ ID NO: 36928
  peptide (1)..(192): Ceres Seq. ID no. 13603715
  misc_feature (1)..(192): Homolog of NCBI NO: 15241343 NR Description: expressed protein [Arabidopsis thaliana] gene_id:K3K7.20~pir||S76207~similar to unknown protein thaliana] >gi|13877867|gb|AAK44011.1|AF370196_1 unknown protein
  misc_feature (1)..(192): Homolog of NCBI NO: 21554618 NR Description: unknown [Arabidopsis thaliana]
  misc_feature (1)..(161): Homolog of NCBI NO: 37520007 NR Description: hypothetical protein glr0438 [Gloeobacter

SEQ ID NO: 99817 - protein, 184 aa, Arabidopsis thaliana; identical to SEQ ID NO: 36929
  peptide (1)..(184): Ceres Seq. ID no. 13603716
  misc_feature (1)..(184): Homolog of NCBI NO: 15241343 NR Description: expressed protein [Arabidopsis thaliana] gene_id:K3K7.20~pir||S76207~similar to unknown protein thaliana] >gi|13877867|gb|AAK44011.1|AF370196_1 unknown protein
  misc_feature (1)..(184): Homolog of NCBI NO: 21554618 NR Description: unknown [Arabidopsis thaliana]
  misc_feature (1)..(153): Homolog of NCBI NO: 37520007 NR Description: hypothetical protein glr0438 [Gloeobacter

SEQ ID NO: 99818 - DNA, 836 bp, Arabidopsis thaliana
  misc_feature (1)..(836): Ceres Seq. ID no. 13603724
  misc_feature: MA Experiment ID: 108435 Result: Down-regulated in Transcription
  misc_feature: MA Experiment 108435 PARAMETER Experiment Name: At_stm_Mutants_cDNA_P Parameter: Plant Line Value: wt Landsburg vs stm
  misc_feature: MA Experiment 108435 PARAMETER Experiment Name: At_stm_Mutants_cDNA_P Parameter: Tissue Value: Shoot Apical Meristem Region
  misc_feature: MA Experiment ID: 108488 Result: Up-regulated in Transcription
  misc_feature: MA Experiment ID: 108561 Result: Down-regulated in Transcription
  misc_feature: MA Experiment 108561 PARAMETER Experiment Name: At_100uM_ABA_cDNA_P Parameter: Timepoint (hr) Value: 6
  misc_feature: MA Experiment 108561 PARAMETER Experiment Name: At_100uM_ABA_cDNA_P Parameter: Tissue Value: Aerial
  misc_feature: MA Experiment 108561 PARAMETER Experiment Name: At_100uM_ABA_cDNA_P Parameter: Treatment Value: 100uM ABA vs. No Treatment
  misc_feature: MA Experiment ID: 108595 Result: Down-regulated in Transcription
  misc_feature: MA Experiment 108595 PARAMETER Experiment Name: At_Ler-pi_Ovule_cDNA_P Parameter: Plant Line Value: null
  misc_feature: MA Experiment ID: 20000069 Result: Down-regulated in Transcription
  misc_feature: MA Experiment 20000069 PARAMETER Experiment Name: At_100uM_ABA_Mutants_cDNA_P Parameter: Plant Line Value: CS23
  misc_feature: MA Experiment 20000069 PARAMETER Experiment Name: At_100uM_ABA_Mutants_cDNA_P Parameter: Timepoint (hr) Value: 6
  misc_feature: MA Experiment 20000069 PARAMETER Experiment Name: At_100uM_ABA_Mutants_cDNA_P Parameter: Tissue Value: Aerial
  misc_feature: MA Experiment 20000069 PARAMETER Experiment Name: At_100uM_ABA_Mutants_cDNA_P Parameter: Treatment Value: 100uM ABA vs. No Treatment
  misc_feature: MA Experiment ID: 20000070 Result: Down-regulated in Transcription
  misc_feature: MA Experiment 20000070 PARAMETER Experiment Name: At_100uM_ABA_Mutants_cDNA_P Parameter: Plant Line Value: CS24
  misc_feature: MA Experiment 20000070 PARAMETER Experiment Name: At_100uM_ABA_Mutants_cDNA_P Parameter: Timepoint (hr) Value: 6
  misc_feature: MA Experiment 20000070 PARAMETER Experiment Name: At_100uM_ABA_Mutants_cDNA_P Parameter: Tissue Value: Aerial
  misc_feature: MA Experiment 20000070 PARAMETER Experiment Name: At_100uM_ABA_Mutants_cDNA_P Parameter: Treatment Value: 100uM ABA vs. No Treatment
  misc_feature: MA Experiment ID: 20000071 Result: Down-regulated in Transcription
  misc_feature: MA Experiment 20000071 PARAMETER Experiment Name: At_100uM_ABA_Mutants_cDNA_P Parameter: Plant Line Value: CS8104
  misc_feature: MA Experiment 20000071 PARAMETER Experiment Name: At_100uM_ABA_Mutants_cDNA_P Parameter: Timepoint (hr) Value: 6
  misc_feature: MA Experiment 20000071 PARAMETER Experiment Name: At_100uM_ABA_Mutants_cDNA_P Parameter: Tissue Value: Aerial
  misc_feature: MA Experiment 20000071 PARAMETER Experiment Name: At_100uM_ABA_Mutants_cDNA_P Parameter: Treatment Value: 100uM ABA vs. No Treatment
  misc_feature: MA Experiment ID: 20000072 Result: Down-regulated in Transcription
  misc_feature: MA Experiment 20000072 PARAMETER Experiment Name: At_100uM_ABA_Mutants_cDNA_P Parameter: Plant Line Value: CS8105
  misc_feature: MA Experiment 20000072 PARAMETER Experiment Name: At_100uM_ABA_Mutants_cDNA_P Parameter: Timepoint (hr) Value: 6
  misc_feature: MA Experiment 20000072 PARAMETER Experiment Name: At_100uM_ABA_Mutants_cDNA_P Parameter: Tissue Value: Aerial
  misc_feature: MA Experiment 20000072 PARAMETER Experiment Name: At_100uM_ABA_Mutants_cDNA_P Parameter: Treatment Value: 100uM ABA vs. No Treatment
  misc_feature: MA Experiment ID: 20000086 Result: Down-regulated in Transcription
  misc_feature: MA Experiment 20000086 PARAMETER Experiment Name: At_100uM_ABA_Mutants_cDNA_P Parameter: Plant Line Value: CS22
  misc_feature: MA Experiment 20000086 PARAMETER Experiment Name: At_100uM_ABA_Mutants_cDNA_P Parameter: Timepoint (hr) Value: 6
  misc_feature: MA Experiment 20000086 PARAMETER Experiment Name: At_100uM_ABA_Mutants_cDNA_P Parameter: Tissue Value: Aerial
  misc_feature: MA Experiment 20000086 PARAMETER Experiment Name: At_100uM_ABA_Mutants_cDNA_P Parameter: Treatment Value: 100uM ABA vs. No Treatment
  misc_feature: MA Experiment ID: 20000087 Result: Down-regulated in Transcription
  misc_feature: MA Experiment 20000087 PARAMETER Experiment Name: At_100uM_ABA_Mutants_cDNA_P Parameter: Plant Line Value: WS
  misc_feature: MA Experiment 20000087 PARAMETER Experiment Name: At_100uM_ABA_Mutants_cDNA_P Parameter: Timepoint (hr) Value: 6
  misc_feature: MA Experiment 20000087 PARAMETER Experiment Name: At_100uM_ABA_Mutants_cDNA_P Parameter: Tissue Value: Aerial
  misc_feature: MA Experiment 20000087 PARAMETER Experiment Name: At_100uM_ABA_Mutants_cDNA_P Parameter: Treatment Value: 100uM ABA vs. No Treatment
  misc_feature: MA Experiment ID: 20000088 Result: Down-regulated in Transcription
  misc_feature: MA Experiment 20000088 PARAMETER Experiment Name: At_100uM_ABA_Mutants_cDNA_P Parameter: Plant Line Value: Landsberg
  misc_feature: MA Experiment 20000088 PARAMETER Experiment Name: At_100uM_ABA_Mutants_cDNA_P Parameter: Timepoint (hr) Value: 6
  misc_feature: MA Experiment 20000088 PARAMETER Experiment Name: At_100uM_ABA_Mutants_cDNA_P Parameter: Tissue Value: Aerial
  misc_feature: MA Experiment 20000088 PARAMETER Experiment Name: At_100uM_ABA_Mutants_cDNA_P Parameter: Treatment Value: 100uM ABA vs. No Treatment
  misc_feature: MA Experiment ID: 20000089 Result: Down-regulated in Transcription
  misc_feature: MA Experiment ID: 20000090 Result: Down-regulated in Transcription
  misc_feature: MA Experiment ID: 20000113 Result: Up-regulated in Transcription
  misc_feature: MA Experiment 20000113 PARAMETER Experiment Name: At_42deg_Heat_cDNA_P Parameter: Temperature (deg C) Value: 42 vs. 22
  misc_feature: MA Experiment 20000113 PARAMETER Experiment Name: At_42deg_Heat_cDNA_P Parameter: Timepoint (hr) Value: 8
  misc_feature: MA Experiment 20000113 PARAMETER Experiment Name: At_42deg_Heat_cDNA_P Parameter: Tissue Value: Aerial
  misc_feature: MA Experiment ID: 20000117 Result: Down-regulated in Transcription
  misc_feature: MA Experiment 20000117 PARAMETER Experiment Name: At_100uM_ABA_Mutants_cDNA_P Parameter: Plant Line Value: Columbia
  misc_feature: MA Experiment 20000117 PARAMETER Experiment Name: At_100uM_ABA_Mutants_cDNA_P Parameter: Timepoint (hr) Value: 6
  misc_feature: MA Experiment 20000117 PARAMETER Experiment Name: At_100uM_ABA_Mutants_cDNA_P Parameter: Tissue Value: Aerial
  misc_feature: MA Experiment 20000117 PARAMETER Experiment Name: At_100uM_ABA_Mutants_cDNA_P Parameter: Treatment Value: 100uM ABA vs. No Treatment
  misc_feature: MA Experiment ID: 20000184 Result: Up-regulated in Transcription
  misc_feature: MA Experiment 20000184 PARAMETER Experiment Name: At_Shoots__P Parameter: Age (day) Value: 7
  misc_feature: MA Experiment 20000184 PARAMETER Experiment Name: At_Shoots__P Parameter: Tissue Value: Shoots vs. Whole Plant
  misc_feature: MA Experiment ID: 20000185 Result: Down-regulated in Transcription
  misc_feature: MA Experiment 20000185 PARAMETER Experiment Name: At_Roots__P Parameter: Age (day) Value: 7 vs. 21
  misc_feature: MA Experiment 20000185 PARAMETER Experiment Name: At_Roots__P Parameter: Organism Value: A. thaliana
  misc_feature: MA Experiment 20000185 PARAMETER Experiment Name: At_Roots__P Parameter: Tissue Value: Roots vs. Whole Plant
  misc_feature: MA Experiment ID: 20000227 Result: Down-regulated in Transcription
  misc_feature: MA Experiment 20000227 PARAMETER Experiment Name: At_Root-Tips-vs-Tops_P Parameter: Tissue Value: Root Tips vs. Root Tops
  misc_feature: MA Experiment ID: 20000439 Result: Down-regulated in Transcription
  misc_feature: MA Experiment 20000439 PARAMETER Experiment Name: At_Roots__P Parameter: Age (day) Value: 14 vs. 21
  misc_feature: MA Experiment 20000439 PARAMETER Experiment Name: At_Roots__P Parameter: Organism Value: A. thaliana
  misc_feature: MA Experiment 20000439 PARAMETER Experiment Name: At_Roots__P Parameter: Tissue Value: Roots vs. Whole Plant
  misc_feature: MA Experiment ID: 20000794 Result: Down-regulated in Transcription
  misc_feature: MA Experiment 20000794 PARAMETER Experiment Name: At_Petals_P Parameter: Age (day) Value: 23-25 days
  misc_feature: MA Experiment 20000794 PARAMETER Experiment Name: At_Petals_P Parameter: Plant Line Value: WS
  misc_feature: MA Experiment 20000794 PARAMETER Experiment Name: At_Petals_P Parameter: Tissue Value: Petals vs. Whole plant
gctctctaaaaaccaaaactcttatcttcggtacagagcaaatcacagctcccgatggccgccacgtcatcatcaccgccgtgtaacatctccgcgtcctccctcctcctccgtcaaccttctcgctcaatccttaaagtgttcggtttattaccacctgtaagtaggaataaccgtaaactcggccggttaacggtgacccggtctaatctggcgcaggattttcttggtgacttcggagctcgtgacccttacccggaggagatagcgagtcaattcggagataaagtgttgggatgccaaagcactgagcacaagattttgataccaaacgcatctgttttgtctctctcccagcttcagtgttcccctgtttcgtcttcacagcctcctttgtccggcgatgatgccagaactctcctccacaaggttttgggatggagtatagtggataatgaagcgggtggtctgaaaataaggtgtatgtggaaagtgagggattttgggtgcggtgttgaactcataaacaggatccataaggttgctgaagcttctggtcattacccttctcttcacttggaaagtcctacccaagttcgagctgaactatttacctcttctatcggagggttgagcatgaatgatttcataatggcggctaaaatagatgatatcaagacttctgatctttcccctaggaaaagagcttgggcgtgatcttcttttcattattttggaacatttttgtttgatagtatgtaatgtatgtgatgtattctaaattgtgtgtgatcggtctacatgtcgagttatatagaaagcattgtcataaccgc

SEQ ID NO: 99819 - protein, 220 aa, Arabidopsis thaliana; identical to SEQ ID NO: 28149
  peptide (1)..(220): Ceres Seq. ID no. 13603725
  misc_feature (108)..(209): Pfam Name: Pterin 4 alpha carbinolamine dehydratase Pfam Description: Pterin 4 alpha carbinolamine dehydratase
  misc_feature (1)..(220): Homolog of NCBI NO: 15241386 NR Description: expressed protein [Arabidopsis thaliana] gene_id:MWD22.5~similar to unknown protein~sp|P43335 [Arabidopsis >gi|15529258|gb|AAK97723.1| AT5g51110/MWD22_5 [Arabidopsis
  misc_feature (1)..(220): Homolog of NCBI NO: 21617915 NR Description: unknown [Arabidopsis thaliana]
  misc_feature (95)..(217): Homolog of NCBI NO: 26449459 NR Description: unknown protein [Arabidopsis thaliana]
  misc_feature (95)..(217): Homolog of NCBI NO: 30690915 NR Description: expressed protein [Arabidopsis thaliana]
  misc_feature (100)..(207): Homolog of NCBI NO: 32473155 NR Description: probable pterin-4-alpha-carbinolamine dehydratase
  misc_feature (99)..(207): Homolog of NCBI NO: 21673181 NR Description: pterin-4-alpha-carbinolamine dehydratase
  misc_feature (95)..(205): Homolog of NCBI NO: 30248108 NR Description: Pterin 4 alpha carbinolamine dehydratase europaea ATCC 19718] >gi|30179993|emb|CAD83988.1| Pterin 4 alpha

SEQ ID NO: 99820 - DNA, 1469 bp, Arabidopsis thaliana
  misc_feature (1)..(1469): Ceres Seq. ID no. 13603740
  misc_feature: MA Experiment ID: 108605 Result: Down-regulated in Transcription
  misc_feature: MA Experiment 108605 PARAMETER Experiment Name: At_100uM_ABA_cDNA_P Parameter: Timepoint (hr) Value: 6
  misc_feature: MA Experiment 108605 PARAMETER Experiment Name: At_100uM_ABA_cDNA_P Parameter: Tissue Value: Aerial
  misc_feature: MA Experiment 108605 PARAMETER Experiment Name: At_100uM_ABA_cDNA_P Parameter: Treatment Value: 100uM ABA vs. No Treatment
  misc_feature: MA Experiment ID: 108607 Result: Down-regulated in Transcription
  misc_feature: MA Experiment 108607 PARAMETER Experiment Name: At_100uM_ABA_cDNA_P Parameter: Timepoint (hr) Value: 4
  misc_feature: MA Experiment 108607 PARAMETER Experiment Name: At_100uM_ABA_cDNA_P Parameter: Tissue Value: Aerial
  misc_feature: MA Experiment 108607 PARAMETER Experiment Name: At_100uM_ABA_cDNA_P Parameter: Treatment Value: 100uM ABA vs. No Treatment
  misc_feature: MA Experiment ID: 20000227 Result: Up-regulated in Transcription
  misc_feature: MA Experiment 20000227 PARAMETER Experiment Name: At_Root-Tips-vs-Tops_P Parameter: Tissue Value: Root Tips vs. Root Tops
  misc_feature: MA Experiment ID: 20000437 Result: Down-regulated in Transcription
  misc_feature: MA Experiment 20000437 PARAMETER Experiment Name: At_Drought_P Parameter: Age (day) Value: 8
  misc_feature: MA Experiment 20000437 PARAMETER Experiment Name: At_Drought_P Parameter: Organism Value: A. thaliana
  misc_feature: MA Experiment 20000437 PARAMETER Experiment Name: At_Drought_P Parameter: Plant Line Value: WS
  misc_feature: MA Experiment 20000437 PARAMETER Experiment Name: At_Drought_P Parameter: Timepoint (hr) Value: 24
  misc_feature: MA Experiment 20000437 PARAMETER Experiment Name: At_Drought_P Parameter: Tissue Value: Whole Plant
  misc_feature: MA Experiment 20000437 PARAMETER Experiment Name: At_Drought_P Parameter: Treatment Value: Drought vs. No Drought
  misc_feature: MA Experiment ID: 20000438 Result: Up-regulated in Transcription
  misc_feature: MA Experiment 20000438 PARAMETER Experiment Name: At_Shoots__P Parameter: Age (day) Value: 14
  misc_feature: MA Experiment 20000438 PARAMETER Experiment Name: At_Shoots__P Parameter: Tissue Value: Shoots vs. Whole Plant
  misc_feature: MA Experiment ID: 20001904 Result: Down-regulated in Transcription
  misc_feature: MA Experiment 20001904 PARAMETER Experiment Name: At_Drought_Reproduction_P Parameter: Age (day) Value: 37
  misc_feature: MA Experiment 20001904 PARAMETER Experiment Name: At_Drought_Reproduction_P Parameter: Organism Value: A. thaliana
  misc_feature: MA Experiment 20001904 PARAMETER Experiment Name: At_Drought_Reproduction_P Parameter: Plant Line Value: WS
  misc_feature: MA Experiment 20001904 PARAMETER Experiment Name: At_Drought_Reproduction_P Parameter: Timepoint (day) Value: 7
  misc_feature: MA Experiment 20001904 PARAMETER Experiment Name: At_Drought_Reproduction_P Parameter: Tissue Value: Rosettes
  misc_feature: MA Experiment 20001904 PARAMETER Experiment Name: At_Drought_Reproduction_P Parameter: Treatment Value: Drought vs. No Drought
  misc_feature: MA Experiment ID: 20001905 Result: Down-regulated in Transcription
  misc_feature: MA Experiment 20001905 PARAMETER Experiment Name: At_Drought_Reproduction_P Parameter: Age (day) Value: 40
  misc_feature: MA Experiment 20001905 PARAMETER Experiment Name: At_Drought_Reproduction_P Parameter: Organism Value: A. thaliana
  misc_feature: MA Experiment 20001905 PARAMETER Experiment Name: At_Drought_Reproduction_P Parameter: Plant Line Value: WS
  misc_feature: MA Experiment 20001905 PARAMETER Experiment Name: At_Drought_Reproduction_P Parameter: Timepoint (day) Value: 10
  misc_feature: MA Experiment 20001905 PARAMETER Experiment Name: At_Drought_Reproduction_P Parameter: Tissue Value: Rosettes
  misc_feature: MA Experiment 20001905 PARAMETER Experiment Name: At_Drought_Reproduction_P Parameter: Treatment Value: Drought vs. No Drought
atcttcctcttcatcttcttctgttctctctctataaatacaagtttactcttcctcttcctcaaatctctgactcttctctgcattatctcttcgatctctccaactctccaaaaccttcctcagatgggaactaccaatggaacagactatggagcatacacatacaaggagctagaaagagagcaatattggccatctgagaatctcaagatatcaataacaggagctggaggtttcattgcatctcacattgctcgtcgtttgaagcacgaaggtcattacgtgattgcttctgactggaaaaagaatgaacacatgactgaagacatgttctgtgatgagttccatcttgttgatcttagggttatggagaattgtctcaaagttactgaaggagttgatcatgtttttaacttagctgctgatatgggtggtatgggttttatccagagtaatcactctgtgattatgtataataatactatgattagtttcaatatgattgaggctgctaggatcaatgggattaagaggttcttttatgcttcgagtgcttgtatctatccagagtttaagcagttggagactactaatgtgagcttgaaggagtcagatgcttggcctgcagagcctcaagatgcttatggtttggagaagcttgctacggaggagttgtgtaagcattacaacaaagattttggtattgagtgtcgaattggaaggttccataacatttatggtccttttggaacatggaaaggtggaagggagaaggctccagctgctttctgtaggaaggctcagacttccactgataggtttgagatgtggggagatgggcttcagacccgttcttttacctttatcgatgagtgtgttgaaggtgtactcaggttgacaaaatcagatttccgtgagccggtgaacatcggaagcgatgagatggtgagcatgaatgagatggctgagatggttctcagctttgaggaaaagaagcttccaattcaccacattcctggcccggaaggtgttcgtggtcgtaactcagacaacaatctgatcaaagaaaagcttggttgggctcctaatatgagattgaaggaggggcttagaataacctacttctggataaaggaacagatcgagaaagagaaagcaaagggaagcgatgtgtcgctttacgggtcatcaaaggtggttggaactcaagcaccggttcagctaggctcactccgcgcggctgatggaaaagagtgaagttcaccaaagtataagtcaagctcaaatatggccttttaagttcagcaaaatgtttagatatatttttaggtagcttcctattaaaaaagcaataataagtgttttggattttggttccttctattctgctaatccttgtttatgtttagttgaaaaagtttgcttgcattgttaagtctgttatcatattattgtggtcctttcat

SEQ ID NO: 99821 - protein, 419 aa, Arabidopsis thaliana
  peptide (1)..(419): Ceres Seq. ID no. 13603741
  misc_feature (72)..(382): Pfam Name: NAD dependent epimerase/dehydratase family Pfam Description: NAD dependent epimerase/dehydratase family
  misc_feature (43)..(419): Homolog of NCBI NO: 15241945 NR Description: NAD-dependent epimerase/dehydratase family thaliana] >gi|16323113|gb|AAL15291.1| AT5g28840/F7P1_20 thaliana] >gi|16323180|gb|AAL15324.1| AT5g28840/F7P1_20
  misc_feature (43)..(419): Homolog of NCBI NO: 37534380 NR Description: putative epimerase/dehydratase [Oryza sativa
  misc_feature (53)..(384): Homolog of NCBI NO: 28170704 NR Description: Ata17 protein [Saccharothrix mutabilis subsp.
  misc_feature (74)..(388): Homolog of NCBI NO: 9937230 NR Description: sugar epimerase BlmG [Streptomyces verticillus]
  misc_feature (74)..(221): Homolog of NCBI NO: 23008810 NR Description: hypothetical protein [Magnetospirillum
  misc_feature (71)..(380): Homolog of NCBI NO: 22298175 NR Description: GDP-fucose synthetase [Thermosynechococcus
  misc_feature (71)..(383): Homolog of NCBI NO: 24212751 NR Description: dTDPglucose 4,6-dehydratase [Leptospira
  misc_feature (68)..(384): Homolog of NCBI NO: 37523361 NR Description: similar to GDP-fucose synthetase [Gloeobacter
  misc_feature (68)..(380): Homolog of NCBI NO: 17232318 NR Description: dTDP-glucose dehydratase [Nostoc sp. PCC 7120]
  misc_feature (72)..(388): Homolog of NCBI NO: 23500289 NR Description: NAD-dependent epimerase/dehydratase family
IFLFIFFCSLSINTSLLFLFLKSLTLLCIISSISPTLQNLPQMGTTNGTDYGAYTYKELEREQYWPSENLKISITGAGGFIASHIARRLKHEGHYVIASDWKKNEHMTEDMFCDEFHLVDLRVMENCLKVTEGVDHVFNLAADMGGMGFIQSNHSVIMYNNTMISFNMIEAARINGIKRFFYASSACIYPEFKQLETTNVSLKESDAWPAEPQDAYGLEKLATEELCKHYNKDFGIECRIGRFHNIYGPFGTWKGGREKAPAAFCRKAQTSTDRFEMWGDGLQTRSFTFIDECVEGVLRLTKSDFREPVNIGSDEMVSMNEMAEMVLSFEEKKLPIHHIPGPEGVRGRNSDNNLIKEKLGWAPNMRLKEGLRITYFWIKEQIEKEKAKGSDVSLYGSSKVVGTQAPVQLGSLRAADGKE

SEQ ID NO: 99822 - protein, 377 aa, Arabidopsis thaliana; identical to SEQ ID NO: 23828
  peptide (1)..(377): Ceres Seq. ID no. 13603742
  misc_feature (30)..(340): Pfam Name: NAD dependent epimerase/dehydratase family Pfam Description: NAD dependent epimerase/dehydratase family
  misc_feature (1)..(377): Homolog of NCBI NO: 15241945 NR Description: NAD-dependent epimerase/dehydratase family thaliana] >gi|16323113|gb|AAL15291.1| AT5g28840/F7P1_20 thaliana] >gi|16323180|gb|AAL15324.1| AT5g28840/F7P1_20
  misc_feature (1)..(377): Homolog of NCBI NO: 37534380 NR Description: putative epimerase/dehydratase [Oryza sativa
  misc_feature (11)..(342): Homolog of NCBI NO: 28170704 NR Description: Ata17 protein [Saccharothrix mutabilis subsp.
  misc_feature (32)..(346): Homolog of NCBI NO: 9937230 NR Description: sugar epimerase BlmG [Streptomyces verticillus]
  misc_feature (32)..(179): Homolog of NCBI NO: 23008810 NR Description: hypothetical protein [Magnetospirillum
  misc_feature (29)..(338): Homolog of NCBI NO: 22298175 NR Description: GDP-fucose synthetase [Thermosynechococcus
  misc_feature (29)..(341): Homolog of NCBI NO: 24212751 NR Description: dTDPglucose 4,6-dehydratase [Leptospira
  misc_feature (26)..(342): Homolog of NCBI NO: 37523361 NR Description: similar to GDP-fucose synthetase [Gloeobacter
  misc_feature (26)..(338): Homolog of NCBI NO: 17232318 NR Description: dTDP-glucose dehydratase [Nostoc sp. PCC 7120]
  misc_feature (30)..(346): Homolog of NCBI NO: 23500289 NR Description: NAD-dependent epimerase/dehydratase family

SEQ ID NO: 99823 - protein, 313 aa, Arabidopsis thaliana; identical to SEQ ID NO: 23829
  peptide (1)..(313): Ceres Seq. ID no. 13603743
  misc_feature (1)..(276): Pfam Name: NAD dependent epimerase/dehydratase family Pfam Description: NAD dependent epimerase/dehydratase family
  misc_feature (1)..(313): Homolog of NCBI NO: 15241945 NR Description: NAD-dependent epimerase/dehydratase family thaliana] >gi|16323113|gb|AAL15291.1| AT5g28840/F7P1_20 thaliana] >gi|16323180|gb|AAL15324.1| AT5g28840/F7P1_20
  misc_feature (1)..(313): Homolog of NCBI NO: 37534380 NR Description: putative epimerase/dehydratase [Oryza sativa
  misc_feature (1)..(278): Homolog of NCBI NO: 28170704 NR Description: Ata17 protein [Saccharothrix mutabilis subsp.
  misc_feature (1)..(282): Homolog of NCBI NO: 9937230 NR Description: sugar epimerase BlmG [Streptomyces verticillus]
  misc_feature (1)..(115): Homolog of NCBI NO: 23008810 NR Description: hypothetical protein [Magnetospirillum
  misc_feature (1)..(274): Homolog of NCBI NO: 22298175 NR Description: GDP-fucose synthetase [Thermosynechococcus
  misc_feature (1)..(277): Homolog of NCBI NO: 24212751 NR Description: dTDPglucose 4,6-dehydratase [Leptospira
  misc_feature (1)..(278): Homolog of NCBI NO: 37523361 NR Description: similar to GDP-fucose synthetase [Gloeobacter
  misc_feature (1)..(274): Homolog of NCBI NO: 17232318 NR Description: dTDP-glucose dehydratase [Nostoc sp. PCC 7120]
  misc_feature (1)..(282): Homolog of NCBI NO: 23500289 NR Description: NAD-dependent epimerase/dehydratase family

SEQ ID NO: 99824 - DNA, 2139 bp, Arabidopsis thaliana
  misc_feature (1)..(2139): Ceres Seq. ID no. 13603744
  misc_feature: MA Experiment ID: 20000315 Result: Down-regulated in Transcription
  misc_feature: MA Experiment 20000315 PARAMETER Experiment Name: At_14day_Shoots-Roots_Sub_P Parameter: Age (day) Value: 14
  misc_feature: MA Experiment 20000315 PARAMETER Experiment Name: At_14day_Shoots-Roots_Sub_P Parameter: Organism Value: A. thaliana
  misc_feature: MA Experiment 20000315 PARAMETER Experiment Name: At_14day_Shoots-Roots_Sub_P Parameter: Plant Line Value: WS
  misc_feature: MA Experiment 20000315 PARAMETER Experiment Name: At_14day_Shoots-Roots_Sub_P Parameter: Tissue Value: Shoots vs. Whole Plant
gggtatctctctaatttatttatttatttcagattgctcaaaagaataaataaataaaagaatttggctgtctcatttccttgttcggaatcggagaagaaggaagactagattcgatgtgttggtgaagaagatctcgactttgttcaaaattccaatttcgctcgcctcaaagatcattctctcatcttctcgactttgatgcgattgattaaatatggtggatacggttattcccggagatatggcttgtttggatgcagatttgttgcagcttcaggaaatgtcttcctttgttctcaattctaaacctggattcactcagaagctcttcgaccagtggctttctcttcccgaagctcagcgacaggttggatcattgcttaaggatgctgtagctggagctcctatcaatgttactggaagtgcatcgggttctaattctgccactataccatctatgtttcctgcgggaagtgctcctccgctttcaccaaggagttgtggttcaccccgtacaaccaaacagagagccccttctaacttaggttctactctcaaagtagtcaacgagcctgttaaagagcctatacctcagttttatttccaaaatggtcgccctccaccaagcgagattaaagagcaatgtatgtttagaatcaatcacttcttttatggtcacatggatggcttgcagatacaagaattcaagttagtcaccagagaaatctgcaagctcccatctttcttctccacttcccttttccggaagatcgatctcaacaatacaggttttgttactagagatgcatttattgatttttgggtaaacgggaacatgttgataatggatacaacgacccaaatcttcaagatactaaagcagaaagatcagagtttcattgttaaggatgatttcaaaccactactcaaagaactgttggcgacgcatcctgggctagagttcctgcaatccacacctgaattccaagaaagatatgctgaaactgtcacctaccgaatattttattacataaatagatctggcaatggtcgaattacatttagggagcttaaacggggaaacttaattgatgctatgctacatgctgatgaagaagaagatattaacaaagtgttgagatacttctcgtatgagcatttctatgtcatatactgcaagttctgggagctggatacggatcacgatttcctgattgacaaagaaaatcttatgcgatatggaaaccatgctcttacctaccggattgtcgacagaatattctcccaggttgctaggaagttcactaacaaagttgaagggaagatggggtatgaggactttgtctatttcattcttgcggaagaagataaatcgtcagtgcctagcctagaatattggtttaagtgcatagacttggatgcaaatgggattattacgcgaaatgagatgcaattcttttatgaagagcagttgcatagaatggagtgcatggcgcaagaggctgttcttttcgaggatatcttatgtcagatgattgatatgatcggacctgagaacgaaagccatataacgctgcatgacctgaaaggctcaaagctctctggaaacgtcttcaacatcctatttaatctcaacaaatttatggcatttgaaacccgggatccattcctcattcgtcaggagcgagagaaccctacattgacagattgggaccgttttgcacatagagagtatattaggctatcaatggaagaagatgttgaagatgcatctaatggaagtgctgaggtttgggatgagtcgtcgctggaggctcccttttgagttcataaagaagagaaatgtaaagtccctgagaagaacatttggagctttgttgaggaaggaaagtgaaaaacaaacgaaaagccggtagtatcctctgttgaataccatacttagcttggatttgttttctaacttctctttatttgttagctgattctacagttatatttattaacaatcgtctagattttacagtcttcttcacctgtattgcattcactttgctctgatgtttctatctctgggtgttacttcatcatctccagatgttgagacttgtgaatttcaatgctatagttcctttaatt

SEQ ID NO: 99825 - protein, 536 aa, Arabidopsis thaliana
  peptide (1)..(536): Ceres Seq. ID no. 13603745
  misc_feature (391)..(419): Pfam Name: EF hand Pfam Description: EF hand
  misc_feature (1)..(536): Homolog of NCBI NO: 15241978 NR Description: protein phosphatase 2A regulatory subunit protein [Arabidopsis thaliana] >gi|17380962|gb|AAL36293.1| protein phosphatase 2A regulatory subunit B [Arabidopsis
  misc_feature (1)..(536): Homolog of NCBI NO: 18421273 NR Description: protein phosphatase 2A regulatory subunit
  misc_feature (13)..(536): Homolog of NCBI NO: 15221817 NR Description: protein phosphatase 2A 72 kDa regulatory subunit [Arabidopsis thaliana] >gi|25405733|pir||D96586 hypothetical
  misc_feature (186)..(536): Homolog of NCBI NO: 37535364 NR Description: putative protein phosphatase 2A regulatory
  misc_feature (9)..(196): Homolog of NCBI NO: 37535364 NR Description: putative protein phosphatase 2A regulatory
  misc_feature (9)..(536): Homolog of NCBI NO: 15240089 NR Description: protein phosphatase 2A 62 kDa B regulatory (gb|AAD45158.1) [Arabidopsis thaliana] protein phosphatase 2A 62 kDa B'' regulatory subunit [Arabidopsis
  misc_feature (6)..(536): Homolog of NCBI NO: 28393301 NR Description: putative protein phosphatase 2A [Arabidopsis >gi|28827268|gb|AAO50478.1| putative protein phosphatase 2A
  misc_feature (186)..(489): Homolog of NCBI NO: 16905168 NR Description: putative phosphatase subunit, 3'-partial [Oryza
  misc_feature (9)..(196): Homolog of NCBI NO: 16905168 NR Description: putative phosphatase subunit, 3'-partial [Oryza
  misc_feature (6)..(536): Homolog of NCBI NO: 15219596 NR Description: protein phosphatase 2A -related [Arabidopsis
MVDTVIPGDMACLDADLLQLQEMSSFVLNSKPGFTQKLFDQWLSLPEAQRQVGSLLKDAVAGAPINVTGSASGSNSATIPSMFPAGSAPPLSPRSCGSPRTTKQRAPSNLGSTLKVVNEPVKEPIPQFYFQNGRPPPSEIKEQCMFRINHFFYGHMDGLQIQEFKLVTREICKLPSFFSTSLFRKIDLNNTGFVTRDAFIDFWVNGNMLIMDTTTQIFKILKQKDQSFIVKDDFKPLLKELLATHPGLEFLQSTPEFQERYAETVTYRIFYYINRSGNGRITFRELKRGNLIDAMLHADEEEDINKVLRYFSYEHFYVIYCKFWELDTDHDFLIDKENLMRYGNHALTYRIVDRIFSQVARKFTNKVEGKMGYEDFVYFILAEEDKSSVPSLEYWFKCIDLDANGIITRNEMQFFYEEQLHRMECMAQEAVLFEDILCQMIDMIGPENESHITLHDLKGSKLSGNVFNILFNLNKFMAFETRDPFLIRQERENPTLTDWDRFAHREYIRLSMEEDVEDASNGSAEVWDESSLEAPF

SEQ ID NO: 99826 - protein, 527 aa, Arabidopsis thaliana
  peptide (1)..(527): Ceres Seq. ID no. 13603746
  misc_feature (382)..(410): Pfam Name: EF hand Pfam Description: EF hand
  misc_feature (1)..(527): Homolog of NCBI NO: 15241978 NR Description: protein phosphatase 2A regulatory subunit protein [Arabidopsis thaliana] >gi|17380962|gb|AAL36293.1| protein phosphatase 2A regulatory subunit B [Arabidopsis
  misc_feature (1)..(527): Homolog of NCBI NO: 18421273 NR Description: protein phosphatase 2A regulatory subunit
  misc_feature (4)..(527): Homolog of NCBI NO: 15221817 NR Description: protein phosphatase 2A 72 kDa regulatory subunit [Arabidopsis thaliana] >gi|25405733|pir||D96586 hypothetical
  misc_feature (177)..(527): Homolog of NCBI NO: 37535364 NR Description: putative protein phosphatase 2A regulatory
  misc_feature (1)..(187): Homolog of NCBI NO: 37535364 NR Description: putative protein phosphatase 2A regulatory
  misc_feature (1)..(527): Homolog of NCBI NO: 15240089 NR Description: protein phosphatase 2A 62 kDa B regulatory (gb|AAD45158.1) [Arabidopsis thaliana] protein phosphatase 2A 62 kDa B'' regulatory subunit [Arabidopsis
  misc_feature (1)..(527): Homolog of NCBI NO: 28393301 NR Description: putative protein phosphatase 2A [Arabidopsis >gi|28827268|gb|AAO50478.1| putative protein phosphatase 2A
  misc_feature (177)..(480): Homolog of NCBI NO: 16905168 NR Description: putative phosphatase subunit, 3'-partial [Oryza
  misc_feature (1)..(187): Homolog of NCBI NO: 16905168 NR Description: putative phosphatase subunit, 3'-partial [Oryza
  misc_feature (1)..(527): Homolog of NCBI NO: 15219596 NR Description: protein phosphatase 2A -related [Arabidopsis
MACLDADLLQLQEMSSFVLNSKPGFTQKLFDQWLSLPEAQRQVGSLLKDAVAGAPINVTGSASGSNSATIPSMFPAGSAPPLSPRSCGSPRTTKQRAPSNLGSTLKVVNEPVKEPIPQFYFQNGRPPPSEIKEQCMFRINHFFYGHMDGLQIQEFKLVTREICKLPSFFSTSLFRKIDLNNTGFVTRDAFIDFWVNGNMLIMDTTTQIFKILKQKDQSFIVKDDFKPLLKELLATHPGLEFLQSTPEFQERYAETVTYRIFYYINRSGNGRITFRELKRGNLIDAMLHADEEEDINKVLRYFSYEHFYVIYCKFWELDTDHDFLIDKENLMRYGNHALTYRIVDRIFSQVARKFTNKVEGKMGYEDFVYFILAEEDKSSVPSLEYWFKCIDLDANGIITRNEMQFFYEEQLHRMECMAQEAVLFEDILCQMIDMIGPENESHITLHDLKGSKLSGNVFNILFNLNKFMAFETRDPFLIRQERENPTLTDWDRFAHREYIRLSMEEDVEDASNGSAEVWDESSLEAPF

SEQ ID NO: 99827 - protein, 514 aa, Arabidopsis thaliana
  peptide (1)..(514): Ceres Seq. ID no. 13603747
  misc_feature (369)..(397): Pfam Name: EF hand Pfam Description: EF hand
  misc_feature (1)..(514): Homolog of NCBI NO: 15241978 NR Description: protein phosphatase 2A regulatory subunit protein [Arabidopsis thaliana] >gi|17380962|gb|AAL36293.1| protein phosphatase 2A regulatory subunit B [Arabidopsis
  misc_feature (1)..(514): Homolog of NCBI NO: 18421273 NR Description: protein phosphatase 2A regulatory subunit
  misc_feature (1)..(514): Homolog of NCBI NO: 15221817 NR Description: protein phosphatase 2A 72 kDa regulatory subunit [Arabidopsis thaliana] >gi|25405733|pir||D96586 hypothetical
  misc_feature (164)..(514): Homolog of NCBI NO: 37535364 NR Description: putative protein phosphatase 2A regulatory
  misc_feature (1)..(174): Homolog of NCBI NO: 37535364 NR Description: putative protein phosphatase 2A regulatory
  misc_feature (1)..(514): Homolog of NCBI NO: 15240089 NR Description: protein phosphatase 2A 62 kDa B regulatory (gb|AAD45158.1) [Arabidopsis thaliana] protein phosphatase 2A 62 kDa B'' regulatory subunit [Arabidopsis
  misc_feature (1)..(514): Homolog of NCBI NO: 28393301 NR Description: putative protein phosphatase 2A [Arabidopsis >gi|28827268|gb|AAO50478.1| putative protein phosphatase 2A
  misc_feature (164)..(467): Homolog of NCBI NO: 16905168 NR Description: putative phosphatase subunit, 3'-partial [Oryza
  misc_feature (1)..(174): Homolog of NCBI NO: 16905168 NR Description: putative phosphatase subunit, 3'-partial [Oryza
  misc_feature (1)..(514): Homolog of NCBI NO: 15219596 NR Description: protein phosphatase 2A -related [Arabidopsis
MSSFVLNSKPGFTQKLFDQWLSLPEAQRQVGSLLKDAVAGAPINVTGSASGSNSATIPSMFPAGSAPPLSPRSCGSPRTTKQRAPSNLGSTLKVVNEPVKEPIPQFYFQNGRPPPSEIKEQCMFRINHFFYGHMDGLQIQEFKLVTREICKLPSFFSTSLFRKIDLNNTGFVTRDAFIDFWVNGNMLIMDTTTQIFKILKQKDQSFIVKDDFKPLLKELLATHPGLEFLQSTPEFQERYAETVTYRIFYYINRSGNGRITFRELKRGNLIDAMLHADEEEDINKVLRYFSYEHFYVIYCKFWELDTDHDFLIDKENLMRYGNHALTYRIVDRIFSQVARKFTNKVEGKMGYEDFVYFILAEEDKSSVPSLEYWFKCIDLDANGIITRNEMQFFYEEQLHRMECMAQEAVLFEDILCQMIDMIGPENESHITLHDLKGSKLSGNVFNILFNLNKFMAFETRDPFLIRQERENPTLTDWDRFAHREYIRLSMEEDVEDASNGSAEVWDESSLEAPF

SEQ ID NO: 99828 - DNA, 1442 bp, Arabidopsis thaliana
  misc_feature (1)..(1442): Ceres Seq. ID no. 13603748
  misc_feature: MA Experiment ID: 108561 Result: Up-regulated in Transcription
  misc_feature: MA Experiment 108561 PARAMETER Experiment Name: At_100uM_ABA_cDNA_P Parameter: Timepoint (hr) Value: 6
  misc_feature: MA Experiment 108561 PARAMETER Experiment Name: At_100uM_ABA_cDNA_P Parameter: Tissue Value: Aerial
  misc_feature: MA Experiment 108561 PARAMETER Experiment Name: At_100uM_ABA_cDNA_P Parameter: Treatment Value: 100uM ABA vs. No Treatment
  misc_feature: MA Experiment ID: 108572 Result: Up-regulated in Transcription
  misc_feature: MA Experiment 108572 PARAMETER Experiment Name: At_Drought_cDNA_P Parameter: Timepoint (hr) Value: 1
  misc_feature: MA Experiment 108572 PARAMETER Experiment Name: At_Drought_cDNA_P Parameter: Tissue Value: Aerial
  misc_feature: MA Experiment 108572 PARAMETER Experiment Name: At_Drought_cDNA_P Parameter: Treatment Value: Drought vs. No Drought
  misc_feature: MA Experiment ID: 108573 Result: Up-regulated in Transcription
  misc_feature: MA Experiment 108573 PARAMETER Experiment Name: At_Drought_cDNA_P Parameter: Timepoint (hr) Value: 6
  misc_feature: MA Experiment 108573 PARAMETER Experiment Name: At_Drought_cDNA_P Parameter: Tissue Value: Aerial
  misc_feature: MA Experiment 108573 PARAMETER Experiment Name: At_Drought_cDNA_P Parameter: Treatment Value: Drought vs. No Drought
  misc_feature: MA Experiment ID: 108585 Result: Up-regulated in Transcription
  misc_feature: MA Experiment 108585 PARAMETER Experiment Name: At_5mM_NaNP_cDNA_P Parameter: Timepoint (hr) Value: 6
  misc_feature: MA Experiment 108585 PARAMETER Experiment Name: At_5mM_NaNP_cDNA_P Parameter: Tissue Value: Aerial
  misc_feature: MA Experiment 108585 PARAMETER Experiment Name: At_5mM_NaNP_cDNA_P Parameter: Treatment Value: null
  misc_feature: MA Experiment ID: 108605 Result: Up-regulated in Transcription
  misc_feature: MA Experiment 108605 PARAMETER Experiment Name: At_100uM_ABA_cDNA_P Parameter: Timepoint (hr) Value: 6
  misc_feature: MA Experiment 108605 PARAMETER Experiment Name: At_100uM_ABA_cDNA_P Parameter: Tissue Value: Aerial
  misc_feature: MA Experiment 108605 PARAMETER Experiment Name: At_100uM_ABA_cDNA_P Parameter: Treatment Value: 100uM ABA vs. No Treatment
  misc_feature: MA Experiment ID: 108607 Result: Up-regulated in Transcription
  misc_feature: MA Experiment 108607 PARAMETER Experiment Name: At_100uM_ABA_cDNA_P Parameter: Timepoint (hr) Value: 4
  misc_feature: MA Experiment 108607 PARAMETER Experiment Name: At_100uM_ABA_cDNA_P Parameter: Tissue Value: Aerial
  misc_feature: MA Experiment 108607 PARAMETER Experiment Name: At_100uM_ABA_cDNA_P Parameter: Treatment Value: 100uM ABA vs. No Treatment
  misc_feature: MA Experiment ID: 20000069 Result: Up-regulated in Transcription
  misc_feature: MA Experiment 20000069 PARAMETER Experiment Name: At_100uM_ABA_Mutants_cDNA_P Parameter: Plant Line Value: CS23
  misc_feature: MA Experiment 20000069 PARAMETER Experiment Name: At_100uM_ABA_Mutants_cDNA_P Parameter: Timepoint (hr) Value: 6
  misc_feature: MA Experiment 20000069 PARAMETER Experiment Name: At_100uM_ABA_Mutants_cDNA_P Parameter: Tissue Value: Aerial
  misc_feature: MA Experiment 20000069 PARAMETER Experiment Name: At_100uM_ABA_Mutants_cDNA_P Parameter: Treatment Value: 100uM ABA vs. No Treatment
  misc_feature: MA Experiment ID: 20000070 Result: Up-regulated in Transcription
  misc_feature: MA Experiment 20000070 PARAMETER Experiment Name: At_100uM_ABA_Mutants_cDNA_P Parameter: Plant Line Value: CS24
  misc_feature: MA Experiment 20000070 PARAMETER Experiment Name: At_100uM_ABA_Mutants_cDNA_P Parameter: Timepoint (hr) Value: 6
  misc_feature: MA Experiment 20000070 PARAMETER Experiment Name: At_100uM_ABA_Mutants_cDNA_P Parameter: Tissue Value: Aerial
  misc_feature: MA Experiment 20000070 PARAMETER Experiment Name: At_100uM_ABA_Mutants_cDNA_P Parameter: Treatment Value: 100uM ABA vs. No Treatment
  misc_feature: MA Experiment ID: 20000071 Result: Up-regulated in Transcription
  misc_feature: MA Experiment 20000071 PARAMETER Experiment Name: At_100uM_ABA_Mutants_cDNA_P Parameter: Plant Line Value: CS8104
  misc_feature: MA Experiment 20000071 PARAMETER Experiment Name: At_100uM_ABA_Mutants_cDNA_P Parameter: Timepoint (hr) Value: 6
  misc_feature: MA Experiment 20000071 PARAMETER Experiment Name: At_100uM_ABA_Mutants_cDNA_P Parameter: Tissue Value: Aerial
  misc_feature: MA Experiment 20000071 PARAMETER Experiment Name: At_100uM_ABA_Mutants_cDNA_P Parameter: Treatment Value: 100uM ABA vs. No Treatment
  misc_feature: MA Experiment ID: 20000072 Result: Up-regulated in Transcription
  misc_feature: MA Experiment 20000072 PARAMETER Experiment Name: At_100uM_ABA_Mutants_cDNA_P Parameter: Plant Line Value: CS8105
  misc_feature: MA Experiment 20000072 PARAMETER Experiment Name: At_100uM_ABA_Mutants_cDNA_P Parameter: Timepoint (hr) Value: 6
  misc_feature: MA Experiment 20000072 PARAMETER Experiment Name: At_100uM_ABA_Mutants_cDNA_P Parameter: Tissue Value: Aerial
  misc_feature: MA Experiment 20000072 PARAMETER Experiment Name: At_100uM_ABA_Mutants_cDNA_P Parameter: Treatment Value: 100uM ABA vs. No Treatment
  misc_feature: MA Experiment ID: 20000086 Result: Up-regulated in Transcription
  misc_feature: MA Experiment 20000086 PARAMETER Experiment Name: At_100uM_ABA_Mutants_cDNA_P Parameter: Plant Line Value: CS22
  misc_feature: MA Experiment 20000086 PARAMETER Experiment Name: At_100uM_ABA_Mutants_cDNA_P Parameter: Timepoint (hr) Value: 6
  misc_feature: MA Experiment 20000086 PARAMETER Experiment Name: At_100uM_ABA_Mutants_cDNA_P Parameter: Tissue Value: Aerial
  misc_feature: MA Experiment 20000086 PARAMETER Experiment Name: At_100uM_ABA_Mutants_cDNA_P Parameter: Treatment Value: 100uM ABA vs. No Treatment
  misc_feature: MA Experiment ID: 20000087 Result: Up-regulated in Transcription
  misc_feature: MA Experiment 20000087 PARAMETER Experiment Name: At_100uM_ABA_Mutants_cDNA_P Parameter: Plant Line Value: WS
  misc_feature: MA Experiment 20000087 PARAMETER Experiment Name: At_100uM_ABA_Mutants_cDNA_P Parameter: Timepoint (hr) Value: 6
  misc_feature: MA Experiment 20000087 PARAMETER Experiment Name: At_100uM_ABA_Mutants_cDNA_P Parameter: Tissue Value: Aerial
  misc_feature: MA Experiment 20000087 PARAMETER Experiment Name: At_100uM_ABA_Mutants_cDNA_P Parameter: Treatment Value: 100uM ABA vs. No Treatment
  misc_feature: MA Experiment ID: 20000088 Result: Up-regulated in Transcription
  misc_feature: MA Experiment 20000088 PARAMETER Experiment Name: At_100uM_ABA_Mutants_cDNA_P Parameter: Plant Line Value: Landsberg
  misc_feature: MA Experiment 20000088 PARAMETER Experiment Name: At_100uM_ABA_Mutants_cDNA_P Parameter: Timepoint (hr) Value: 6
  misc_feature: MA Experiment 20000088 PARAMETER Experiment Name: At_100uM_ABA_Mutants_cDNA_P Parameter: Tissue Value: Aerial
  misc_feature: MA Experiment 20000088 PARAMETER Experiment Name: At_100uM_ABA_Mutants_cDNA_P Parameter: Treatment Value: 100uM ABA vs. No Treatment
  misc_feature: MA Experiment ID: 20000111 Result: Down-regulated in Transcription
  misc_feature: MA Experiment 20000111 PARAMETER Experiment Name: At_42deg_Heat_cDNA_P Parameter: Temperature (deg C) Value: 42 vs. 22
  misc_feature: MA Experiment 20000111 PARAMETER Experiment Name: At_42deg_Heat_cDNA_P Parameter: Timepoint (hr) Value: 6
  misc_feature: MA Experiment 20000111 PARAMETER Experiment Name: At_42deg_Heat_cDNA_P Parameter: Tissue Value: Aerial
  misc_feature: MA Experiment ID: 20000113 Result: Down-regulated in Transcription
  misc_feature: MA Experiment 20000113 PARAMETER Experiment Name: At_42deg_Heat_cDNA_P Parameter: Temperature (deg C) Value: 42 vs. 22
  misc_feature: MA Experiment 20000113 PARAMETER Experiment Name: At_42deg_Heat_cDNA_P Parameter: Timepoint (hr) Value: 8
  misc_feature: MA Experiment 20000113 PARAMETER Experiment Name: At_42deg_Heat_cDNA_P Parameter: Tissue Value: Aerial
  misc_feature: MA Experiment ID: 20000117 Result: Up-regulated in Transcription
  misc_feature: MA Experiment 20000117 PARAMETER Experiment Name: At_100uM_ABA_Mutants_cDNA_P Parameter: Plant Line Value: Columbia
  misc_feature: MA Experiment 20000117 PARAMETER Experiment Name: At_100uM_ABA_Mutants_cDNA_P Parameter: Timepoint (hr) Value: 6
  misc_feature: MA Experiment 20000117 PARAMETER Experiment Name: At_100uM_ABA_Mutants_cDNA_P Parameter: Tissue Value: Aerial
  misc_feature: MA Experiment 20000117 PARAMETER Experiment Name: At_100uM_ABA_Mutants_cDNA_P Parameter: Treatment Value: 100uM ABA vs. No Treatment
  misc_feature: MA Experiment ID: 20000224 Result: Up-regulated in Transcription
  misc_feature: MA Experiment ID: 20000437 Result: Up-regulated in Transcription
  misc_feature: MA Experiment 20000437 PARAMETER Experiment Name: At_Drought_P Parameter: Age (day) Value: 8
  misc_feature: MA Experiment 20000437 PARAMETER Experiment Name: At_Drought_P Parameter: Organism Value: A. thaliana
  misc_feature: MA Experiment 20000437 PARAMETER Experiment Name: At_Drought_P Parameter: Plant Line Value: WS
  misc_feature: MA Experiment 20000437 PARAMETER Experiment Name: At_Drought_P Parameter: Timepoint (hr) Value: 24
  misc_feature: MA Experiment 20000437 PARAMETER Experiment Name: At_Drought_P Parameter: Tissue Value: Whole Plant
  misc_feature: MA Experiment 20000437 PARAMETER Experiment Name: At_Drought_P Parameter: Treatment Value: Drought vs. No Drought
  misc_feature: MA Experiment ID: 20000438 Result: Down-regulated in Transcription
  misc_feature: MA Experiment 20000438 PARAMETER Experiment Name: At_Shoots__P Parameter: Age (day) Value: 14
  misc_feature: MA Experiment 20000438 PARAMETER Experiment Name: At_Shoots__P Parameter: Tissue Value: Shoots vs. Whole Plant
  misc_feature: MA Experiment ID: 20000453 Result: Up-regulated in Transcription
  misc_feature: MA Experiment 20000453 PARAMETER Experiment Name: At_100uM_ABA_P Parameter: Age (day) Value: 15
  misc_feature: MA Experiment 20000453 PARAMETER Experiment Name: At_100uM_ABA_P Parameter: Organism Value: A. thaliana
  misc_feature: MA Experiment 20000453 PARAMETER Experiment Name: At_100uM_ABA_P Parameter: Plant Line Value: WS
  misc_feature: MA Experiment 20000453 PARAMETER Experiment Name: At_100uM_ABA_P Parameter: Timepoint (hr) Value: 24
  misc_feature: MA Experiment 20000453 PARAMETER Experiment Name: At_100uM_ABA_P Parameter: Tissue Value: Aerial
  misc_feature: MA Experiment 20000453 PARAMETER Experiment Name: At_100uM_ABA_P Parameter: Treatment Value: 100uM ABA vs. No Treatment
  misc_feature: MA Experiment ID: 20000794 Result: Up-regulated in Transcription
  misc_feature: MA Experiment 20000794 PARAMETER Experiment Name: At_Petals_P Parameter: Age (day) Value: 23-25 days
  misc_feature: MA Experiment 20000794 PARAMETER Experiment Name: At_Petals_P Parameter: Plant Line Value: WS
  misc_feature: MA Experiment 20000794 PARAMETER Experiment Name: At_Petals_P Parameter: Tissue Value: Petals vs. Whole plant
  misc_feature: MA Experiment ID: 20001555 Result: Up-regulated in Transcription
  misc_feature: MA Experiment 20001555 PARAMETER Experiment Name: At_Drought_Soil_Dry_P Parameter: Age (day) Value: 24
  misc_feature: MA Experiment 20001555 PARAMETER Experiment Name: At_Drought_Soil_Dry_P Parameter: Organism Value: A. thaliana
  misc_feature: MA Experiment 20001555 PARAMETER Experiment Name: At_Drought_Soil_Dry_P Parameter: Plant Line Value: WS
  misc_feature: MA Experiment 20001555 PARAMETER Experiment Name: At_Drought_Soil_Dry_P Parameter: Post Timepoint (hr) Value: None
  misc_feature: MA Experiment 20001555 PARAMETER Experiment Name: At_Drought_Soil_Dry_P Parameter: Post-Treatment Value: None
  misc_feature: MA Experiment 20001555 PARAMETER Experiment Name: At_Drought_Soil_Dry_P Parameter: Timepoint (day) Value: 10
  misc_feature: MA Experiment 20001555 PARAMETER Experiment Name: At_Drought_Soil_Dry_P Parameter: Treatment Value: Drought vs. No Drought
  misc_feature: MA Experiment ID: 20001556 Result: Up-regulated in Transcription
  misc_feature: MA Experiment 20001556 PARAMETER Experiment Name: At_Drought_Soil_Dry_P Parameter: Age (day) Value: 26
  misc_feature: MA Experiment 20001556 PARAMETER Experiment Name: At_Drought_Soil_Dry_P Parameter: Organism Value: A. thaliana
  misc_feature: MA Experiment 20001556 PARAMETER Experiment Name: At_Drought_Soil_Dry_P Parameter: Plant Line Value: WS
  misc_feature: MA Experiment 20001556 PARAMETER Experiment Name: At_Drought_Soil_Dry_P Parameter: Post Timepoint (hr) Value: None
  misc_feature: MA Experiment 20001556 PARAMETER Experiment Name: At_Drought_Soil_Dry_P Parameter: Post-Treatment Value: None
  misc_feature: MA Experiment 20001556 PARAMETER Experiment Name: At_Drought_Soil_Dry_P Parameter: Timepoint (day) Value: 12
  misc_feature: MA Experiment 20001556 PARAMETER Experiment Name: At_Drought_Soil_Dry_P Parameter: Treatment Value: Drought vs. No Drought
  misc_feature: MA Experiment ID: 20001559 Result: Up-regulated in Transcription
  misc_feature: MA Experiment 20001559 PARAMETER Experiment Name: At_Drought_Soil_Dry_P Parameter: Age (day) Value: 28
  misc_feature: MA Experiment 20001559 PARAMETER Experiment Name: At_Drought_Soil_Dry_P Parameter: Organism Value: A. thaliana
  misc_feature: MA Experiment 20001559 PARAMETER Experiment Name: At_Drought_Soil_Dry_P Parameter: Plant Line Value: WS
  misc_feature: MA Experiment 20001559 PARAMETER Experiment Name: At_Drought_Soil_Dry_P Parameter: Post Timepoint (hr) Value: 29
  misc_feature: MA Experiment 20001559 PARAMETER Experiment Name: At_Drought_Soil_Dry_P Parameter: Post-Treatment Value: Re-Water vs. No Drought
  misc_feature: MA Experiment 20001559 PARAMETER Experiment Name: At_Drought_Soil_Dry_P Parameter: Timepoint (day) Value: 14
  misc_feature: MA Experiment 20001559 PARAMETER Experiment Name: At_Drought_Soil_Dry_P Parameter: Treatment Value: Drought vs. No Drought
  misc_feature: MA Experiment ID: 20001757 Result: Down-regulated in Transcription
  misc_feature: MA Experiment 20001757 PARAMETER Experiment Name: At_50mM_NH4NO3_L-to-H_P Parameter: Timepoint (hr) Value: 6
  misc_feature: MA Experiment 20001757 PARAMETER Experiment Name: At_50mM_NH4NO3_L-to-H_P Parameter: Tissue Value: Leaf
  misc_feature: MA Experiment 20001757 PARAMETER Experiment Name: At_50mM_NH4NO3_L-to-H_P Parameter: Treatment Value: 50mM NH4NO3 vs 100mM Mannitol
  misc_feature: MA Experiment ID: 20001905 Result: Up-regulated in Transcription
  misc_feature: MA Experiment 20001905 PARAMETER Experiment Name: At_Drought_Reproduction_P Parameter: Age (day) Value: 40
  misc_feature: MA Experiment 20001905 PARAMETER Experiment Name: At_Drought_Reproduction_P Parameter: Organism Value: A. thaliana
  misc_feature: MA Experiment 20001905 PARAMETER Experiment Name: At_Drought_Reproduction_P Parameter: Plant Line Value: WS
  misc_feature: MA Experiment 20001905 PARAMETER Experiment Name: At_Drought_Reproduction_P Parameter: Timepoint (day) Value: 10
  misc_feature: MA Experiment 20001905 PARAMETER Experiment Name: At_Drought_Reproduction_P Parameter: Tissue Value: Rosettes
  misc_feature: MA Experiment 20001905 PARAMETER Experiment Name: At_Drought_Reproduction_P Parameter: Treatment Value: Drought vs. No Drought
  misc_feature: MA Experiment ID: 20001908 Result: Up-regulated in Transcription
  misc_feature: MA Experiment 20001908 PARAMETER Experiment Name: At_Drought_Reproduction_P Parameter: Age (day) Value: 40
  misc_feature: MA Experiment 20001908 PARAMETER Experiment Name: At_Drought_Reproduction_P Parameter: Organism Value: A. thaliana
  misc_feature: MA Experiment 20001908 PARAMETER Experiment Name: At_Drought_Reproduction_P Parameter: Plant Line Value: WS
  misc_feature: MA Experiment 20001908 PARAMETER Experiment Name: At_Drought_Reproduction_P Parameter: Timepoint (day) Value: 10
  misc_feature: MA Experiment 20001908 PARAMETER Experiment Name: At_Drought_Reproduction_P Parameter: Tissue Value: Siliques
  misc_feature: MA Experiment 20001908 PARAMETER Experiment Name: At_Drought_Reproduction_P Parameter: Treatment Value: Drought vs. No Drought
  misc_feature: MA Experiment ID: 20001911 Result: Up-regulated in Transcription
  misc_feature: MA Experiment 20001911 PARAMETER Experiment Name: At_Drought_Reproduction_P Parameter: Age (day) Value: 40
  misc_feature: MA Experiment 20001911 PARAMETER Experiment Name: At_Drought_Reproduction_P Parameter: Organism Value: A. thaliana
  misc_feature: MA Experiment 20001911 PARAMETER Experiment Name: At_Drought_Reproduction_P Parameter: Plant Line Value: WS
  misc_feature: MA Experiment 20001911 PARAMETER Experiment Name: At_Drought_Reproduction_P Parameter: Timepoint (day) Value: 10
  misc_feature: MA Experiment 20001911 PARAMETER Experiment Name: At_Drought_Reproduction_P Parameter: Tissue Value: Flowers
  misc_feature: MA Experiment 20001911 PARAMETER Experiment Name: At_Drought_Reproduction_P Parameter: Treatment Value: Drought vs. No Drought
ctgaattaggatactgtgtggtgttttgcaaaactgctcttgtgctatgactctggctaatgatttcggatattcgaccgctatgtcttcatcttattcagctcttcatactagtgtagaagacagataccacaagttgcctaactctttttgggtttcatcaggtcaggaactgatgaataaccctgtaccgtgtcagtcggtctctggtggcaattctggtggttatttgtttccttcttcctctggatactgcaatgtttcagctgtcttgcctcatggaaggaatttgcaaaaccagccacctgtttccaccgtgcctagagacagattggctatgcaggattgtcctttgatagctcaatcctcgttgattaatcatcaccctcaagagttcatagatccacttcatgagttctttgatttctctgatcatgttcctgttcagaatctacaagcagagagtagtggagtaagggtggactcatccgtggaacttcataagaaaagtgaatggcaagattgggcagatcagctgatttctgttgacgatggttctgagccaaattggtctgaacttcttggagattcaagttcccacaatccaaattcagagatacctacaccatttttggatgtaccaaggctagatataacagctaaccagcagcaacagatggtttcatcagaggaccagctcagcggcagaaactcatcatctagtgtagcaacatctaaacaacgtatgcgttggacaccagaacttcacgaggcattcgttgaagctgttaatcagcttggtggtagtgaacgagccacccctaaggctgttttgaagctcttgaataaccctggcttgaccatttatcatgtaaaaagccatttgcagaaatatagaacggcaaggtataaaccggagacttcggaagttacaggagaacctcaagagaagaagatgacatctattgaagatatcaaatctcttgacatgaaaacgagcgttgagatcacacaagctctacggttacaaatggaagtgcagaaacgtctccacgagcagctcgagatccaacggtcactgcagttacagattgaaaaacagggccggtacctacagatgatgttcgagaaacaacaaaagatacaagacaacaagagctcttcttcagaagcatcaccaaagcaatgcaatggttcatttgcagaagttgaagttggtcttgagacactaacaggggaccaaaatgaatctgcttcagcatcaaggaaacgtgtcagagaagattaaagcatgtttaatttgatctcgtttgacgaaacatgtttattgggaattaattgtggaaaccaactccagttttgttaaaagaatctgtttctttcttagctctgtattgttctagtttagaagcagttgatttggccttgcatggctgcaacac

SEQ ID NO: 99829 - protein, 413 aa, Arabidopsis thaliana; identical to SEQ ID NO: 29233
  peptide (1)..(413): Ceres Seq. ID no. 13603749
  misc_feature (233)..(284): Pfam Name: Myb-like DNA-binding domain Pfam Description: Myb-like DNA-binding domain
  misc_feature (1)..(413): Homolog of NCBI NO: 30692110 NR Description: expressed protein [Arabidopsis thaliana]
  misc_feature (1)..(413): Homolog of NCBI NO: 21537366 NR Description: transfactor, putative [Arabidopsis thaliana]
  misc_feature (39)..(413): Homolog of NCBI NO: 21954075 NR Description: unknown protein [Arabidopsis thaliana]
  misc_feature (44)..(413): Homolog of NCBI NO: 30692105 NR Description: expressed protein [Arabidopsis thaliana]
  misc_feature (1)..(377): Homolog of NCBI NO: 15229298 NR Description: transfactor -related [Arabidopsis thaliana]
  misc_feature (45)..(377): Homolog of NCBI NO: 26452281 NR Description: putative transfactor [Arabidopsis thaliana]
  misc_feature (124)..(379): Homolog of NCBI NO: 22329004 NR Description: expressed protein [Arabidopsis thaliana] phosphate starvation response regulator 1 [Arabidopsis thaliana] putative protein [Arabidopsis thaliana]
  misc_feature (5)..(387): Homolog of NCBI NO: 6942190 NR Description: CDPK substrate protein 1; CSP1 [Mesembryanthemum
  misc_feature (124)..(379): Homolog of NCBI NO: 7487685 NR Description: hypothetical protein T5F17.60 - Arabidopsis >gi|7269716|emb|CAB81449.1| putative protein [Arabidopsis
  misc_feature (168)..(365): Homolog of NCBI NO: 4519671 NR Description: transfactor [Nicotiana tabacum]

SEQ ID NO: 99830 - protein, 401 aa, Arabidopsis thaliana; identical to SEQ ID NO: 29234
  peptide (1)..(401): Ceres Seq. ID no. 13603750
  misc_feature (221)..(272): Pfam Name: Myb-like DNA-binding domain Pfam Description: Myb-like DNA-binding domain
  misc_feature (1)..(401): Homolog of NCBI NO: 30692110 NR Description: expressed protein [Arabidopsis thaliana]
  misc_feature (1)..(401): Homolog of NCBI NO: 21537366 NR Description: transfactor, putative [Arabidopsis thaliana]
  misc_feature (27)..(401): Homolog of NCBI NO: 21954075 NR Description: unknown protein [Arabidopsis thaliana]
  misc_feature (32)..(401): Homolog of NCBI NO: 30692105 NR Description: expressed protein [Arabidopsis thaliana]
  misc_feature (1)..(365): Homolog of NCBI NO: 15229298 NR Description: transfactor -related [Arabidopsis thaliana]
  misc_feature (33)..(365): Homolog of NCBI NO: 26452281 NR Description: putative transfactor [Arabidopsis thaliana]
  misc_feature (112)..(367): Homolog of NCBI NO: 22329004 NR Description: expressed protein [Arabidopsis thaliana] phosphate starvation response regulator 1 [Arabidopsis thaliana] putative protein [Arabidopsis thaliana]
  misc_feature (1)..(375): Homolog of NCBI NO: 6942190 NR Description: CDPK substrate protein 1; CSP1 [Mesembryanthemum
  misc_feature (112)..(367): Homolog of NCBI NO: 7487685 NR Description: hypothetical protein T5F17.60 - Arabidopsis >gi|7269716|emb|CAB81449.1| putative protein [Arabidopsis
  misc_feature (156)..(353): Homolog of NCBI NO: 4519671 NR Description: transfactor [Nicotiana tabacum]

SEQ ID NO: 99831 - protein, 370 aa, Arabidopsis thaliana; identical to SEQ ID NO: 29235
  peptide (1)..(370): Ceres Seq. ID no. 13603751
  misc_feature (190)..(241): Pfam Name: Myb-like DNA-binding domain Pfam Description: Myb-like DNA-binding domain
  misc_feature (1)..(370): Homolog of NCBI NO: 30692110 NR Description: expressed protein [Arabidopsis thaliana]
  misc_feature (1)..(370): Homolog of NCBI NO: 21537366 NR Description: transfactor, putative [Arabidopsis thaliana]
  misc_feature (1)..(370): Homolog of NCBI NO: 21954075 NR Description: unknown protein [Arabidopsis thaliana]
  misc_feature (1)..(370): Homolog of NCBI NO: 30692105 NR Description: expressed protein [Arabidopsis thaliana]
  misc_feature (1)..(334): Homolog of NCBI NO: 15229298 NR Description: transfactor -related [Arabidopsis thaliana]
  misc_feature (2)..(334): Homolog of NCBI NO: 26452281 NR Description: putative transfactor [Arabidopsis thaliana]
  misc_feature (81)..(336): Homolog of NCBI NO: 22329004 NR Description: expressed protein [Arabidopsis thaliana] phosphate starvation response regulator 1 [Arabidopsis thaliana] putative protein [Arabidopsis thaliana]
  misc_feature (1)..(344): Homolog of NCBI NO: 6942190 NR Description: CDPK substrate protein 1; CSP1 [Mesembryanthemum
  misc_feature (81)..(336): Homolog of NCBI NO: 7487685 NR Description: hypothetical protein T5F17.60 - Arabidopsis >gi|7269716|emb|CAB81449.1| putative protein [Arabidopsis
  misc_feature (125)..(322): Homolog of NCBI NO: 4519671 NR Description: transfactor [Nicotiana tabacum]

SEQ ID NO: 99832 - DNA, 1325 bp, Arabidopsis thaliana
  misc_feature (1)..(1325): Ceres Seq. ID no. 13603755
  misc_feature: MA Experiment ID: 20000347 Result: Up-regulated in Transcription
  misc_feature: MA Experiment 20000347 PARAMETER Experiment Name: At_2mM_SA_Sub_P Parameter: Age (day) Value: 14
  misc_feature: MA Experiment 20000347 PARAMETER Experiment Name: At_2mM_SA_Sub_P Parameter: Organism Value: A. thaliana
  misc_feature: MA Experiment 20000347 PARAMETER Experiment Name: At_2mM_SA_Sub_P Parameter: Plant Line Value: WS
  misc_feature: MA Experiment 20000347 PARAMETER Experiment Name: At_2mM_SA_Sub_P Parameter: Timepoint (hr) Value: 6
  misc_feature: MA Experiment 20000347 PARAMETER Experiment Name: At_2mM_SA_Sub_P Parameter: Tissue Value: Aerial
  misc_feature: MA Experiment 20000347 PARAMETER Experiment Name: At_2mM_SA_Sub_P Parameter: Treatment Value: 2mM SA vs. No Treatment
  misc_feature: MA Experiment ID: 20000355 Result: Up-regulated in Transcription
  misc_feature: MA Experiment 20000355 PARAMETER Experiment Name: At_Siliques_Sub_P Parameter: Age (day) Value: 21
  misc_feature: MA Experiment 20000355 PARAMETER Experiment Name: At_Siliques_Sub_P Parameter: Organism Value: A. thaliana
  misc_feature: MA Experiment 20000355 PARAMETER Experiment Name: At_Siliques_Sub_P Parameter: Plant Line Value: WS
  misc_feature: MA Experiment 20000355 PARAMETER Experiment Name: At_Siliques_Sub_P Parameter: Tissue Value: Less Than 5mm Siliques vs. Whole Plant
atagttgcctagtttcttttagcggattcgttttcatgagattcgactcattctaatagaacttttgcgtgatacaaaaggtctgttttggatgattaggtagagataatatggaagaagaagatgatgaggttatggtcagagaggggctaatggcctctcaaagagaaatcttcagcatttctggtccaatccatttaacttccattgattggaataattcttatcatagaacctcggtggcatcatgtttggtacaagcagtgtacacattggaacgagacagacaacaaaacaggattggcctaaagtcacaagccaatcattggtgggagtttttcaacttcactttagccgaaaccctaatcgacgactcagacggatctatatacggcgccgttttcgaatacaaacatttcttctcctacaattaccatcacacccctcattcgaaaccacctcctcgtcacgtgattgctttccgtggcacgatcttgaaaccgcactctcggtcacgtgaccttaagctcgacctacgttgcatccgagactctctccatgatagcactcggttcgtgcatgccattcaggttattcaaagtgcggtggctaaaactggtaatgcagccgtgtggctcgccggacattctcttggagcagccgtggctttgcttgccgggaagattatgacaaggtctggttttcctcttgagagttacttattcaatcctcctttctcgtctattccgatagagaagctagtgaagagtgagaagcttaaacatggggttcgattcgccggaagtcttgttaaagccggagttgccatcgccgttaagggtcgccaccataataagggtcaagaagacgattcgttcatgaagttagcatcatggataccatatttgtatttgaatccgttagatacaatatgctcagaatacattggttacttcaagcacagaaacaaaatgtttgagatcggagccggtaaaatcgaaagaattgctacgaggaactcacttaggagtctgttgtcaggaggaggaggaggaggttcatcttcagattcttcttcagagcctcttcatcttttaccatcggcatatatgacgataaacgctagcaaatcgccgaattttaagagagctcatgggattcatcaatggtgggatcccatgtttaatggtgaatatgttttgcatcagtttaataactaacttctacttttgttgcttcaaatgctttgaaacctttttttttattttttgttttgtttataattgtaatctgtgaaagatgaaatttgctgcaggttttgatgg

SEQ ID NO: 99833 - protein, 369 aa, Arabidopsis thaliana
  peptide (1)..(369): Ceres Seq. ID no. 13603756
  misc_feature (1)..(369): Homolog of NCBI NO: 30689345 NR Description: expressed protein [Arabidopsis thaliana] unknown protein [Arabidopsis thaliana]
  misc_feature (1)..(251): Homolog of NCBI NO: 10177082 NR Description: gene_id:MOP9.4~pir||T04290~similar to unknown
  misc_feature (13)..(355): Homolog of NCBI NO: 15237918 NR Description: lipase (class 3) family [Arabidopsis thaliana] gb|AAD29063.1~gene_id:MOP9.3~similar to unknown protein
  misc_feature (7)..(355): Homolog of NCBI NO: 15237909 NR Description: lipase (class 3) family [Arabidopsis thaliana] gb|AAD29063.1~gene_id:K12G2.7~similar to unknown protein
  misc_feature (15)..(362): Homolog of NCBI NO: 15237913 NR Description: hypothetical protein [Arabidopsis thaliana] gb|AAD29063.1~gene_id:K12G2.9~similar to unknown protein
  misc_feature (12)..(354): Homolog of NCBI NO: 18413406 NR Description: lipase (class 3) family [Arabidopsis thaliana]
  misc_feature (15)..(354): Homolog of NCBI NO: 18396010 NR Description: lipase (class 3) family [Arabidopsis thaliana]
  misc_feature (16)..(357): Homolog of NCBI NO: 15237916 NR Description: lipase (class 3) family [Arabidopsis thaliana] gb|AAD29063.1~gene_id:MOP9.2~similar to unknown protein thaliana] >gi|17529272|gb|AAL38863.1| unknown protein
  misc_feature (14)..(312): Homolog of NCBI NO: 7486138 NR Description: hypothetical protein F25I24.160 - Arabidopsis >gi|4539369|emb|CAB40063.1| putative protein [Arabidopsis >gi|7267793|emb|CAB81196.1| putative protein [Arabidopsis
  misc_feature (48)..(367): Homolog of NCBI NO: 34910674 NR Description: P0690B02.1 [Oryza sativa (japonica
MEEEDDEVMVREGLMASQREIFSISGPIHLTSIDWNNSYHRTSVASCLVQAVYTLERDRQQNRIGLKSQANHWWEFFNFTLAETLIDDSDGSIYGAVFEYKHFFSYNYHHTPHSKPPPRHVIAFRGTILKPHSRSRDLKLDLRCIRDSLHDSTRFVHAIQVIQSAVAKTGNAAVWLAGHSLGAAVALLAGKIMTRSGFPLESYLFNPPFSSIPIEKLVKSEKLKHGVRFAGSLVKAGVAIAVKGRHHNKGQEDDSFMKLASWIPYLYLNPLDTICSEYIGYFKHRNKMFEIGAGKIERIATRNSLRSLLSGGGGGGSSSDSSSEPLHLLPSAYMTINASKSPNFKRAHGIHQWWDPMFNGEYVLHQFNN

SEQ ID NO: 99834 - protein, 361 aa, Arabidopsis thaliana
  peptide (1)..(361): Ceres Seq. ID no. 13603757
  misc_feature (1)..(361): Homolog of NCBI NO: 30689345 NR Description: expressed protein [Arabidopsis thaliana] unknown protein [Arabidopsis thaliana]
  misc_feature (1)..(243): Homolog of NCBI NO: 10177082 NR Description: gene_id:MOP9.4~pir||T04290~similar to unknown
  misc_feature (5)..(347): Homolog of NCBI NO: 15237918 NR Description: lipase (class 3) family [Arabidopsis thaliana] gb|AAD29063.1~gene_id:MOP9.3~similar to unknown protein
  misc_feature (1)..(347): Homolog of NCBI NO: 15237909 NR Description: lipase (class 3) family [Arabidopsis thaliana] gb|AAD29063.1~gene_id:K12G2.7~similar to unknown protein
  misc_feature (7)..(354): Homolog of NCBI NO: 15237913 NR Description: hypothetical protein [Arabidopsis thaliana] gb|AAD29063.1~gene_id:K12G2.9~similar to unknown protein
  misc_feature (4)..(346): Homolog of NCBI NO: 18413406 NR Description: lipase (class 3) family [Arabidopsis thaliana]
  misc_feature (7)..(346): Homolog of NCBI NO: 18396010 NR Description: lipase (class 3) family [Arabidopsis thaliana]
  misc_feature (8)..(349): Homolog of NCBI NO: 15237916 NR Description: lipase (class 3) family [Arabidopsis thaliana] gb|AAD29063.1~gene_id:MOP9.2~similar to unknown protein thaliana] >gi|17529272|gb|AAL38863.1| unknown protein
  misc_feature (6)..(304): Homolog of NCBI NO: 7486138 NR Description: hypothetical protein F25I24.160 - Arabidopsis >gi|4539369|emb|CAB40063.1| putative protein [Arabidopsis >gi|7267793|emb|CAB81196.1| putative protein [Arabidopsis
  misc_feature (40)..(359): Homolog of NCBI NO: 34910674 NR Description: P0690B02.1 [Oryza sativa (japonica
MVREGLMASQREIFSISGPIHLTSIDWNNSYHRTSVASCLVQAVYTLERDRQQNRIGLKSQANHWWEFFNFTLAETLIDDSDGSIYGAVFEYKHFFSYNYHHTPHSKPPPRHVIAFRGTILKPHSRSRDLKLDLRCIRDSLHDSTRFVHAIQVIQSAVAKTGNAAVWLAGHSLGAAVALLAGKIMTRSGFPLESYLFNPPFSSIPIEKLVKSEKLKHGVRFAGSLVKAGVAIAVKGRHHNKGQEDDSFMKLASWIPYLYLNPLDTICSEYIGYFKHRNKMFEIGAGKIERIATRNSLRSLLSGGGGGGSSSDSSSEPLHLLPSAYMTINASKSPNFKRAHGIHQWWDPMFNGEYVLHQFNN

SEQ ID NO: 99835 - protein, 355 aa, Arabidopsis thaliana
  peptide (1)..(355): Ceres Seq. ID no. 13603758
  misc_feature (1)..(355): Homolog of NCBI NO: 30689345 NR Description: expressed protein [Arabidopsis thaliana] unknown protein [Arabidopsis thaliana]
  misc_feature (1)..(237): Homolog of NCBI NO: 10177082 NR Description: gene_id:MOP9.4~pir||T04290~similar to unknown
  misc_feature (1)..(341): Homolog of NCBI NO: 15237918 NR Description: lipase (class 3) family [Arabidopsis thaliana] gb|AAD29063.1~gene_id:MOP9.3~similar to unknown protein
  misc_feature (1)..(341): Homolog of NCBI NO: 15237909 NR Description: lipase (class 3) family [Arabidopsis thaliana] gb|AAD29063.1~gene_id:K12G2.7~similar to unknown protein
  misc_feature (1)..(348): Homolog of NCBI NO: 15237913 NR Description: hypothetical protein [Arabidopsis thaliana] gb|AAD29063.1~gene_id:K12G2.9~similar to unknown protein
  misc_feature (1)..(340): Homolog of NCBI NO: 18413406 NR Description: lipase (class 3) family [Arabidopsis thaliana]
  misc_feature (1)..(340): Homolog of NCBI NO: 18396010 NR Description: lipase (class 3) family [Arabidopsis thaliana]
  misc_feature (2)..(343): Homolog of NCBI NO: 15237916 NR Description: lipase (class 3) family [Arabidopsis thaliana] gb|AAD29063.1~gene_id:MOP9.2~similar to unknown protein thaliana] >gi|17529272|gb|AAL38863.1| unknown protein
  misc_feature (1)..(298): Homolog of NCBI NO: 7486138 NR Description: hypothetical protein F25I24.160 - Arabidopsis >gi|4539369|emb|CAB40063.1| putative protein [Arabidopsis >gi|7267793|emb|CAB81196.1| putative protein [Arabidopsis
  misc_feature (34)..(353): Homolog of NCBI NO: 34910674 NR Description: P0690B02.1 [Oryza sativa (japonica
MASQREIFSISGPIHLTSIDWNNSYHRTSVASCLVQAVYTLERDRQQNRIGLKSQANHWWEFFNFTLAETLIDDSDGSIYGAVFEYKHFFSYNYHHTPHSKPPPRHVIAFRGTILKPHSRSRDLKLDLRCIRDSLHDSTRFVHAIQVIQSAVAKTGNAAVWLAGHSLGAAVALLAGKIMTRSGFPLESYLFNPPFSSIPIEKLVKSEKLKHGVRFAGSLVKAGVAIAVKGRHHNKGQEDDSFMKLASWIPYLYLNPLDTICSEYIGYFKHRNKMFEIGAGKIERIATRNSLRSLLSGGGGGGSSSDSSSEPLHLLPSAYMTINASKSPNFKRAHGIHQWWDPMFNGEYVLHQFNN

SEQ ID NO: 99836 - DNA, 1911 bp, Arabidopsis thaliana
  misc_feature (1)..(1911): Ceres Seq. ID no. 13603759
  misc_feature: MA Experiment ID: 20000173 Result: Down-regulated in Transcription
  misc_feature: MA Experiment 20000173 PARAMETER Experiment Name: At_42deg_Heat_P Parameter: Age (day) Value: 14
  misc_feature: MA Experiment 20000173 PARAMETER Experiment Name: At_42deg_Heat_P Parameter: Organism Value: A. thaliana
  misc_feature: MA Experiment 20000173 PARAMETER Experiment Name: At_42deg_Heat_P Parameter: Plant Line Value: WS
  misc_feature: MA Experiment 20000173 PARAMETER Experiment Name: At_42deg_Heat_P Parameter: Temperature (deg C) Value: 42 vs. 22
  misc_feature: MA Experiment 20000173 PARAMETER Experiment Name: At_42deg_Heat_P Parameter: Timepoint (hr) Value: 6
  misc_feature: MA Experiment 20000173 PARAMETER Experiment Name: At_42deg_Heat_P Parameter: Tissue Value: Aerial
  misc_feature: MA Experiment ID: 20000185 Result: Up-regulated in Transcription
  misc_feature: MA Experiment 20000185 PARAMETER Experiment Name: At_Roots__P Parameter: Age (day) Value: 7 vs. 21
  misc_feature: MA Experiment 20000185 PARAMETER Experiment Name: At_Roots__P Parameter: Organism Value: A. thaliana
  misc_feature: MA Experiment 20000185 PARAMETER Experiment Name: At_Roots__P Parameter: Tissue Value: Roots vs. Whole Plant
  misc_feature: MA Experiment ID: 20000211 Result: Up-regulated in Transcription
  misc_feature: MA Experiment 20000211 PARAMETER Experiment Name: At_0.001percent_MeJA__P Parameter: Age (day) Value: 14
  misc_feature: MA Experiment 20000211 PARAMETER Experiment Name: At_0.001percent_MeJA__P Parameter: Organism Value: A. thaliana
  misc_feature: MA Experiment 20000211 PARAMETER Experiment Name: At_0.001percent_MeJA__P Parameter: Plant Line Value: WS
  misc_feature: MA Experiment 20000211 PARAMETER Experiment Name: At_0.001percent_MeJA__P Parameter: Timepoint (hr) Value: 1
  misc_feature: MA Experiment 20000211 PARAMETER Experiment Name: At_0.001percent_MeJA__P Parameter: Tissue Value: Aerial
  misc_feature: MA Experiment 20000211 PARAMETER Experiment Name: At_0.001percent_MeJA__P Parameter: Treatment Value: 0.001percent MeJA vs. No Treatment
  misc_feature: MA Experiment ID: 20000227 Result: Down-regulated in Transcription
  misc_feature: MA Experiment 20000227 PARAMETER Experiment Name: At_Root-Tips-vs-Tops_P Parameter: Tissue Value: Root Tips vs. Root Tops
  misc_feature: MA Experiment ID: 20000439 Result: Up-regulated in Transcription
  misc_feature: MA Experiment 20000439 PARAMETER Experiment Name: At_Roots__P Parameter: Age (day) Value: 14 vs. 21
  misc_feature: MA Experiment 20000439 PARAMETER Experiment Name: At_Roots__P Parameter: Organism Value: A. thaliana
  misc_feature: MA Experiment 20000439 PARAMETER Experiment Name: At_Roots__P Parameter: Tissue Value: Roots vs. Whole Plant
  misc_feature: MA Experiment ID: 20000495 Result: Up-regulated in Transcription
  misc_feature: MA Experiment 20000495 PARAMETER Experiment Name: At_Guard_Cells_P Parameter: Harvest Date Value: 8/2/2002
  misc_feature: MA Experiment 20000495 PARAMETER Experiment Name: At_Guard_Cells_P Parameter: Organism Value: A. thaliana
  misc_feature: MA Experiment 20000495 PARAMETER Experiment Name: At_Guard_Cells_P Parameter: Tissue Value: Guard Cells vs. Leaves
  misc_feature: MA Experiment ID: 20001558 Result: Down-regulated in Transcription
  misc_feature: MA Experiment 20001558 PARAMETER Experiment Name: At_Drought_Soil_Dry_P Parameter: Age (day) Value: 27
  misc_feature: MA Experiment 20001558 PARAMETER Experiment Name: At_Drought_Soil_Dry_P Parameter: Organism Value: A. thaliana
  misc_feature: MA Experiment 20001558 PARAMETER Experiment Name: At_Drought_Soil_Dry_P Parameter: Plant Line Value: WS
  misc_feature: MA Experiment 20001558 PARAMETER Experiment Name: At_Drought_Soil_Dry_P Parameter: Post Timepoint (hr) Value: 6
  misc_feature: MA Experiment 20001558 PARAMETER Experiment Name: At_Drought_Soil_Dry_P Parameter: Post-Treatment Value: Re-Water vs. No Drought
  misc_feature: MA Experiment 20001558 PARAMETER Experiment Name: At_Drought_Soil_Dry_P Parameter: Timepoint (day) Value: 13
  misc_feature: MA Experiment 20001558 PARAMETER Experiment Name: At_Drought_Soil_Dry_P Parameter: Treatment Value: Drought vs. No Drought
atttaaaaaagaaaaaagaagaaaagagagagagagactcacaaatcataatatctccttcattaactcataatcactttaaagaacattggaatcagattcattacatagggattgatatggaaaagtcaaaccaaccagttcatgtaaccttgtccgaattgaaggacggagataaagaaatcgttgatgctgaatttttggttgatcttcttgagagctatagatttggtaaagataatgttcccgcccgagaatttcgatccaaggcggcagcgacggctccggcgccggtcaacaccaccgagatagagttggaagaggataatgatggatctcaagctcaaggtaacaattctgttagtgaaagtacatcatcgctattttccgattcagatccaatagtacttgagagtactgtgagcgaaaccggttcaaacgaagaatctgaaaccggttcaaacgaagaaaatggtaataattggttagagtcgagctccacaaacttgccaaatgtagagaacaaaaggcaacggaatggagaagattgtgagatagaagaggaagaagaaaataacgagagatcattatcggattcagaagagaagtcaaacctagagaagttgcttgggacacaagaaaactatgagcttggaaatgaggatgaagaaaagaacgagagatcatcgtcagattcagaagagaagtcaaacctagagaatttgcttgcgacacaagaaaactacgagctttactgtcctagctgtagcacatgtatcaccagaaatgtggttctcaagaaaagaaaacgagggaagcacgttaattcatctctggatctgaaacccgatataccggttgttgaaccggacgaaccaagcgacattgaggagatggaatcaccagttaaggtttatgtccctgagactcggattgaggatgatcaagaagataaagagggaactatctttacttgcttggtttgtgatctaaagtacttcatccggttaggaacaaagttcttacaacttgattatatcaggggaaaaccggttgagaaatcagttgaagaatatatagatgtgaggaagagtataaacaccacacaatcaccaccacaaattcaaccggacggagaaagattcgccattgagttgttaaagagcaccgtctacggcggtctcactgagaccatcaccagcctcggcgttgtatcatctgcttctgcctctggttcctccaccatgaatatattggctcttgctgtcgcaaatttggccggtgggctcatcgtcctcgctcaaaactttcaagatctaagaaacagttcagatcaagagaaagataggtacgaggaattgttagggagacgtactaaatcccggatacatatcttagtagcggtcatgtcttacattttcttcggcctaattcctccgttagtttacgcattttccttctacgaaaccggaatcaagaactacaagctcatctcggttttcttgggttctctggtttgcgtaattttgctcggttcgatcaaggtctatgtccgaaaaccaaccaattcatgtggatcgactaaagcttatctcaaatctgcggcttattatacgtctattgttgttgcttcttgcggaatctcatacgttgtcggagatattatgggagagtatatcgagaagctcagtttggttggtttagaccagatcagtataacttcaccatgttatggaattaaacccgaggagtgccggtttacttccttttaatatacagtgggactaagaaccggtctgaccaacgttgtataatttctgttctaattacttactaaatctctgtatcttttctagtaaaaaatcaaaactaatgctttcatagaataaatgtgttttgaggtttttcttt

SEQ ID NO: 99837 - protein, 589 aa, Arabidopsis thaliana
  peptide (1)..(589): Ceres Seq. ID no. 13603760
  misc_feature (40)..(589): Homolog of NCBI NO: 30689367 NR Description: expressed protein [Arabidopsis thaliana]
  misc_feature (40)..(589): Homolog of NCBI NO: 21592516 NR Description: unknown [Arabidopsis thaliana]
  misc_feature (40)..(589): Homolog of NCBI NO: 30689371 NR Description: expressed protein [Arabidopsis thaliana] gene_id:MOP9.11~pir||T09026~similar to unknown protein thaliana] >gi|30725326|gb|AAP37685.1| At5g24290 [Arabidopsis
  misc_feature (41)..(270): Homolog of NCBI NO: 30687764 NR Description: expressed protein [Arabidopsis thaliana] AT4g27870/T27E11_110 [Arabidopsis thaliana]
  misc_feature (383)..(561): Homolog of NCBI NO: 30687764 NR Description: expressed protein [Arabidopsis thaliana] AT4g27870/T27E11_110 [Arabidopsis thaliana]
  misc_feature (383)..(561): Homolog of NCBI NO: 7487471 NR Description: hypothetical protein T27E11.110 - Arabidopsis >gi|4972118|emb|CAB43975.1| putative protein [Arabidopsis >gi|7269640|emb|CAB81436.1| putative protein [Arabidopsis
  misc_feature (165)..(270): Homolog of NCBI NO: 7487471 NR Description: hypothetical protein T27E11.110 - Arabidopsis >gi|4972118|emb|CAB43975.1| putative protein [Arabidopsis >gi|7269640|emb|CAB81436.1| putative protein [Arabidopsis
  misc_feature (87)..(340): Homolog of NCBI NO: 24413974 NR Description: contains ESTs to Arabidopsis thaliana protein T27E11.110~unknown protein [Oryza
  misc_feature (349)..(552): Homolog of NCBI NO: 24413974 NR Description: contains ESTs to Arabidopsis thaliana protein T27E11.110~unknown protein [Oryza
  misc_feature (383)..(561): Homolog of NCBI NO: 15912253 NR Description: AT4g27870/T27E11_110 [Arabidopsis thaliana]
LKKKKEEKRERDSQIIISPSLTHNHFKEHWNQIHYIGIDMEKSNQPVHVTLSELKDGDKEIVDAEFLVDLLESYRFGKDNVPAREFRSKAAATAPAPVNTTEIELEEDNDGSQAQGNNSVSESTSSLFSDSDPIVLESTVSETGSNEESETGSNEENGNNWLESSSTNLPNVENKRQRNGEDCEIEEEEENNERSLSDSEEKSNLEKLLGTQENYELGNEDEEKNERSSSDSEEKSNLENLLATQENYELYCPSCSTCITRNVVLKKRKRGKHVNSSLDLKPDIPVVEPDEPSDIEEMESPVKVYVPETRIEDDQEDKEGTIFTCLVCDLKYFIRLGTKFLQLDYIRGKPVEKSVEEYIDVRKSINTTQSPPQIQPDGERFAIELLKSTVYGGLTETITSLGVVSSASASGSSTMNILALAVANLAGGLIVLAQNFQDLRNSSDQEKDRYEELLGRRTKSRIHILVAVMSYIFFGLIPPLVYAFSFYETGIKNYKLISVFLGSLVCVILLGSIKVYVRKPTNSCGSTKAYLKSAAYYTSIVVASCGISYVVGDIMGEYIEKLSLVGLDQISITSPCYGIKPEECRFTSF

SEQ ID NO: 99838 - protein, 550 aa, Arabidopsis thaliana
  peptide (1)..(550): Ceres Seq. ID no. 13603761
  misc_feature (1)..(550): Homolog of NCBI NO: 30689367 NR Description: expressed protein [Arabidopsis thaliana]
  misc_feature (1)..(550): Homolog of NCBI NO: 21592516 NR Description: unknown [Arabidopsis thaliana]
  misc_feature (1)..(550): Homolog of NCBI NO: 30689371 NR Description: expressed protein [Arabidopsis thaliana] gene_id:MOP9.11~pir||T09026~similar to unknown protein thaliana] >gi|30725326|gb|AAP37685.1| At5g24290 [Arabidopsis
  misc_feature (2)..(231): Homolog of NCBI NO: 30687764 NR Description: expressed protein [Arabidopsis thaliana] AT4g27870/T27E11_110 [Arabidopsis thaliana]
  misc_feature (344)..(522): Homolog of NCBI NO: 30687764 NR Description: expressed protein [Arabidopsis thaliana] AT4g27870/T27E11_110 [Arabidopsis thaliana]
  misc_feature (344)..(522): Homolog of NCBI NO: 7487471 NR Description: hypothetical protein T27E11.110 - Arabidopsis >gi|4972118|emb|CAB43975.1| putative protein [Arabidopsis >gi|7269640|emb|CAB81436.1| putative protein [Arabidopsis
  misc_feature (126)..(231): Homolog of NCBI NO: 7487471 NR Description: hypothetical protein T27E11.110 - Arabidopsis >gi|4972118|emb|CAB43975.1| putative protein [Arabidopsis >gi|7269640|emb|CAB81436.1| putative protein [Arabidopsis
  misc_feature (48)..(301): Homolog of NCBI NO: 24413974 NR Description: contains ESTs to Arabidopsis thaliana protein T27E11.110~unknown protein [Oryza
  misc_feature (310)..(513): Homolog of NCBI NO: 24413974 NR Description: contains ESTs to Arabidopsis thaliana protein T27E11.110~unknown protein [Oryza
  misc_feature (344)..(522): Homolog of NCBI NO: 15912253 NR Description: AT4g27870/T27E11_110 [Arabidopsis thaliana]
MEKSNQPVHVTLSELKDGDKEIVDAEFLVDLLESYRFGKDNVPAREFRSKAAATAPAPVNTTEIELEEDNDGSQAQGNNSVSESTSSLFSDSDPIVLESTVSETGSNEESETGSNEENGNNWLESSSTNLPNVENKRQRNGEDCEIEEEEENNERSLSDSEEKSNLEKLLGTQENYELGNEDEEKNERSSSDSEEKSNLENLLATQENYELYCPSCSTCITRNVVLKKRKRGKHVNSSLDLKPDIPVVEPDEPSDIEEMESPVKVYVPETRIEDDQEDKEGTIFTCLVCDLKYFIRLGTKFLQLDYIRGKPVEKSVEEYIDVRKSINTTQSPPQIQPDGERFAIELLKSTVYGGLTETITSLGVVSSASASGSSTMNILALAVANLAGGLIVLAQNFQDLRNSSDQEKDRYEELLGRRTKSRIHILVAVMSYIFFGLIPPLVYAFSFYETGIKNYKLISVFLGSLVCVILLGSIKVYVRKPTNSCGSTKAYLKSAAYYTSIVVASCGISYVVGDIMGEYIEKLSLVGLDQISITSPCYGIKPEECRFTSF

SEQ ID NO: 99839 - DNA, 1312 bp, Arabidopsis thaliana
  misc_feature (1)..(1312): Ceres Seq. ID no. 13603766
  misc_feature: MA Experiment ID: 108462 Result: Up-regulated in Transcription
  misc_feature: MA Experiment 108462 PARAMETER Experiment Name: At_Germinating_Seeds_cDNA_P Parameter: Age (day) Value: 2 vs. 0
  misc_feature: MA Experiment 108462 PARAMETER Experiment Name: At_Germinating_Seeds_cDNA_P Parameter: Tissue Value: Germinating Seeds
  misc_feature: MA Experiment ID: 108573 Result: Up-regulated in Transcription
  misc_feature: MA Experiment 108573 PARAMETER Experiment Name: At_Drought_cDNA_P Parameter: Timepoint (hr) Value: 6
  misc_feature: MA Experiment 108573 PARAMETER Experiment Name: At_Drought_cDNA_P Parameter: Tissue Value: Aerial
  misc_feature: MA Experiment 108573 PARAMETER Experiment Name: At_Drought_cDNA_P Parameter: Treatment Value: Drought vs. No Drought
aacaaaacacaggtttggtcggagaaggctttattaatccacttgtcctcctctcagactctacaaagtcaaagttgttcactttacctataaaaacgctctctcactttcttttcaatggcttcttcttcttgtttccttcgctcgattctcttctcttctcctactaaccttcgttcaaatcaccatctccccactttcttccccaagaattatctcatttgctctcattccacttcttctcgcttcgaatcgctctcggtttcatcgatcggaactggatctaccaagaaatcatccgatactcggagaaaggtaaagagcatggctacgacaaatataggaaaggaggagaagaaaagagtcgagatttatgatctcgaagagaatttagtgattgatttggctaaattcacagcagatctctccgataagttttgtaaagagagaggcgctttcaccgtcgttgtctccggtggctctctcatcaaatcactccggaaattagtagaatctccttacgttgattctatagattgggcaaggtggcattttttctgggttgacgagagagttgttcccaagaatcacgatgatagcaactataaactcgcttatgatagttttctatccaaggtaccaattccgcctggaaatgtatatgcaatcaacgaagccctctccgctgaggctgcagcggatgattacgagacctgcctcaaacatttggtcaacaccaacattctccgtgtatctgaatcaactggctttcccaaatttgatctcatgcttctaggtatgggacctgatggtcatgtggcatcattattccctgggcatggtctctgcaacgagagcaagaaatgggtagtttcaatctctgactctccaaaaccaccgtctgagagaatcaccttcacgttcccggtcatcaactcatctgcacatgtagctctagttgtttgcggttctgggaaagctgaagctgtggaggcagctttaaagaagactgggaatgtaccacctgctggttctgtttctgctgaagacgagttggtttggttcctggacaaaccagcatcttccaagctctaaaaacaggtggtatgcttcccattccagtgaacttaccaatgtgactagtccggtttagtttttggattttgactctttggttctctccatttatgttgtgggaagagactgttgtgataaaagcgtgtactttacatggaaataatgaactaatcaatggtttctctgatttgttttggtgtattttggttaaaatctatcggaaccaacactctcc

SEQ ID NO: 99840 - protein, 325 aa, Arabidopsis thaliana; identical to SEQ ID NO: 35205
  peptide (1)..(325): Ceres Seq. ID no. 13603767
  misc_feature (96)..(324): Pfam Name: Glucosamine-6-phosphate Pfam Description: Glucosamine-6-phosphate
  misc_feature (1)..(325): Homolog of NCBI NO: 18420789 NR Description: 6-phosphogluconolactonase-related protein
  misc_feature (1)..(325): Homolog of NCBI NO: 21554291 NR Description: 6-phosphogluconolactonase-like protein
  misc_feature (70)..(325): Homolog of NCBI NO: 10177901 NR Description: 6-phosphogluconolactonase-like protein
  misc_feature (80)..(325): Homolog of NCBI NO: 28140256 NR Description: putative 6-phosphogluconolactonase [Elaeis
  misc_feature (80)..(325): Homolog of NCBI NO: 15229127 NR Description: 6-phosphogluconolactonase - like protein
  misc_feature (80)..(325): Homolog of NCBI NO: 21536675 NR Description: 6-phosphogluconolactonase-like protein
  misc_feature (70)..(325): Homolog of NCBI NO: 15238523 NR Description: 6-phosphogluconolactonase-related protein
  misc_feature (80)..(325): Homolog of NCBI NO: 21537412 NR Description: 6-phosphogluconolactonase-like protein
  misc_feature (80)..(325): Homolog of NCBI NO: 15238526 NR Description: 6-phosphogluconolactonase-related protein
  misc_feature (81)..(325): Homolog of NCBI NO: 14009294 NR Description: putative 6-phosphogluconolactonase [Brassica

SEQ ID NO: 99841 - protein, 256 aa, Arabidopsis thaliana; identical to SEQ ID NO: 35206
  peptide (1)..(256): Ceres Seq. ID no. 13603768
  misc_feature (27)..(255): Pfam Name: Glucosamine-6-phosphate Pfam Description: Glucosamine-6-phosphate
  misc_feature (1)..(256): Homolog of NCBI NO: 18420789 NR Description: 6-phosphogluconolactonase-related protein
  misc_feature (1)..(256): Homolog of NCBI NO: 21554291 NR Description: 6-phosphogluconolactonase-like protein
  misc_feature (1)..(256): Homolog of NCBI NO: 10177901 NR Description: 6-phosphogluconolactonase-like protein
  misc_feature (11)..(256): Homolog of NCBI NO: 28140256 NR Description: putative 6-phosphogluconolactonase [Elaeis
  misc_feature (11)..(256): Homolog of NCBI NO: 15229127 NR Description: 6-phosphogluconolactonase - like protein
  misc_feature (11)..(256): Homolog of NCBI NO: 21536675 NR Description: 6-phosphogluconolactonase-like protein
  misc_feature (1)..(256): Homolog of NCBI NO: 15238523 NR Description: 6-phosphogluconolactonase-related protein
  misc_feature (11)..(256): Homolog of NCBI NO: 21537412 NR Description: 6-phosphogluconolactonase-like protein
  misc_feature (11)..(256): Homolog of NCBI NO: 15238526 NR Description: 6-phosphogluconolactonase-related protein
  misc_feature (12)..(256): Homolog of NCBI NO: 14009294 NR Description: putative 6-phosphogluconolactonase [Brassica

SEQ ID NO: 99842 - DNA, 2218 bp, Arabidopsis thaliana
  misc_feature (1)..(2218): Ceres Seq. ID no. 13603773
  misc_feature: MA Experiment ID: 108434 Result: Down-regulated in Transcription
  misc_feature: MA Experiment 108434 PARAMETER Experiment Name: At_Root_Tips_cDNA_P Parameter: Tissue Value: Root Tips
  misc_feature: MA Experiment ID: 108569 Result: Up-regulated in Transcription
  misc_feature: MA Experiment 108569 PARAMETER Experiment Name: At_0.001%_MeJA__cDNA_P Parameter: Timepoint (hr) Value: 6
  misc_feature: MA Experiment 108569 PARAMETER Experiment Name: At_0.001%_MeJA__cDNA_P Parameter: Tissue Value: Aerial
  misc_feature: MA Experiment 108569 PARAMETER Experiment Name: At_0.001%_MeJA__cDNA_P Parameter: Treatment Value: 0.001% MeJA vs. No Treatment
  misc_feature: MA Experiment ID: 108573 Result: Up-regulated in Transcription
  misc_feature: MA Experiment 108573 PARAMETER Experiment Name: At_Drought_cDNA_P Parameter: Timepoint (hr) Value: 6
  misc_feature: MA Experiment 108573 PARAMETER Experiment Name: At_Drought_cDNA_P Parameter: Tissue Value: Aerial
  misc_feature: MA Experiment 108573 PARAMETER Experiment Name: At_Drought_cDNA_P Parameter: Treatment Value: Drought vs. No Drought
  misc_feature: MA Experiment ID: 108585 Result: Up-regulated in Transcription
  misc_feature: MA Experiment 108585 PARAMETER Experiment Name: At_5mM_NaNP_cDNA_P Parameter: Timepoint (hr) Value: 6
  misc_feature: MA Experiment 108585 PARAMETER Experiment Name: At_5mM_NaNP_cDNA_P Parameter: Tissue Value: Aerial
  misc_feature: MA Experiment 108585 PARAMETER Experiment Name: At_5mM_NaNP_cDNA_P Parameter: Treatment Value: null
  misc_feature: MA Experiment ID: 108668 Result: Up-regulated in Transcription
  misc_feature: MA Experiment 108668 PARAMETER Experiment Name: At_2mM_SA_cDNA_P Parameter: Plant Line Value: WS
  misc_feature: MA Experiment 108668 PARAMETER Experiment Name: At_2mM_SA_cDNA_P Parameter: Timepoint (hr) Value: 6
  misc_feature: MA Experiment 108668 PARAMETER Experiment Name: At_2mM_SA_cDNA_P Parameter: Treatment Value: 2mM SA vs. No Treatment
  misc_feature: MA Experiment ID: 20000182 Result: Up-regulated in Transcription
  misc_feature: MA Experiment 20000182 PARAMETER Experiment Name: At_2mM_SA_P Parameter: Age (day) Value: 14
  misc_feature: MA Experiment 20000182 PARAMETER Experiment Name: At_2mM_SA_P Parameter: Organism Value: A. thaliana
  misc_feature: MA Experiment 20000182 PARAMETER Experiment Name: At_2mM_SA_P Parameter: Plant Line Value: WS
  misc_feature: MA Experiment 20000182 PARAMETER Experiment Name: At_2mM_SA_P Parameter: Timepoint (hr) Value: 6
  misc_feature: MA Experiment 20000182 PARAMETER Experiment Name: At_2mM_SA_P Parameter: Tissue Value: Aerial
  misc_feature: MA Experiment 20000182 PARAMETER Experiment Name: At_2mM_SA_P Parameter: Treatment Value: 2mM SA vs. No Treatment
  misc_feature: MA Experiment ID: 20001247 Result: Up-regulated in Transcription
  misc_feature: MA Experiment 20001247 PARAMETER Experiment Name: At_Far-red-induction_P Parameter: Age (day) Value: 7
  misc_feature: MA Experiment 20001247 PARAMETER Experiment Name: At_Far-red-induction_P Parameter: Light Value: Far-red vs. White
  misc_feature: MA Experiment 20001247 PARAMETER Experiment Name: At_Far-red-induction_P Parameter: Organism Value: A. thaliana
  misc_feature: MA Experiment 20001247 PARAMETER Experiment Name: At_Far-red-induction_P Parameter: Plant Line Value: Columbia
  misc_feature: MA Experiment 20001247 PARAMETER Experiment Name: At_Far-red-induction_P Parameter: Timepoint (hr) Value: 1
  misc_feature: MA Experiment 20001247 PARAMETER Experiment Name: At_Far-red-induction_P Parameter: Tissue Value: Whole Plant
agtggtcttcatttaacaaacgccttctctcttttttcctttaaatctctgagctcttttttcttcatttgtttttttgccaaaaaaaaatatatatattgaatcttcattcattaaaaaaacaatttttatttttccctattcatcttcggttcctcaccgtccgatgctttgactctgaccaatcagtcaatttgagcttcacaatcaacggtcatgggtcattgttacagccggaacatctccgccgtcgaggacgacgagatccccaccggtaacggcgaggtttcgaatcaaccatctcaaaatcaccggcatgcttcgattcctcagtctccggttgcttctggtactcctgaagtcaactcatataacattagccctttccaaagcccgttaccggcgggagtagctccatcaccggcgagaactccgggacggaagttcaaatggccgtttcctccaccgtcacctgcgaaaccgattatggcggctttgagacgacgacgtggcgctccgcctcagcctcgagatgagccgatcccggaggatagtgaagatgtagtagatcacggtggtgacagtggcggcggagagaggttagataagaatttcgggtttgggaagaacttcgaagggaagtatgagttagggaaagaagtagggcgagggcattttggtcatacttgttgggcaaaagcgaagaaaggcaagatgaagaaccaaaccgtggctgtcaaaatcatctctaaagctaagatgacgtcgacgttatctattgaagatgttcgtagagaagtgaaattgctgaaagctttatcagggcataggcatatggttaagttctatgatgtatatgaggatgctgataatgtctttgttgttatggagttatgcgaaggtggagagctattggatagaattttggcgagaggtggacgataccctgaagtcgatgccaaacgtattcttgtgcagattttgtctgcaacagcattttttcaccttcaaggtgtcgtgcaccgtgatctgaagccggagaattttctctttaccagcagaaatgaggatgcgatactcaaggtcatagattttggcttgtctgatttcattagatacgatcagcgtctcaatgatgttgtaggaagtgcatactatgttgcacctgaagtactccataggtcttacagcactgaagcagatatgtggagcatcggtgtcataagttacatacttctctgtggaagcagacctttctatggaagaactgagtctgcaatattccgttgtgtgcttagagcaaaccctaattttgaggatatgccttggccttctatatctcctactgccaaagacttcgtgaaaaggcttttgaacaaggaccataggaaacgaatgacagctgctcaagctctagctcatccgtggttacgtgacgaaaaccccggtttgcttcttgatttctcggtctacaagttggtcaagtcctatatccgtgcctcacctttccgacgatcagcacttaaggctctctcgaaagctatacctgatgaagaacttgtgttccttaaggcacagttcatgctcctggatcctaaagacggaggcctatcccttaactgtttcacaatggctttaacaagatatgctactgatgctatgatggaatcaaggcttcctgacattttaaatacgatgcaacctctggcgcaaaagaagcttgactttgaagagttctgtgcggctgcggtcagtgtttaccaactggaggctcttgaagaatgggaacagattgcaacttcagcatttgagcactttgaacatgaaggaaaccgaatcatatctgtccaagaactcgccggggagatgagcgtgggaccgagtgcatatcctctgctcaaggattggatccgaagttcggatggaaagctgagtttcttggggtacgctaagttcttgcatggtgtgaccgtacgaagctcaagctcgagacctaggtgacacaccatgatgtaaaaagtcttctaacatgtgaattgagtttcaagaaacatcctaaacaatgtcgtcgtcagagaccttggattcaaagattaaaaaaaaaaacttgaaatggaagtgaagtcaggtaggtatttcctttgtaaatgattctttgagcattttgttttcgaaacaaactaaaaaaggaaaaacatattatatatgttatagaagg

SEQ ID NO: 99843 - protein, 594 aa, Arabidopsis thaliana
  peptide (1)..(594): Ceres Seq. ID no. 13603774
  misc_feature (143)..(405): Pfam Name: Protein kinase domain Pfam Description: Protein kinase domain
  misc_feature (1)..(593): Homolog of NCBI NO: 15229129 NR Description: calcium-dependent protein kinase, putative (CDPK)
  misc_feature (167)..(594): Homolog of NCBI NO: 30689449 NR Description: calcium-dependent protein kinase, putative (CDPK)
  misc_feature (167)..(594): Homolog of NCBI NO: 22136058 NR Description: calcium dependent protein kinase-like protein
  misc_feature (142)..(594): Homolog of NCBI NO: 4741927 NR Description: calcium dependent protein kinase CP4 [Arabidopsis
  misc_feature (1)..(592): Homolog of NCBI NO: 16904222 NR Description: calcium/calmodulin-dependent protein kinase CaMK1
  misc_feature (1)..(592): Homolog of NCBI NO: 19547871 NR Description: serine/threonine protein kinase pk23
  misc_feature (1)..(592): Homolog of NCBI NO: 7446431 NR Description: calcium-dependent protein kinase-related protein
  misc_feature (1)..(594): Homolog of NCBI NO: 15226426 NR Description: calcium-dependent protein kinase, putative (CDPK)
  misc_feature (1)..(594): Homolog of NCBI NO: 18087555 NR Description: At2g46700/T3A4.8 [Arabidopsis thaliana]
  misc_feature (10)..(592): Homolog of NCBI NO: 7446432 NR Description: calcium/calmodulin-dependent protein kinase
MGHCYSRNISAVEDDEIPTGNGEVSNQPSQNHRHASIPQSPVASGTPEVNSYNISPFQSPLPAGVAPSPARTPGRKFKWPFPPPSPAKPIMAALRRRRGAPPQPRDEPIPEDSEDVVDHGGDSGGGERLDKNFGFGKNFEGKYELGKEVGRGHFGHTCWAKAKKGKMKNQTVAVKIISKAKMTSTLSIEDVRREVKLLKALSGHRHMVKFYDVYEDADNVFVVMELCEGGELLDRILARGGRYPEVDAKRILVQILSATAFFHLQGVVHRDLKPENFLFTSRNEDAILKVIDFGLSDFIRYDQRLNDVVGSAYYVAPEVLHRSYSTEADMWSIGVISYILLCGSRPFYGRTESAIFRCVLRANPNFEDMPWPSISPTAKDFVKRLLNKDHRKRMTAAQALAHPWLRDENPGLLLDFSVYKLVKSYIRASPFRRSALKALSKAIPDEELVFLKAQFMLLDPKDGGLSLNCFTMALTRYATDAMMESRLPDILNTMQPLAQKKLDFEEFCAAAVSVYQLEALEEWEQIATSAFEHFEHEGNRIISVQELAGEMSVGPSAYPLLKDWIRSSDGKLSFLGYAKFLHGVTVRSSSSRPR

SEQ ID NO: 99844 - protein, 504 aa, Arabidopsis thaliana
  peptide (1)..(504): Ceres Seq. ID no. 13603775
  misc_feature (53)..(315): Pfam Name: Protein kinase domain Pfam Description: Protein kinase domain
  misc_feature (1)..(503): Homolog of NCBI NO: 15229129 NR Description: calcium-dependent protein kinase, putative (CDPK)
  misc_feature (77)..(504): Homolog of NCBI NO: 30689449 NR Description: calcium-dependent protein kinase, putative (CDPK)
  misc_feature (77)..(504): Homolog of NCBI NO: 22136058 NR Description: calcium dependent protein kinase-like protein
  misc_feature (52)..(504): Homolog of NCBI NO: 4741927 NR Description: calcium dependent protein kinase CP4 [Arabidopsis
  misc_feature (1)..(502): Homolog of NCBI NO: 16904222 NR Description: calcium/calmodulin-dependent protein kinase CaMK1
  misc_feature (1)..(502): Homolog of NCBI NO: 19547871 NR Description: serine/threonine protein kinase pk23
  misc_feature (1)..(502): Homolog of NCBI NO: 7446431 NR Description: calcium-dependent protein kinase-related protein
  misc_feature (1)..(504): Homolog of NCBI NO: 15226426 NR Description: calcium-dependent protein kinase, putative (CDPK)
  misc_feature (1)..(504): Homolog of NCBI NO: 18087555 NR Description: At2g46700/T3A4.8 [Arabidopsis thaliana]
  misc_feature (1)..(502): Homolog of NCBI NO: 7446432 NR Description: calcium/calmodulin-dependent protein kinase
MAALRRRRGAPPQPRDEPIPEDSEDVVDHGGDSGGGERLDKNFGFGKNFEGKYELGKEVGRGHFGHTCWAKAKKGKMKNQTVAVKIISKAKMTSTLSIEDVRREVKLLKALSGHRHMVKFYDVYEDADNVFVVMELCEGGELLDRILARGGRYPEVDAKRILVQILSATAFFHLQGVVHRDLKPENFLFTSRNEDAILKVIDFGLSDFIRYDQRLNDVVGSAYYVAPEVLHRSYSTEADMWSIGVISYILLCGSRPFYGRTESAIFRCVLRANPNFEDMPWPSISPTAKDFVKRLLNKDHRKRMTAAQALAHPWLRDENPGLLLDFSVYKLVKSYIRASPFRRSALKALSKAIPDEELVFLKAQFMLLDPKDGGLSLNCFTMALTRYATDAMMESRLPDILNTMQPLAQKKLDFEEFCAAAVSVYQLEALEEWEQIATSAFEHFEHEGNRIISVQELAGEMSVGPSAYPLLKDWIRSSDGKLSFLGYAKFLHGVTVRSSSSRPR

SEQ ID NO: 99845 - protein, 428 aa, Arabidopsis thaliana
  peptide (1)..(428): Ceres Seq. ID no. 13603776
  misc_feature (1)..(239): Pfam Name: Protein kinase domain Pfam Description: Protein kinase domain
  misc_feature (1)..(427): Homolog of NCBI NO: 15229129 NR Description: calcium-dependent protein kinase, putative (CDPK)
  misc_feature (1)..(428): Homolog of NCBI NO: 30689449 NR Description: calcium-dependent protein kinase, putative (CDPK)
  misc_feature (1)..(428): Homolog of NCBI NO: 22136058 NR Description: calcium dependent protein kinase-like protein
  misc_feature (1)..(428): Homolog of NCBI NO: 4741927 NR Description: calcium dependent protein kinase CP4 [Arabidopsis
  misc_feature (1)..(426): Homolog of NCBI NO: 16904222 NR Description: calcium/calmodulin-dependent protein kinase CaMK1
  misc_feature (1)..(426): Homolog of NCBI NO: 19547871 NR Description: serine/threonine protein kinase pk23
  misc_feature (1)..(426): Homolog of NCBI NO: 7446431 NR Description: calcium-dependent protein kinase-related protein
  misc_feature (1)..(428): Homolog of NCBI NO: 15226426 NR Description: calcium-dependent protein kinase, putative (CDPK)
  misc_feature (1)..(428): Homolog of NCBI NO: 18087555 NR Description: At2g46700/T3A4.8 [Arabidopsis thaliana]
  misc_feature (1)..(426): Homolog of NCBI NO: 7446432 NR Description: calcium/calmodulin-dependent protein kinase
MKNQTVAVKIISKAKMTSTLSIEDVRREVKLLKALSGHRHMVKFYDVYEDADNVFVVMELCEGGELLDRILARGGRYPEVDAKRILVQILSATAFFHLQGVVHRDLKPENFLFTSRNEDAILKVIDFGLSDFIRYDQRLNDVVGSAYYVAPEVLHRSYSTEADMWSIGVISYILLCGSRPFYGRTESAIFRCVLRANPNFEDMPWPSISPTAKDFVKRLLNKDHRKRMTAAQALAHPWLRDENPGLLLDFSVYKLVKSYIRASPFRRSALKALSKAIPDEELVFLKAQFMLLDPKDGGLSLNCFTMALTRYATDAMMESRLPDILNTMQPLAQKKLDFEEFCAAAVSVYQLEALEEWEQIATSAFEHFEHEGNRIISVQELAGEMSVGPSAYPLLKDWIRSSDGKLSFLGYAKFLHGVTVRSSSSRPR

SEQ ID NO: 99846 - DNA, 1326 bp, Arabidopsis thaliana
  misc_feature (1)..(1326): Ceres Seq. ID no. 13603780
  misc_feature: MA Experiment ID: 108434 Result: Down-regulated in Transcription
  misc_feature: MA Experiment 108434 PARAMETER Experiment Name: At_Root_Tips_cDNA_P Parameter: Tissue Value: Root Tips
  misc_feature: MA Experiment ID: 108462 Result: Up-regulated in Transcription
  misc_feature: MA Experiment 108462 PARAMETER Experiment Name: At_Germinating_Seeds_cDNA_P Parameter: Age (day) Value: 2 vs. 0
  misc_feature: MA Experiment 108462 PARAMETER Experiment Name: At_Germinating_Seeds_cDNA_P Parameter: Tissue Value: Germinating Seeds
  misc_feature: MA Experiment ID: 108463 Result: Up-regulated in Transcription
  misc_feature: MA Experiment 108463 PARAMETER Experiment Name: At_Germinating_Seeds_cDNA_P Parameter: Age (day) Value: 3 vs. 0
  misc_feature: MA Experiment 108463 PARAMETER Experiment Name: At_Germinating_Seeds_cDNA_P Parameter: Tissue Value: Germinating Seeds
  misc_feature: MA Experiment ID: 108464 Result: Up-regulated in Transcription
  misc_feature: MA Experiment 108464 PARAMETER Experiment Name: At_Germinating_Seeds_cDNA_P Parameter: Age (day) Value: 4 vs. 0
  misc_feature: MA Experiment 108464 PARAMETER Experiment Name: At_Germinating_Seeds_cDNA_P Parameter: Tissue Value: Germinating Seeds
  misc_feature: MA Experiment ID: 108469 Result: Up-regulated in Transcription
  misc_feature: MA Experiment ID: 108594 Result: Down-regulated in Transcription
  misc_feature: MA Experiment 108594 PARAMETER Experiment Name: At_Ler-rhl_Root_cDNA_P Parameter: Plant Line Value: null
  misc_feature: MA Experiment ID: 108595 Result: Down-regulated in Transcription
  misc_feature: MA Experiment 108595 PARAMETER Experiment Name: At_Ler-pi_Ovule_cDNA_P Parameter: Plant Line Value: null
  misc_feature: MA Experiment ID: 108608 Result: Up-regulated in Transcription
  misc_feature: MA Experiment 108608 PARAMETER Experiment Name: At_100uM_ABA_cDNA_P Parameter: Timepoint (hr) Value: 1
  misc_feature: MA Experiment 108608 PARAMETER Experiment Name: At_100uM_ABA_cDNA_P Parameter: Tissue Value: Aerial
  misc_feature: MA Experiment 108608 PARAMETER Experiment Name: At_100uM_ABA_cDNA_P Parameter: Treatment Value: 100uM ABA vs. No Treatment
  misc_feature: MA Experiment ID: 108668 Result: Up-regulated in Transcription
  misc_feature: MA Experiment 108668 PARAMETER Experiment Name: At_2mM_SA_cDNA_P Parameter: Plant Line Value: WS
  misc_feature: MA Experiment 108668 PARAMETER Experiment Name: At_2mM_SA_cDNA_P Parameter: Timepoint (hr) Value: 6
  misc_feature: MA Experiment 108668 PARAMETER Experiment Name: At_2mM_SA_cDNA_P Parameter: Treatment Value: 2mM SA vs. No Treatment
  misc_feature: MA Experiment ID: 20000068 Result: Down-regulated in Transcription
  misc_feature: MA Experiment ID: 20000089 Result: Up-regulated in Transcription
  misc_feature: MA Experiment ID: 20000090 Result: Up-regulated in Transcription
  misc_feature: MA Experiment ID: 20000166 Result: Up-regulated in Transcription
  misc_feature: MA Experiment 20000166 PARAMETER Experiment Name: At_100uM_ABA_P Parameter: Age (day) Value: 14
  misc_feature: MA Experiment 20000166 PARAMETER Experiment Name: At_100uM_ABA_P Parameter: Organism Value: A. thaliana
  misc_feature: MA Experiment 20000166 PARAMETER Experiment Name: At_100uM_ABA_P Parameter: Plant Line Value: WS
  misc_feature: MA Experiment 20000166 PARAMETER Experiment Name: At_100uM_ABA_P Parameter: Timepoint (hr) Value: 1
  misc_feature: MA Experiment 20000166 PARAMETER Experiment Name: At_100uM_ABA_P Parameter: Tissue Value: Aerial
  misc_feature: MA Experiment 20000166 PARAMETER Experiment Name: At_100uM_ABA_P Parameter: Treatment Value: 100uM ABA vs. No Treatment
  misc_feature: MA Experiment ID: 20000173 Result: Down-regulated in Transcription
  misc_feature: MA Experiment 20000173 PARAMETER Experiment Name: At_42deg_Heat_P Parameter: Age (day) Value: 14
  misc_feature: MA Experiment 20000173 PARAMETER Experiment Name: At_42deg_Heat_P Parameter: Organism Value: A. thaliana
  misc_feature: MA Experiment 20000173 PARAMETER Experiment Name: At_42deg_Heat_P Parameter: Plant Line Value: WS
  misc_feature: MA Experiment 20000173 PARAMETER Experiment Name: At_42deg_Heat_P Parameter: Temperature (deg C) Value: 42 vs. 22
  misc_feature: MA Experiment 20000173 PARAMETER Experiment Name: At_42deg_Heat_P Parameter: Timepoint (hr) Value: 6
  misc_feature: MA Experiment 20000173 PARAMETER Experiment Name: At_42deg_Heat_P Parameter: Tissue Value: Aerial
  misc_feature: MA Experiment ID: 20000180 Result: Up-regulated in Transcription
  misc_feature: MA Experiment 20000180 PARAMETER Experiment Name: At_Germinating_Seeds_P Parameter: Age (hr) Value: 24 vs. 0
  misc_feature: MA Experiment 20000180 PARAMETER Experiment Name: At_Germinating_Seeds_P Parameter: Tissue Value: Germinating Seeds
  misc_feature: MA Experiment ID: 20000182 Result: Up-regulated in Transcription
  misc_feature: MA Experiment 20000182 PARAMETER Experiment Name: At_2mM_SA_P Parameter: Age (day) Value: 14
  misc_feature: MA Experiment 20000182 PARAMETER Experiment Name: At_2mM_SA_P Parameter: Organism Value: A. thaliana
  misc_feature: MA Experiment 20000182 PARAMETER Experiment Name: At_2mM_SA_P Parameter: Plant Line Value: WS
  misc_feature: MA Experiment 20000182 PARAMETER Experiment Name: At_2mM_SA_P Parameter: Timepoint (hr) Value: 6
  misc_feature: MA Experiment 20000182 PARAMETER Experiment Name: At_2mM_SA_P Parameter: Tissue Value: Aerial
  misc_feature: MA Experiment 20000182 PARAMETER Experiment Name: At_2mM_SA_P Parameter: Treatment Value: 2mM SA vs. No Treatment
  misc_feature: MA Experiment ID: 20000184 Result: Down-regulated in Transcription
  misc_feature: MA Experiment 20000184 PARAMETER Experiment Name: At_Shoots__P Parameter: Age (day) Value: 7
  misc_feature: MA Experiment 20000184 PARAMETER Experiment Name: At_Shoots__P Parameter: Tissue Value: Shoots vs. Whole Plant
  misc_feature: MA Experiment ID: 20000224 Result: Up-regulated in Transcription
  misc_feature: MA Experiment ID: 20000227 Result: Down-regulated in Transcription
  misc_feature: MA Experiment 20000227 PARAMETER Experiment Name: At_Root-Tips-vs-Tops_P Parameter: Tissue Value: Root Tips vs. Root Tops
  misc_feature: MA Experiment ID: 20000234 Result: Down-regulated in Transcription
  misc_feature: MA Experiment 20000234 PARAMETER Experiment Name: At_Siliques_P Parameter: Age (day) Value: 21
  misc_feature: MA Experiment 20000234 PARAMETER Experiment Name: At_Siliques_P Parameter: Organism Value: A. thaliana
  misc_feature: MA Experiment 20000234 PARAMETER Experiment Name: At_Siliques_P Parameter: Plant Line Value: WS
  misc_feature: MA Experiment 20000234 PARAMETER Experiment Name: At_Siliques_P Parameter: Tissue Value: Less Than 5mm Siliques vs. Whole Plant
  misc_feature: MA Experiment ID: 20000264 Result: Down-regulated in Transcription
  misc_feature: MA Experiment 20000264 PARAMETER Experiment Name: At_Open_Flower_P Parameter: Age (day) Value: 21
  misc_feature: MA Experiment 20000264 PARAMETER Experiment Name: At_Open_Flower_P Parameter: Plant Line Value: WS
  misc_feature: MA Experiment 20000264 PARAMETER Experiment Name: At_Open_Flower_P Parameter: Tissue Value: Open Flower vs. Whole Plant
  misc_feature: MA Experiment ID: 20000265 Result: Down-regulated in Transcription
  misc_feature: MA Experiment 20000265 PARAMETER Experiment Name: At_Open_Flower_P Parameter: Age (day) Value: 21
  misc_feature: MA Experiment 20000265 PARAMETER Experiment Name: At_Open_Flower_P Parameter: Plant Line Value: WS
  misc_feature: MA Experiment 20000265 PARAMETER Experiment Name: At_Open_Flower_P Parameter: Tissue Value: Closed Flower vs. Whole Plant
  misc_feature: MA Experiment ID: 20000286 Result: Down-regulated in Transcription
  misc_feature: MA Experiment 20000286 PARAMETER Experiment Name: At_Open_Flower_P Parameter: Age (day) Value: 21
  misc_feature: MA Experiment 20000286 PARAMETER Experiment Name: At_Open_Flower_P Parameter: Plant Line Value: WS
  misc_feature: MA Experiment 20000286 PARAMETER Experiment Name: At_Open_Flower_P Parameter: Tissue Value: Half Open vs. Whole Plant
  misc_feature: MA Experiment ID: 20000438 Result: Down-regulated in Transcription
  misc_feature: MA Experiment 20000438 PARAMETER Experiment Name: At_Shoots__P Parameter: Age (day) Value: 14
  misc_feature: MA Experiment 20000438 PARAMETER Experiment Name: At_Shoots__P Parameter: Tissue Value: Shoots vs. Whole Plant
  misc_feature: MA Experiment ID: 20000527 Result: Down-regulated in Transcription
  misc_feature: MA Experiment 20000527 PARAMETER Experiment Name: At_10percent_PEG_P Parameter: Age (day) Value: 20
  misc_feature: MA Experiment 20000527 PARAMETER Experiment Name: At_10percent_PEG_P Parameter: Organism Value: A. thaliana
  misc_feature: MA Experiment 20000527 PARAMETER Experiment Name: At_10percent_PEG_P Parameter: Plant Line Value: WS
  misc_feature: MA Experiment 20000527 PARAMETER Experiment Name: At_10percent_PEG_P Parameter: Timepoint (day) Value: 20
  misc_feature: MA Experiment 20000527 PARAMETER Experiment Name: At_10percent_PEG_P Parameter: Tissue Value: Whole Plant
  misc_feature: MA Experiment 20000527 PARAMETER Experiment Name: At_10percent_PEG_P Parameter: Treatment Value: 10percent PEG vs. No Treatment
  misc_feature: MA Experiment ID: 20000794 Result: Down-regulated in Transcription
  misc_feature: MA Experiment 20000794 PARAMETER Experiment Name: At_Petals_P Parameter: Age (day) Value: 23-25 days
  misc_feature: MA Experiment 20000794 PARAMETER Experiment Name: At_Petals_P Parameter: Plant Line Value: WS
  misc_feature: MA Experiment 20000794 PARAMETER Experiment Name: At_Petals_P Parameter: Tissue Value: Petals vs. Whole plant
  misc_feature: MA Experiment ID: 20001554 Result: Down-regulated in Transcription
  misc_feature: MA Experiment 20001554 PARAMETER Experiment Name: At_Drought_Soil_Dry_P Parameter: Age (day) Value: 21
  misc_feature: MA Experiment 20001554 PARAMETER Experiment Name: At_Drought_Soil_Dry_P Parameter: Organism Value: A. thaliana
  misc_feature: MA Experiment 20001554 PARAMETER Experiment Name: At_Drought_Soil_Dry_P Parameter: Plant Line Value: WS
  misc_feature: MA Experiment 20001554 PARAMETER Experiment Name: At_Drought_Soil_Dry_P Parameter: Post Timepoint (hr) Value: None
  misc_feature: MA Experiment 20001554 PARAMETER Experiment Name: At_Drought_Soil_Dry_P Parameter: Post-Treatment Value: None
  misc_feature: MA Experiment 20001554 PARAMETER Experiment Name: At_Drought_Soil_Dry_P Parameter: Timepoint (day) Value: 7
  misc_feature: MA Experiment 20001554 PARAMETER Experiment Name: At_Drought_Soil_Dry_P Parameter: Treatment Value: Drought vs. No Drought
  misc_feature: MA Experiment ID: 20001555 Result: Down-regulated in Transcription
  misc_feature: MA Experiment 20001555 PARAMETER Experiment Name: At_Drought_Soil_Dry_P Parameter: Age (day) Value: 24
  misc_feature: MA Experiment 20001555 PARAMETER Experiment Name: At_Drought_Soil_Dry_P Parameter: Organism Value: A. thaliana
  misc_feature: MA Experiment 20001555 PARAMETER Experiment Name: At_Drought_Soil_Dry_P Parameter: Plant Line Value: WS
  misc_feature: MA Experiment 20001555 PARAMETER Experiment Name: At_Drought_Soil_Dry_P Parameter: Post Timepoint (hr) Value: None
  misc_feature: MA Experiment 20001555 PARAMETER Experiment Name: At_Drought_Soil_Dry_P Parameter: Post-Treatment Value: None
  misc_feature: MA Experiment 20001555 PARAMETER Experiment Name: At_Drought_Soil_Dry_P Parameter: Timepoint (day) Value: 10
  misc_feature: MA Experiment 20001555 PARAMETER Experiment Name: At_Drought_Soil_Dry_P Parameter: Treatment Value: Drought vs. No Drought
  misc_feature: MA Experiment ID: 20001556 Result: Down-regulated in Transcription
  misc_feature: MA Experiment 20001556 PARAMETER Experiment Name: At_Drought_Soil_Dry_P Parameter: Age (day) Value: 26
  misc_feature: MA Experiment 20001556 PARAMETER Experiment Name: At_Drought_Soil_Dry_P Parameter: Organism Value: A. thaliana
  misc_feature: MA Experiment 20001556 PARAMETER Experiment Name: At_Drought_Soil_Dry_P Parameter: Plant Line Value: WS
  misc_feature: MA Experiment 20001556 PARAMETER Experiment Name: At_Drought_Soil_Dry_P Parameter: Post Timepoint (hr) Value: None
  misc_feature: MA Experiment 20001556 PARAMETER Experiment Name: At_Drought_Soil_Dry_P Parameter: Post-Treatment Value: None
  misc_feature: MA Experiment 20001556 PARAMETER Experiment Name: At_Drought_Soil_Dry_P Parameter: Timepoint (day) Value: 12
  misc_feature: MA Experiment 20001556 PARAMETER Experiment Name: At_Drought_Soil_Dry_P Parameter: Treatment Value: Drought vs. No Drought
  misc_feature: MA Experiment ID: 20001557 Result: Down-regulated in Transcription
  misc_feature: MA Experiment 20001557 PARAMETER Experiment Name: At_Drought_Soil_Dry_P Parameter: Age (day) Value: 27
  misc_feature: MA Experiment 20001557 PARAMETER Experiment Name: At_Drought_Soil_Dry_P Parameter: Organism Value: A. thaliana
  misc_feature: MA Experiment 20001557 PARAMETER Experiment Name: At_Drought_Soil_Dry_P Parameter: Plant Line Value: WS
  misc_feature: MA Experiment 20001557 PARAMETER Experiment Name: At_Drought_Soil_Dry_P Parameter: Post Timepoint (hr) Value: 3
  misc_feature: MA Experiment 20001557 PARAMETER Experiment Name: At_Drought_Soil_Dry_P Parameter: Post-Treatment Value: Re-Water vs. No Drought
  misc_feature: MA Experiment 20001557 PARAMETER Experiment Name: At_Drought_Soil_Dry_P Parameter: Timepoint (day) Value: 13
  misc_feature: MA Experiment 20001557 PARAMETER Experiment Name: At_Drought_Soil_Dry_P Parameter: Treatment Value: Drought vs. No Drought
  misc_feature: MA Experiment ID: 20001559 Result: Down-regulated in Transcription
  misc_feature: MA Experiment 20001559 PARAMETER Experiment Name: At_Drought_Soil_Dry_P Parameter: Age (day) Value: 28
  misc_feature: MA Experiment 20001559 PARAMETER Experiment Name: At_Drought_Soil_Dry_P Parameter: Organism Value: A. thaliana
  misc_feature: MA Experiment 20001559 PARAMETER Experiment Name: At_Drought_Soil_Dry_P Parameter: Plant Line Value: WS
  misc_feature: MA Experiment 20001559 PARAMETER Experiment Name: At_Drought_Soil_Dry_P Parameter: Post Timepoint (hr) Value: 29
  misc_feature: MA Experiment 20001559 PARAMETER Experiment Name: At_Drought_Soil_Dry_P Parameter: Post-Treatment Value: Re-Water vs. No Drought
  misc_feature: MA Experiment 20001559 PARAMETER Experiment Name: At_Drought_Soil_Dry_P Parameter: Timepoint (day) Value: 14
  misc_feature: MA Experiment 20001559 PARAMETER Experiment Name: At_Drought_Soil_Dry_P Parameter: Treatment Value: Drought vs. No Drought
  misc_feature: MA Experiment ID: 20001560 Result: Down-regulated in Transcription
  misc_feature: MA Experiment 20001560 PARAMETER Experiment Name: At_Drought_Soil_Dry_P Parameter: Age (day) Value: 28
  misc_feature: MA Experiment 20001560 PARAMETER Experiment Name: At_Drought_Soil_Dry_P Parameter: Organism Value: A. thaliana
  misc_feature: MA Experiment 20001560 PARAMETER Experiment Name: At_Drought_Soil_Dry_P Parameter: Plant Line Value: WS
  misc_feature: MA Experiment 20001560 PARAMETER Experiment Name: At_Drought_Soil_Dry_P Parameter: Post Timepoint (hr) Value: None
  misc_feature: MA Experiment 20001560 PARAMETER Experiment Name: At_Drought_Soil_Dry_P Parameter: Post-Treatment Value: None
  misc_feature: MA Experiment 20001560 PARAMETER Experiment Name: At_Drought_Soil_Dry_P Parameter: Timepoint (day) Value: 14
  misc_feature: MA Experiment 20001560 PARAMETER Experiment Name: At_Drought_Soil_Dry_P Parameter: Treatment Value: Drought vs. No Drought
  misc_feature: MA Experiment ID: 20001773 Result: Down-regulated in Transcription
  misc_feature: MA Experiment 20001773 PARAMETER Experiment Name: At_Far-red-enriched-adult_P Parameter: Age (day) Value: 30
  misc_feature: MA Experiment 20001773 PARAMETER Experiment Name: At_Far-red-enriched-adult_P Parameter: Light Value: Far-red enriched vs. White
  misc_feature: MA Experiment 20001773 PARAMETER Experiment Name: At_Far-red-enriched-adult_P Parameter: Organism Value: A. thaliana
  misc_feature: MA Experiment 20001773 PARAMETER Experiment Name: At_Far-red-enriched-adult_P Parameter: Plant Line Value: Columbia
  misc_feature: MA Experiment 20001773 PARAMETER Experiment Name: At_Far-red-enriched-adult_P Parameter: Timepoint (hr) Value: 48
  misc_feature: MA Experiment 20001773 PARAMETER Experiment Name: At_Far-red-enriched-adult_P Parameter: Tissue Value: Aerial
actcaaagtcgagccttccttcctttatctcttataccctttttgattcttcttcaattttctgacatcaaatggcggcaaagctgatatccaccggtttccgtcatactactttgccggaaaactatgtccggccaatctccgaccgtccacgtctctctgaagtctctcaactcgaagatttccctctcatcgatctctcttccactgatcgatcttttctcatccaacaaatccaccaagcttgtgcccgattcggattttttcaggtcataaatcacggagttaacaaacaaataatagatgagatggtgagtgttgcgcgtgagttctttagcatgtctatggaagaaaaaatgaagctatattcagacgatccaacgaagacaacaagattatcgacgagcttcaatgtgaagaaagaagaagtcaacaattggagagactatctaagactccattgttatcctatccacaagtatgtcaatgagtggccgtcaaaccctccttctttcaaggaaatagtaagtaaatacagtagagaagtaagagaagtgggatttaaaatagaggaattaatatcagagagcttaggtttagaaaaagattacatgaagaaagtgcttggtgaacaaggtcaacacatggcagtcaactattatcctccatgtcctgaacctgagctcacttacggtttacctgctcataccgacccaaacgccctaaccattcttcttcaagacactactgtttgcggtctccagatcttgatcgacggtcagtggttcgccgttaatccacatcctgatgcttttgtcatcaacataggtgaccagttacaggcattaagtaatggagtatacaaaagtgtttggcatcgcgctgtaacaaacacagaaaatccgagactatcggtcgcatcgtttctgtgcccagctgactgtgctgtcatgagcccggccaagcccttgtgggaagctgaggacgatgaaacgaaaccagtctacaaagatttcacttatgcagagtattacaagaagttttggagtaggaatctggaccaagaacattgcctcgagaattttctaaacaactaagatacatatatctttggcctttgtgtttgtctagtaggcatatatatacaagtcaataacagcattgatgttcgattctacattcctaccaacattttgttctagacgtatgataatagtaggaatcatgatcatatgtcttgataataactatcatgggcatatttgtttgtgtgttaaataatttcttaccttttatttttctatatgcttcaaaacttttaacttt

SEQ ID NO: 99847 - protein, 341 aa, Arabidopsis thaliana; identical to SEQ ID NO: 42614
  peptide (1)..(341): Ceres Seq. ID no. 13603781
  misc_feature (188)..(288): Pfam Name: 2OG-Fe(II) oxygenase superfamily Pfam Description: 2OG-Fe(II) oxygenase superfamily
  misc_feature (1)..(341): Homolog of NCBI NO: 15238567 NR Description: oxidoreductase, 2OG-Fe(II) oxygenase family
  misc_feature (1)..(341): Homolog of NCBI NO: 21553527 NR Description: flavanone 3-hydroxylase-like protein [Arabidopsis
  misc_feature (4)..(338): Homolog of NCBI NO: 37536444 NR Description: unknown protein [Oryza sativa (japonica
  misc_feature (4)..(338): Homolog of NCBI NO: 38345872 NR Description: OSJNBa0064M23.14 [Oryza sativa (japonica
  misc_feature (2)..(338): Homolog of NCBI NO: 15235124 NR Description: oxidoreductase, 2OG-Fe(II) oxygenase family
  misc_feature (3)..(338): Homolog of NCBI NO: 15235126 NR Description: oxidoreductase, 2OG-Fe(II) oxygenase family
  misc_feature (15)..(341): Homolog of NCBI NO: 38345873 NR Description: OSJNBa0064M23.15 [Oryza sativa (japonica
  misc_feature (149)..(338): Homolog of NCBI NO: 25446682 NR Description: Putative flavanone 3-hydroxylase [Oryza sativa
  misc_feature (14)..(320): Homolog of NCBI NO: 21327037 NR Description: putative flavanone 3-hydroxylase [Saussurea
  misc_feature (15)..(336): Homolog of NCBI NO: 7433240 NR Description: probable flavonol synthase [imported] - thaliana >gi|20197022|gb|AAM14878.1| putative flavonol synthase

SEQ ID NO: 99848 - protein, 262 aa, Arabidopsis thaliana; identical to SEQ ID NO: 42615
  peptide (1)..(262): Ceres Seq. ID no. 13603782
  misc_feature (109)..(209): Pfam Name: 2OG-Fe(II) oxygenase superfamily Pfam Description: 2OG-Fe(II) oxygenase superfamily
  misc_feature (1)..(262): Homolog of NCBI NO: 15238567 NR Description: oxidoreductase, 2OG-Fe(II) oxygenase family
  misc_feature (1)..(262): Homolog of NCBI NO: 21553527 NR Description: flavanone 3-hydroxylase-like protein [Arabidopsis
  misc_feature (1)..(259): Homolog of NCBI NO: 37536444 NR Description: unknown protein [Oryza sativa (japonica
  misc_feature (1)..(259): Homolog of NCBI NO: 38345872 NR Description: OSJNBa0064M23.14 [Oryza sativa (japonica
  misc_feature (1)..(259): Homolog of NCBI NO: 15235124 NR Description: oxidoreductase, 2OG-Fe(II) oxygenase family
  misc_feature (1)..(259): Homolog of NCBI NO: 15235126 NR Description: oxidoreductase, 2OG-Fe(II) oxygenase family
  misc_feature (1)..(262): Homolog of NCBI NO: 38345873 NR Description: OSJNBa0064M23.15 [Oryza sativa (japonica
  misc_feature (70)..(259): Homolog of NCBI NO: 25446682 NR Description: Putative flavanone 3-hydroxylase [Oryza sativa
  misc_feature (1)..(241): Homolog of NCBI NO: 21327037 NR Description: putative flavanone 3-hydroxylase [Saussurea
  misc_feature (1)..(257): Homolog of NCBI NO: 7433240 NR Description: probable flavonol synthase [imported] - thaliana >gi|20197022|gb|AAM14878.1| putative flavonol synthase

SEQ ID NO: 99849 - protein, 252 aa, Arabidopsis thaliana; identical to SEQ ID NO: 42616
  peptide (1)..(252): Ceres Seq. ID no. 13603783
  misc_feature (99)..(199): Pfam Name: 2OG-Fe(II) oxygenase superfamily Pfam Description: 2OG-Fe(II) oxygenase superfamily
  misc_feature (1)..(252): Homolog of NCBI NO: 15238567 NR Description: oxidoreductase, 2OG-Fe(II) oxygenase family
  misc_feature (1)..(252): Homolog of NCBI NO: 21553527 NR Description: flavanone 3-hydroxylase-like protein [Arabidopsis
  misc_feature (1)..(249): Homolog of NCBI NO: 37536444 NR Description: unknown protein [Oryza sativa (japonica
  misc_feature (1)..(249): Homolog of NCBI NO: 38345872 NR Description: OSJNBa0064M23.14 [Oryza sativa (japonica
  misc_feature (1)..(249): Homolog of NCBI NO: 15235124 NR Description: oxidoreductase, 2OG-Fe(II) oxygenase family
  misc_feature (1)..(249): Homolog of NCBI NO: 15235126 NR Description: oxidoreductase, 2OG-Fe(II) oxygenase family
  misc_feature (1)..(252): Homolog of NCBI NO: 38345873 NR Description: OSJNBa0064M23.15 [Oryza sativa (japonica
  misc_feature (60)..(249): Homolog of NCBI NO: 25446682 NR Description: Putative flavanone 3-hydroxylase [Oryza sativa
  misc_feature (1)..(231): Homolog of NCBI NO: 21327037 NR Description: putative flavanone 3-hydroxylase [Saussurea
  misc_feature (1)..(247): Homolog of NCBI NO: 7433240 NR Description: probable flavonol synthase [imported] - thaliana >gi|20197022|gb|AAM14878.1| putative flavonol synthase

SEQ ID NO: 99850 - DNA, 1522 bp, Arabidopsis thaliana
  misc_feature (1)..(1522): Ceres Seq. ID no. 13603787
  misc_feature: MA Experiment ID: 108433 Result: Up-regulated in Transcription
  misc_feature: MA Experiment 108433 PARAMETER Experiment Name: At_rhl_Mutant2_cDNA_P Parameter: Age (day) Value: 7
  misc_feature: MA Experiment 108433 PARAMETER Experiment Name: At_rhl_Mutant2_cDNA_P Parameter: Organism Value: A. thaliana
  misc_feature: MA Experiment 108433 PARAMETER Experiment Name: At_rhl_Mutant2_cDNA_P Parameter: Plant Line Value: rhl Mutant vs. wt landsburg
  misc_feature: MA Experiment 108433 PARAMETER Experiment Name: At_rhl_Mutant2_cDNA_P Parameter: Tissue Value: Roots
  misc_feature: MA Experiment ID: 108434 Result: Down-regulated in Transcription
  misc_feature: MA Experiment 108434 PARAMETER Experiment Name: At_Root_Tips_cDNA_P Parameter: Tissue Value: Root Tips
  misc_feature: MA Experiment ID: 108462 Result: Up-regulated in Transcription
  misc_feature: MA Experiment 108462 PARAMETER Experiment Name: At_Germinating_Seeds_cDNA_P Parameter: Age (day) Value: 2 vs. 0
  misc_feature: MA Experiment 108462 PARAMETER Experiment Name: At_Germinating_Seeds_cDNA_P Parameter: Tissue Value: Germinating Seeds
  misc_feature: MA Experiment ID: 20000070 Result: Down-regulated in Transcription
  misc_feature: MA Experiment 20000070 PARAMETER Experiment Name: At_100uM_ABA_Mutants_cDNA_P Parameter: Plant Line Value: CS24
  misc_feature: MA Experiment 20000070 PARAMETER Experiment Name: At_100uM_ABA_Mutants_cDNA_P Parameter: Timepoint (hr) Value: 6
  misc_feature: MA Experiment 20000070 PARAMETER Experiment Name: At_100uM_ABA_Mutants_cDNA_P Parameter: Tissue Value: Aerial
  misc_feature: MA Experiment 20000070 PARAMETER Experiment Name: At_100uM_ABA_Mutants_cDNA_P Parameter: Treatment Value: 100uM ABA vs. No Treatment
  misc_feature: MA Experiment ID: 20000179 Result: Up-regulated in Transcription
  misc_feature: MA Experiment 20000179 PARAMETER Experiment Name: At_Germinating_Seeds_P Parameter: Age (hr) Value: 6 vs. 0
  misc_feature: MA Experiment 20000179 PARAMETER Experiment Name: At_Germinating_Seeds_P Parameter: Tissue Value: Germinating Seeds
  misc_feature: MA Experiment ID: 20000180 Result: Up-regulated in Transcription
  misc_feature: MA Experiment 20000180 PARAMETER Experiment Name: At_Germinating_Seeds_P Parameter: Age (hr) Value: 24 vs. 0
  misc_feature: MA Experiment 20000180 PARAMETER Experiment Name: At_Germinating_Seeds_P Parameter: Tissue Value: Germinating Seeds
  misc_feature: MA Experiment ID: 20000184 Result: Down-regulated in Transcription
  misc_feature: MA Experiment 20000184 PARAMETER Experiment Name: At_Shoots__P Parameter: Age (day) Value: 7
  misc_feature: MA Experiment 20000184 PARAMETER Experiment Name: At_Shoots__P Parameter: Tissue Value: Shoots vs. Whole Plant
  misc_feature: MA Experiment ID: 20000794 Result: Down-regulated in Transcription
  misc_feature: MA Experiment 20000794 PARAMETER Experiment Name: At_Petals_P Parameter: Age (day) Value: 23-25 days
  misc_feature: MA Experiment 20000794 PARAMETER Experiment Name: At_Petals_P Parameter: Plant Line Value: WS
  misc_feature: MA Experiment 20000794 PARAMETER Experiment Name: At_Petals_P Parameter: Tissue Value: Petals vs. Whole plant
  misc_feature: MA Experiment ID: 20001450 Result: Down-regulated in Transcription
  misc_feature: MA Experiment 20001450 PARAMETER Experiment Name: At_Far-red-induction_P Parameter: Age (day) Value: 7
  misc_feature: MA Experiment 20001450 PARAMETER Experiment Name: At_Far-red-induction_P Parameter: Light Value: Far-red vs. White
  misc_feature: MA Experiment 20001450 PARAMETER Experiment Name: At_Far-red-induction_P Parameter: Organism Value: A. thaliana
  misc_feature: MA Experiment 20001450 PARAMETER Experiment Name: At_Far-red-induction_P Parameter: Plant Line Value: Columbia
  misc_feature: MA Experiment 20001450 PARAMETER Experiment Name: At_Far-red-induction_P Parameter: Timepoint (hr) Value: 8
  misc_feature: MA Experiment 20001450 PARAMETER Experiment Name: At_Far-red-induction_P Parameter: Tissue Value: Whole Plant
  misc_feature: MA Experiment ID: 20001911 Result: Down-regulated in Transcription
  misc_feature: MA Experiment 20001911 PARAMETER Experiment Name: At_Drought_Reproduction_P Parameter: Age (day) Value: 40
  misc_feature: MA Experiment 20001911 PARAMETER Experiment Name: At_Drought_Reproduction_P Parameter: Organism Value: A. thaliana
  misc_feature: MA Experiment 20001911 PARAMETER Experiment Name: At_Drought_Reproduction_P Parameter: Plant Line Value: WS
  misc_feature: MA Experiment 20001911 PARAMETER Experiment Name: At_Drought_Reproduction_P Parameter: Timepoint (day) Value: 10
  misc_feature: MA Experiment 20001911 PARAMETER Experiment Name: At_Drought_Reproduction_P Parameter: Tissue Value: Flowers
  misc_feature: MA Experiment 20001911 PARAMETER Experiment Name: At_Drought_Reproduction_P Parameter: Treatment Value: Drought vs. No Drought
gaagaacctctgtttcttcctcttcttcttcagggtcggtgttaggtgatgaagctccgttttttcgttttcgtcttcttcttcttcaaggtctcttcgttttgtgcttgaagtaagaaaatttgggagaacaatgtcggcttcttcttcctcctttgaacaacctcaagtcataacctgcaacgcggcggtggcatggcgtgctggtgagccattggttatggaggaagttgaagtgagtccacctcaaccacttgagatcagaattaaagttgtatgtacatctctctgtcgtagtgatctctctgcttgggaatctcagtctcttttgcctcgaatatttggccatgaagctgcaggtatagtggagagcattggagaaggtgtaactgagtttgaaaaaggagatcatgtgcttgctgtattcactggagaatgtgggtcatgtcggcattgcatatctgggaaaagtaacatgtgtcaggttcttggaatggagaggaaaggtttgatgcatagtgatcagaagacacgcttctccatcaaaggcaaacctgtttaccattactgcgcggtttcaagtttcagcgagtacactgtggttcactctggctgtgctgtcaaagtcgatccactggcacctctgcataaaatttgtcttctaagctgtggagtagctgcaggtcttggtgcagcatggaatgttgctgatgtacaaaaaggttcaagtgttgtgatatttggtcttggaactgtcggtctttctgttgctcaaggtgccaaacttagaggagcagctcaaatacttggggttgatataaatcccgctaaggctgaacaagcaaagacatttggtgtcacggatttcatcaattcaaatgacctctctgaacctataccccaggtgatcaaaagaatgacaggaggaggtgcagatttctcatttgaatgtgttggtgatacaggaatagctacaactgctttacaatcgtgctcggatggatggggaatgacggttactctaggtgtaccgaaagctaagcctgaagtttcagctcattacggacttttcctttctgggaaatctttaaaagggactctttttggtggttggaagcctaaatctgatcttccttcactcattgacaagtacatgaacaaggagattatgatcgatgaatttattacgcataacctgtcatttgatgaaatcaacaaagcttttgttcttatgagagaaggaaaatgtttgcgttgtgttcttcacatgccaaagtaatgtctcggaaaacacatgtcacagattcaagaaagattaacgagagctctgtatattctacagctgagttgttgtataaaacaaaagtgatggttttctatagagttatgagacttttttttttcttttggtttgttgtgaagtgatcgttcatacattataaagatggattctcacatgatgaatcaaacgagttcctagaaccaaggacattgatcttaaattgataacagtgtttcaagt

SEQ ID NO: 99851 - protein, 381 aa, Arabidopsis thaliana; identical to SEQ ID NO: 43109
  peptide (1)..(381): Ceres Seq. ID no. 13603788
  misc_feature (1)..(381): Homolog of NCBI NO: 18420834 NR Description: alcohol dehydrogenase (ADH), putative thaliana] >gi|19310538|gb|AAL85002.1| AT5g24760/T4C12_30 thaliana] >gi|20334800|gb|AAM16261.1| AT5g24760/T4C12_30
  misc_feature (1)..(381): Homolog of NCBI NO: 21553654 NR Description: alcohol dehydrogenase-like protein [Arabidopsis
  misc_feature (1)..(381): Homolog of NCBI NO: 10129655 NR Description: alcohol dehydrogenase-like protein [Arabidopsis
  misc_feature (12)..(379): Homolog of NCBI NO: 7264740 NR Description: alcohol dehydrogenase 6 [Vitis vinifera]
  misc_feature (12)..(379): Homolog of NCBI NO: 113379 NR Description: ALCOHOL DEHYDROGENASE 2 >gi|169469|gb|AAA33807.1|
  misc_feature (12)..(379): Homolog of NCBI NO: 113386 NR Description: ALCOHOL DEHYDROGENASE 3 >gi|169471|gb|AAA33808.1|
  misc_feature (12)..(379): Homolog of NCBI NO: 9885274 NR Description: alcohol dehydrogenase 2 [Vitis vinifera]
  misc_feature (12)..(379): Homolog of NCBI NO: 1840425 NR Description: alcohol dehydrogenase
  misc_feature (12)..(379): Homolog of NCBI NO: 7427629 NR Description: alcohol dehydrogenase (EC 1.1.1.1) - potato
  misc_feature (12)..(379): Homolog of NCBI NO: 113365 NR Description: Alcohol dehydrogenase 1 >gi|169467|gb|AAA33806.1|

SEQ ID NO: 99852 - protein, 352 aa, Arabidopsis thaliana; identical to SEQ ID NO: 36865
  peptide (1)..(352): Ceres Seq. ID no. 13603789
  misc_feature (1)..(352): Homolog of NCBI NO: 18420834 NR Description: alcohol dehydrogenase (ADH), putative thaliana] >gi|19310538|gb|AAL85002.1| AT5g24760/T4C12_30 thaliana] >gi|20334800|gb|AAM16261.1| AT5g24760/T4C12_30
  misc_feature (1)..(352): Homolog of NCBI NO: 21553654 NR Description: alcohol dehydrogenase-like protein [Arabidopsis
  misc_feature (1)..(352): Homolog of NCBI NO: 10129655 NR Description: alcohol dehydrogenase-like protein [Arabidopsis
  misc_feature (1)..(350): Homolog of NCBI NO: 7264740 NR Description: alcohol dehydrogenase 6 [Vitis vinifera]
  misc_feature (1)..(350): Homolog of NCBI NO: 113379 NR Description: ALCOHOL DEHYDROGENASE 2 >gi|169469|gb|AAA33807.1|
  misc_feature (1)..(350): Homolog of NCBI NO: 113386 NR Description: ALCOHOL DEHYDROGENASE 3 >gi|169471|gb|AAA33808.1|
  misc_feature (1)..(350): Homolog of NCBI NO: 9885274 NR Description: alcohol dehydrogenase 2 [Vitis vinifera]
  misc_feature (1)..(350): Homolog of NCBI NO: 1840425 NR Description: alcohol dehydrogenase
  misc_feature (1)..(350): Homolog of NCBI NO: 7427629 NR Description: alcohol dehydrogenase (EC 1.1.1.1) - potato
  misc_feature (1)..(350): Homolog of NCBI NO: 113365 NR Description: Alcohol dehydrogenase 1 >gi|169467|gb|AAA33806.1|

SEQ ID NO: 99853 - protein, 267 aa, Arabidopsis thaliana; identical to SEQ ID NO: 36866
  peptide (1)..(267): Ceres Seq. ID no. 13603790
  misc_feature (1)..(267): Homolog of NCBI NO: 18420834 NR Description: alcohol dehydrogenase (ADH), putative thaliana] >gi|19310538|gb|AAL85002.1| AT5g24760/T4C12_30 thaliana] >gi|20334800|gb|AAM16261.1| AT5g24760/T4C12_30
  misc_feature (1)..(267): Homolog of NCBI NO: 21553654 NR Description: alcohol dehydrogenase-like protein [Arabidopsis
  misc_feature (1)..(267): Homolog of NCBI NO: 10129655 NR Description: alcohol dehydrogenase-like protein [Arabidopsis
  misc_feature (1)..(265): Homolog of NCBI NO: 7264740 NR Description: alcohol dehydrogenase 6 [Vitis vinifera]
  misc_feature (1)..(265): Homolog of NCBI NO: 113379 NR Description: ALCOHOL DEHYDROGENASE 2 >gi|169469|gb|AAA33807.1|
  misc_feature (1)..(265): Homolog of NCBI NO: 113386 NR Description: ALCOHOL DEHYDROGENASE 3 >gi|169471|gb|AAA33808.1|
  misc_feature (1)..(265): Homolog of NCBI NO: 9885274 NR Description: alcohol dehydrogenase 2 [Vitis vinifera]
  misc_feature (1)..(265): Homolog of NCBI NO: 1840425 NR Description: alcohol dehydrogenase
  misc_feature (1)..(265): Homolog of NCBI NO: 7427629 NR Description: alcohol dehydrogenase (EC 1.1.1.1) - potato
  misc_feature (1)..(265): Homolog of NCBI NO: 113365 NR Description: Alcohol dehydrogenase 1 >gi|169467|gb|AAA33806.1|

SEQ ID NO: 99854 - DNA, 1035 bp, Arabidopsis thaliana
  misc_feature (1)..(1035): Ceres Seq. ID no. 13603791
  misc_feature: MA Experiment ID: 108607 Result: Up-regulated in Transcription
  misc_feature: MA Experiment 108607 PARAMETER Experiment Name: At_100uM_ABA_cDNA_P Parameter: Timepoint (hr) Value: 4
  misc_feature: MA Experiment 108607 PARAMETER Experiment Name: At_100uM_ABA_cDNA_P Parameter: Tissue Value: Aerial
  misc_feature: MA Experiment 108607 PARAMETER Experiment Name: At_100uM_ABA_cDNA_P Parameter: Treatment Value: 100uM ABA vs. No Treatment
  misc_feature: MA Experiment ID: 20000072 Result: Up-regulated in Transcription
  misc_feature: MA Experiment 20000072 PARAMETER Experiment Name: At_100uM_ABA_Mutants_cDNA_P Parameter: Plant Line Value: CS8105
  misc_feature: MA Experiment 20000072 PARAMETER Experiment Name: At_100uM_ABA_Mutants_cDNA_P Parameter: Timepoint (hr) Value: 6
  misc_feature: MA Experiment 20000072 PARAMETER Experiment Name: At_100uM_ABA_Mutants_cDNA_P Parameter: Tissue Value: Aerial
  misc_feature: MA Experiment 20000072 PARAMETER Experiment Name: At_100uM_ABA_Mutants_cDNA_P Parameter: Treatment Value: 100uM ABA vs. No Treatment
  misc_feature: MA Experiment ID: 20000314 Result: Down-regulated in Transcription
  misc_feature: MA Experiment 20000314 PARAMETER Experiment Name: At_14day_Shoots-Roots_Sub_P Parameter: Age (day) Value: 14
  misc_feature: MA Experiment 20000314 PARAMETER Experiment Name: At_14day_Shoots-Roots_Sub_P Parameter: Organism Value: A. thaliana
  misc_feature: MA Experiment 20000314 PARAMETER Experiment Name: At_14day_Shoots-Roots_Sub_P Parameter: Plant Line Value: WS
  misc_feature: MA Experiment 20000314 PARAMETER Experiment Name: At_14day_Shoots-Roots_Sub_P Parameter: Tissue Value: Roots vs. Whole Plant
  misc_feature: MA Experiment ID: 20000315 Result: Down-regulated in Transcription
  misc_feature: MA Experiment 20000315 PARAMETER Experiment Name: At_14day_Shoots-Roots_Sub_P Parameter: Age (day) Value: 14
  misc_feature: MA Experiment 20000315 PARAMETER Experiment Name: At_14day_Shoots-Roots_Sub_P Parameter: Organism Value: A. thaliana
  misc_feature: MA Experiment 20000315 PARAMETER Experiment Name: At_14day_Shoots-Roots_Sub_P Parameter: Plant Line Value: WS
  misc_feature: MA Experiment 20000315 PARAMETER Experiment Name: At_14day_Shoots-Roots_Sub_P Parameter: Tissue Value: Shoots vs. Whole Plant
  misc_feature: MA Experiment ID: 20000348 Result: Up-regulated in Transcription
  misc_feature: MA Experiment 20000348 PARAMETER Experiment Name: At_100uM_ABA_Sub_P Parameter: Age (day) Value: 14
  misc_feature: MA Experiment 20000348 PARAMETER Experiment Name: At_100uM_ABA_Sub_P Parameter: Organism Value: A. thaliana
  misc_feature: MA Experiment 20000348 PARAMETER Experiment Name: At_100uM_ABA_Sub_P Parameter: Plant Line Value: WS
  misc_feature: MA Experiment 20000348 PARAMETER Experiment Name: At_100uM_ABA_Sub_P Parameter: Timepoint (hr) Value: 1
  misc_feature: MA Experiment 20000348 PARAMETER Experiment Name: At_100uM_ABA_Sub_P Parameter: Tissue Value: Aerial
  misc_feature: MA Experiment 20000348 PARAMETER Experiment Name: At_100uM_ABA_Sub_P Parameter: Treatment Value: 100uM ABA vs. No Treatment
  misc_feature: MA Experiment ID: 20000349 Result: Up-regulated in Transcription
  misc_feature: MA Experiment 20000349 PARAMETER Experiment Name: At_100uM_ABA_Sub_P Parameter: Age (day) Value: 14
  misc_feature: MA Experiment 20000349 PARAMETER Experiment Name: At_100uM_ABA_Sub_P Parameter: Organism Value: A. thaliana
  misc_feature: MA Experiment 20000349 PARAMETER Experiment Name: At_100uM_ABA_Sub_P Parameter: Plant Line Value: WS
  misc_feature: MA Experiment 20000349 PARAMETER Experiment Name: At_100uM_ABA_Sub_P Parameter: Timepoint (hr) Value: 6
  misc_feature: MA Experiment 20000349 PARAMETER Experiment Name: At_100uM_ABA_Sub_P Parameter: Tissue Value: Aerial
  misc_feature: MA Experiment 20000349 PARAMETER Experiment Name: At_100uM_ABA_Sub_P Parameter: Treatment Value: 100uM ABA vs. No Treatment
aaacatcacaaactaaacaataaaccataccataaaaaacatgaaaatcctctcactttcacttctcttgctcttggccgctacggtctcggcatccgttccagggctcatcgaactcgtcgattcgaaaaccatctttgggaacgtagccgaactcttagagaaagagaaactttccatcaactacgccaactgcagaagctggcaccttggtgttgagacctctaacatcatagacttcgacacggtgcccgcaaattgcaaagactatgttgaagactacttgatcacttccaaacagtaccaatacgactccaaaaccgtgtgcaaagaggcttatttctatgccaaaggacttgccctaaagaacgacaccgtcaatgtttggatctttgacctagatgataccctcctctctagtattccctactacgcaaaatatggatacggaacagagaagaccgacccgggggcgtactggttgtggttagggaccggagcatcaacccctggactcccggaggccttgcatctttaccaaaacatcatagagctcgggattgaacccatcatactcagtgaccgttggaagttgtggaagaatgtcactctcgacaatctcgaagctgctggcgtgacctactggaagcatctcatattgaagcctaatggttcgaacttgaggcaagtggtgtacaagtcaaaggtgaggaagagtctcgtgaagaaaggatacaacatcgttggcaatatcggagatcaatgggctgatttggttgaggatacccctgggagggtttttaagctcccaaatccactctactacgtaccttcttaagaatctatcttcatcgcattgtccccttgtatacacttcatatctatgtcgtttcgtttatctttgtagccgttttggcaccgctgcataaataaaatgtctatcctatcgtaacttaataagtacaaagacttcgtactaaatgttgtttttctttaaaggggtcattaattaagtggccatgaaatgatattcac

SEQ ID NO: 99855 - protein, 265 aa, Arabidopsis thaliana
  peptide (1)..(265): Ceres Seq. ID no. 13603792
  misc_feature (36)..(264): Pfam Name: HAD superfamily, subfamily IIIB (Acid phosphatase) Pfam Description: HAD superfamily, subfamily IIIB (Acid
  misc_feature (1)..(265): Homolog of NCBI NO: 18420836 NR Description: vegetative storage protein Vsp2 [Arabidopsis >gi|12643238|sp|O82122|VSP2_ARATH Vegetative storage protein 2 >gi|3668175|dbj|BAA33447.1| vegetative storage protein storage
  misc_feature (1)..(265): Homolog of NCBI NO: 2373399 NR Description: vegetative storage protein [Arabidopsis thaliana]
  misc_feature (1)..(265): Homolog of NCBI NO: 21537241 NR Description: vegetative storage protein Vsp2 [Arabidopsis
  misc_feature (1)..(265): Homolog of NCBI NO: 18420838 NR Description: vegetative storage protein Vsp1 [Arabidopsis >gi|3668173|dbj|BAA33446.1| vegetative storage protein thaliana] >gi|10129657|emb|CAC08252.1| vegetative storage protein
  misc_feature (1)..(265): Homolog of NCBI NO: 18206363 NR Description: Vegetative storage protein 1 precursor putative vegetative storage protein [Arabidopsis thaliana]
  misc_feature (1)..(265): Homolog of NCBI NO: 2373397 NR Description: vegetative storage protein [Arabidopsis thaliana]
  misc_feature (3)..(265): Homolog of NCBI NO: 629583 NR Description: vegetative storage protein, 30K - Arabidopsis >gi|512404|emb|CAA56036.1| vegetative storage product
MKILSLSLLLLLAATVSASVPGLIELVDSKTIFGNVAELLEKEKLSINYANCRSWHLGVETSNIIDFDTVPANCKDYVEDYLITSKQYQYDSKTVCKEAYFYAKGLALKNDTVNVWIFDLDDTLLSSIPYYAKYGYGTEKTDPGAYWLWLGTGASTPGLPEALHLYQNIIELGIEPIILSDRWKLWKNVTLDNLEAAGVTYWKHLILKPNGSNLRQVVYKSKVRKSLVKKGYNIVGNIGDQWADLVEDTPGRVFKLPNPLYYVPS

SEQ ID NO: 99856 - DNA, 965 bp, Arabidopsis thaliana
  misc_feature (1)..(965): Ceres Seq. ID no. 13603793
  misc_feature: MA Experiment ID: 108433 Result: Up-regulated in Transcription
  misc_feature: MA Experiment 108433 PARAMETER Experiment Name: At_rhl_Mutant2_cDNA_P Parameter: Age (day) Value: 7
  misc_feature: MA Experiment 108433 PARAMETER Experiment Name: At_rhl_Mutant2_cDNA_P Parameter: Organism Value: A. thaliana
  misc_feature: MA Experiment 108433 PARAMETER Experiment Name: At_rhl_Mutant2_cDNA_P Parameter: Plant Line Value: rhl Mutant vs. wt landsburg
  misc_feature: MA Experiment 108433 PARAMETER Experiment Name: At_rhl_Mutant2_cDNA_P Parameter: Tissue Value: Roots
  misc_feature: MA Experiment ID: 108569 Result: Up-regulated in Transcription
  misc_feature: MA Experiment 108569 PARAMETER Experiment Name: At_0.001%_MeJA__cDNA_P Parameter: Timepoint (hr) Value: 6
  misc_feature: MA Experiment 108569 PARAMETER Experiment Name: At_0.001%_MeJA__cDNA_P Parameter: Tissue Value: Aerial
  misc_feature: MA Experiment 108569 PARAMETER Experiment Name: At_0.001%_MeJA__cDNA_P Parameter: Treatment Value: 0.001% MeJA vs. No Treatment
  misc_feature: MA Experiment ID: 108572 Result: Up-regulated in Transcription
  misc_feature: MA Experiment 108572 PARAMETER Experiment Name: At_Drought_cDNA_P Parameter: Timepoint (hr) Value: 1
  misc_feature: MA Experiment 108572 PARAMETER Experiment Name: At_Drought_cDNA_P Parameter: Tissue Value: Aerial
  misc_feature: MA Experiment 108572 PARAMETER Experiment Name: At_Drought_cDNA_P Parameter: Treatment Value: Drought vs. No Drought
  misc_feature: MA Experiment ID: 108573 Result: Up-regulated in Transcription
  misc_feature: MA Experiment 108573 PARAMETER Experiment Name: At_Drought_cDNA_P Parameter: Timepoint (hr) Value: 6
  misc_feature: MA Experiment 108573 PARAMETER Experiment Name: At_Drought_cDNA_P Parameter: Tissue Value: Aerial
  misc_feature: MA Experiment 108573 PARAMETER Experiment Name: At_Drought_cDNA_P Parameter: Treatment Value: Drought vs. No Drought
  misc_feature: MA Experiment ID: 108595 Result: Up-regulated in Transcription
  misc_feature: MA Experiment 108595 PARAMETER Experiment Name: At_Ler-pi_Ovule_cDNA_P Parameter: Plant Line Value: null
  misc_feature: MA Experiment ID: 20000069 Result: Up-regulated in Transcription
  misc_feature: MA Experiment 20000069 PARAMETER Experiment Name: At_100uM_ABA_Mutants_cDNA_P Parameter: Plant Line Value: CS23
  misc_feature: MA Experiment 20000069 PARAMETER Experiment Name: At_100uM_ABA_Mutants_cDNA_P Parameter: Timepoint (hr) Value: 6
  misc_feature: MA Experiment 20000069 PARAMETER Experiment Name: At_100uM_ABA_Mutants_cDNA_P Parameter: Tissue Value: Aerial
  misc_feature: MA Experiment 20000069 PARAMETER Experiment Name: At_100uM_ABA_Mutants_cDNA_P Parameter: Treatment Value: 100uM ABA vs. No Treatment
  misc_feature: MA Experiment ID: 20000070 Result: Up-regulated in Transcription
  misc_feature: MA Experiment 20000070 PARAMETER Experiment Name: At_100uM_ABA_Mutants_cDNA_P Parameter: Plant Line Value: CS24
  misc_feature: MA Experiment 20000070 PARAMETER Experiment Name: At_100uM_ABA_Mutants_cDNA_P Parameter: Timepoint (hr) Value: 6
  misc_feature: MA Experiment 20000070 PARAMETER Experiment Name: At_100uM_ABA_Mutants_cDNA_P Parameter: Tissue Value: Aerial
  misc_feature: MA Experiment 20000070 PARAMETER Experiment Name: At_100uM_ABA_Mutants_cDNA_P Parameter: Treatment Value: 100uM ABA vs. No Treatment
  misc_feature: MA Experiment ID: 20000071 Result: Up-regulated in Transcription
  misc_feature: MA Experiment 20000071 PARAMETER Experiment Name: At_100uM_ABA_Mutants_cDNA_P Parameter: Plant Line Value: CS8104
  misc_feature: MA Experiment 20000071 PARAMETER Experiment Name: At_100uM_ABA_Mutants_cDNA_P Parameter: Timepoint (hr) Value: 6
  misc_feature: MA Experiment 20000071 PARAMETER Experiment Name: At_100uM_ABA_Mutants_cDNA_P Parameter: Tissue Value: Aerial
  misc_feature: MA Experiment 20000071 PARAMETER Experiment Name: At_100uM_ABA_Mutants_cDNA_P Parameter: Treatment Value: 100uM ABA vs. No Treatment
  misc_feature: MA Experiment ID: 20000088 Result: Up-regulated in Transcription
  misc_feature: MA Experiment 20000088 PARAMETER Experiment Name: At_100uM_ABA_Mutants_cDNA_P Parameter: Plant Line Value: Landsberg
  misc_feature: MA Experiment 20000088 PARAMETER Experiment Name: At_100uM_ABA_Mutants_cDNA_P Parameter: Timepoint (hr) Value: 6
  misc_feature: MA Experiment 20000088 PARAMETER Experiment Name: At_100uM_ABA_Mutants_cDNA_P Parameter: Tissue Value: Aerial
  misc_feature: MA Experiment 20000088 PARAMETER Experiment Name: At_100uM_ABA_Mutants_cDNA_P Parameter: Treatment Value: 100uM ABA vs. No Treatment
  misc_feature: MA Experiment ID: 20000314 Result: Down-regulated in Transcription
  misc_feature: MA Experiment 20000314 PARAMETER Experiment Name: At_14day_Shoots-Roots_Sub_P Parameter: Age (day) Value: 14
  misc_feature: MA Experiment 20000314 PARAMETER Experiment Name: At_14day_Shoots-Roots_Sub_P Parameter: Organism Value: A. thaliana
  misc_feature: MA Experiment 20000314 PARAMETER Experiment Name: At_14day_Shoots-Roots_Sub_P Parameter: Plant Line Value: WS
  misc_feature: MA Experiment 20000314 PARAMETER Experiment Name: At_14day_Shoots-Roots_Sub_P Parameter: Tissue Value: Roots vs. Whole Plant
  misc_feature: MA Experiment ID: 20000315 Result: Down-regulated in Transcription
  misc_feature: MA Experiment 20000315 PARAMETER Experiment Name: At_14day_Shoots-Roots_Sub_P Parameter: Age (day) Value: 14
  misc_feature: MA Experiment 20000315 PARAMETER Experiment Name: At_14day_Shoots-Roots_Sub_P Parameter: Organism Value: A. thaliana
  misc_feature: MA Experiment 20000315 PARAMETER Experiment Name: At_14day_Shoots-Roots_Sub_P Parameter: Plant Line Value: WS
  misc_feature: MA Experiment 20000315 PARAMETER Experiment Name: At_14day_Shoots-Roots_Sub_P Parameter: Tissue Value: Shoots vs. Whole Plant
  misc_feature: MA Experiment ID: 20000348 Result: Up-regulated in Transcription
  misc_feature: MA Experiment 20000348 PARAMETER Experiment Name: At_100uM_ABA_Sub_P Parameter: Age (day) Value: 14
  misc_feature: MA Experiment 20000348 PARAMETER Experiment Name: At_100uM_ABA_Sub_P Parameter: Organism Value: A. thaliana
  misc_feature: MA Experiment 20000348 PARAMETER Experiment Name: At_100uM_ABA_Sub_P Parameter: Plant Line Value: WS
  misc_feature: MA Experiment 20000348 PARAMETER Experiment Name: At_100uM_ABA_Sub_P Parameter: Timepoint (hr) Value: 1
  misc_feature: MA Experiment 20000348 PARAMETER Experiment Name: At_100uM_ABA_Sub_P Parameter: Tissue Value: Aerial
  misc_feature: MA Experiment 20000348 PARAMETER Experiment Name: At_100uM_ABA_Sub_P Parameter: Treatment Value: 100uM ABA vs. No Treatment
  misc_feature: MA Experiment ID: 20000349 Result: Up-regulated in Transcription
  misc_feature: MA Experiment 20000349 PARAMETER Experiment Name: At_100uM_ABA_Sub_P Parameter: Age (day) Value: 14
  misc_feature: MA Experiment 20000349 PARAMETER Experiment Name: At_100uM_ABA_Sub_P Parameter: Organism Value: A. thaliana
  misc_feature: MA Experiment 20000349 PARAMETER Experiment Name: At_100uM_ABA_Sub_P Parameter: Plant Line Value: WS
  misc_feature: MA Experiment 20000349 PARAMETER Experiment Name: At_100uM_ABA_Sub_P Parameter: Timepoint (hr) Value: 6
  misc_feature: MA Experiment 20000349 PARAMETER Experiment Name: At_100uM_ABA_Sub_P Parameter: Tissue Value: Aerial
  misc_feature: MA Experiment 20000349 PARAMETER Experiment Name: At_100uM_ABA_Sub_P Parameter: Treatment Value: 100uM ABA vs. No Treatment
aaacaccataaactaaacaataaaccatacaaaaaaatatgaaaatcctctcactttcactactcttgctcttggccgctacggtctcccacgtccagtcttcggcatccgttccagggctcatcgaactcctcgaatcgaacaccatctttgggaacgaagccgaactcttagagaaagagggactgtccatcaactaccccaactgcagaagctggcaccttggtgttgagacctctaacatcataaacttcgacacggtgcccgcaaattgcaaagcctatgttgaagactacttgatcacttccaaacagtaccaatacgactccaaaactgtaaacaaagaggcatatttttacgccaaaggacttgccctaaagaacgataccgtcaatgtttggatctttgacctagacgacactctcctctctagtattccctactacgctaaatatggatatgggaccgagaacacagccccgggggcgtactggtcgtggttagagtccggagaatcaactccaggactcccggagaccttgcatctatacgaaaacctcttggaactcgggattgaacccatcataatctctgacagatggaaaaaattgtcagaagtcactgtcgagaatctcaaggctgttggtgtaacaaaatggaagcatctcatactcaagccaaacggatcgaagttgacgcaagtggtgtacaagtcaaaggttaggaatagccttgtgaagaaagggtacaacatcgttgggaatattggagaccaatgggctgatttggttgaggatactcctggaagggtttttaagctcccaaatccactctactacgtaccttcttaattaagcatctatcttcatggcattgtccccttgtatccatttcatatctatgtcgtttcgtttatctttgtagccgttttggcaccactgcttaaataaaatgccaatcctatc

SEQ ID NO: 99857 - protein, 270 aa, Arabidopsis thaliana; identical to SEQ ID NO: 86362
  peptide (1)..(270): Ceres Seq. ID no. 13603794
  misc_feature (41)..(269): Pfam Name: HAD superfamily, subfamily IIIB (Acid phosphatase) Pfam Description: HAD superfamily, subfamily IIIB (Acid
  misc_feature (1)..(270): Homolog of NCBI NO: 18420838 NR Description: vegetative storage protein Vsp1 [Arabidopsis >gi|3668173|dbj|BAA33446.1| vegetative storage protein thaliana] >gi|10129657|emb|CAC08252.1| vegetative storage protein
  misc_feature (1)..(270): Homolog of NCBI NO: 18206363 NR Description: Vegetative storage protein 1 precursor putative vegetative storage protein [Arabidopsis thaliana]
  misc_feature (1)..(270): Homolog of NCBI NO: 2373397 NR Description: vegetative storage protein [Arabidopsis thaliana]
  misc_feature (3)..(270): Homolog of NCBI NO: 629583 NR Description: vegetative storage protein, 30K - Arabidopsis >gi|512404|emb|CAA56036.1| vegetative storage product
  misc_feature (1)..(270): Homolog of NCBI NO: 18420836 NR Description: vegetative storage protein Vsp2 [Arabidopsis >gi|12643238|sp|O82122|VSP2_ARATH Vegetative storage protein 2 >gi|3668175|dbj|BAA33447.1| vegetative storage protein storage
  misc_feature (1)..(270): Homolog of NCBI NO: 21537241 NR Description: vegetative storage protein Vsp2 [Arabidopsis
  misc_feature (1)..(270): Homolog of NCBI NO: 2373399 NR Description: vegetative storage protein [Arabidopsis thaliana]

SEQ ID NO: 99858 - DNA, 1633 bp, Arabidopsis thaliana
  misc_feature (1)..(1633): Ceres Seq. ID no. 13603802
  misc_feature: MA Experiment ID: 108435 Result: Down-regulated in Transcription
  misc_feature: MA Experiment 108435 PARAMETER Experiment Name: At_stm_Mutants_cDNA_P Parameter: Plant Line Value: wt Landsburg vs stm
  misc_feature: MA Experiment 108435 PARAMETER Experiment Name: At_stm_Mutants_cDNA_P Parameter: Tissue Value: Shoot Apical Meristem Region
  misc_feature: MA Experiment ID: 108461 Result: Up-regulated in Transcription
  misc_feature: MA Experiment 108461 PARAMETER Experiment Name: At_Germinating_Seeds_cDNA_P Parameter: Age (day) Value: 1 vs. 0
  misc_feature: MA Experiment 108461 PARAMETER Experiment Name: At_Germinating_Seeds_cDNA_P Parameter: Tissue Value: Germinating Seeds
  misc_feature: MA Experiment ID: 108462 Result: Up-regulated in Transcription
  misc_feature: MA Experiment 108462 PARAMETER Experiment Name: At_Germinating_Seeds_cDNA_P Parameter: Age (day) Value: 2 vs. 0
  misc_feature: MA Experiment 108462 PARAMETER Experiment Name: At_Germinating_Seeds_cDNA_P Parameter: Tissue Value: Germinating Seeds
  misc_feature: MA Experiment ID: 108463 Result: Up-regulated in Transcription
  misc_feature: MA Experiment 108463 PARAMETER Experiment Name: At_Germinating_Seeds_cDNA_P Parameter: Age (day) Value: 3 vs. 0
  misc_feature: MA Experiment 108463 PARAMETER Experiment Name: At_Germinating_Seeds_cDNA_P Parameter: Tissue Value: Germinating Seeds
  misc_feature: MA Experiment ID: 108464 Result: Up-regulated in Transcription
  misc_feature: MA Experiment 108464 PARAMETER Experiment Name: At_Germinating_Seeds_cDNA_P Parameter: Age (day) Value: 4 vs. 0
  misc_feature: MA Experiment 108464 PARAMETER Experiment Name: At_Germinating_Seeds_cDNA_P Parameter: Tissue Value: Germinating Seeds
  misc_feature: MA Experiment ID: 108569 Result: Up-regulated in Transcription
  misc_feature: MA Experiment 108569 PARAMETER Experiment Name: At_0.001%_MeJA__cDNA_P Parameter: Timepoint (hr) Value: 6
  misc_feature: MA Experiment 108569 PARAMETER Experiment Name: At_0.001%_MeJA__cDNA_P Parameter: Tissue Value: Aerial
  misc_feature: MA Experiment 108569 PARAMETER Experiment Name: At_0.001%_MeJA__cDNA_P Parameter: Treatment Value: 0.001% MeJA vs. No Treatment
  misc_feature: MA Experiment ID: 108573 Result: Up-regulated in Transcription
  misc_feature: MA Experiment 108573 PARAMETER Experiment Name: At_Drought_cDNA_P Parameter: Timepoint (hr) Value: 6
  misc_feature: MA Experiment 108573 PARAMETER Experiment Name: At_Drought_cDNA_P Parameter: Tissue Value: Aerial
  misc_feature: MA Experiment 108573 PARAMETER Experiment Name: At_Drought_cDNA_P Parameter: Treatment Value: Drought vs. No Drought
  misc_feature: MA Experiment ID: 108595 Result: Down-regulated in Transcription
  misc_feature: MA Experiment 108595 PARAMETER Experiment Name: At_Ler-pi_Ovule_cDNA_P Parameter: Plant Line Value: null
  misc_feature: MA Experiment ID: 20000087 Result: Down-regulated in Transcription
  misc_feature: MA Experiment 20000087 PARAMETER Experiment Name: At_100uM_ABA_Mutants_cDNA_P Parameter: Plant Line Value: WS
  misc_feature: MA Experiment 20000087 PARAMETER Experiment Name: At_100uM_ABA_Mutants_cDNA_P Parameter: Timepoint (hr) Value: 6
  misc_feature: MA Experiment 20000087 PARAMETER Experiment Name: At_100uM_ABA_Mutants_cDNA_P Parameter: Tissue Value: Aerial
  misc_feature: MA Experiment 20000087 PARAMETER Experiment Name: At_100uM_ABA_Mutants_cDNA_P Parameter: Treatment Value: 100uM ABA vs. No Treatment
  misc_feature: MA Experiment ID: 20000090 Result: Down-regulated in Transcription
  misc_feature: MA Experiment ID: 20000111 Result: Down-regulated in Transcription
  misc_feature: MA Experiment 20000111 PARAMETER Experiment Name: At_42deg_Heat_cDNA_P Parameter: Temperature (deg C) Value: 42 vs. 22
  misc_feature: MA Experiment 20000111 PARAMETER Experiment Name: At_42deg_Heat_cDNA_P Parameter: Timepoint (hr) Value: 6
  misc_feature: MA Experiment 20000111 PARAMETER Experiment Name: At_42deg_Heat_cDNA_P Parameter: Tissue Value: Aerial
  misc_feature: MA Experiment ID: 20000117 Result: Down-regulated in Transcription
  misc_feature: MA Experiment 20000117 PARAMETER Experiment Name: At_100uM_ABA_Mutants_cDNA_P Parameter: Plant Line Value: Columbia
  misc_feature: MA Experiment 20000117 PARAMETER Experiment Name: At_100uM_ABA_Mutants_cDNA_P Parameter: Timepoint (hr) Value: 6
  misc_feature: MA Experiment 20000117 PARAMETER Experiment Name: At_100uM_ABA_Mutants_cDNA_P Parameter: Tissue Value: Aerial
  misc_feature: MA Experiment 20000117 PARAMETER Experiment Name: At_100uM_ABA_Mutants_cDNA_P Parameter: Treatment Value: 100uM ABA vs. No Treatment
  misc_feature: MA Experiment ID: 20000224 Result: Down-regulated in Transcription
  misc_feature: MA Experiment ID: 20000439 Result: Down-regulated in Transcription
  misc_feature: MA Experiment 20000439 PARAMETER Experiment Name: At_Roots__P Parameter: Age (day) Value: 14 vs. 21
  misc_feature: MA Experiment 20000439 PARAMETER Experiment Name: At_Roots__P Parameter: Organism Value: A. thaliana
  misc_feature: MA Experiment 20000439 PARAMETER Experiment Name: At_Roots__P Parameter: Tissue Value: Roots vs. Whole Plant
  misc_feature: MA Experiment ID: 20000495 Result: Down-regulated in Transcription
  misc_feature: MA Experiment 20000495 PARAMETER Experiment Name: At_Guard_Cells_P Parameter: Harvest Date Value: 8/2/2002
  misc_feature: MA Experiment 20000495 PARAMETER Experiment Name: At_Guard_Cells_P Parameter: Organism Value: A. thaliana
  misc_feature: MA Experiment 20000495 PARAMETER Experiment Name: At_Guard_Cells_P Parameter: Tissue Value: Guard Cells vs. Leaves
acccatcttatcattattttataaagatcctatgtctatccgtaaatggactaatctttagacacacagagaatataatgagtttgaaaataaagtttctgcttctgcttgtcttgtatcatcatgttgattctgcctctatcgtcaagtttcttcctggttttgaaggccctcttcctttcgaacttgaaaccgggtacattggtattggtgaggacgagaatgtgcaatttttctactatttcatcaaatctgaaaacaatccaaaagaagatcctcttcttatatggttaaatggaggacctggatgttcttgtcttggtggtattatttttgagaacggaccggtgggtttgaagtttgaggtgttcaacggaagtgctccttctttgttctctactacatattcatggacaaagatggcaaacattatattcttggatcagccagtaggatctggcttctcctactcaaaaactccaattgataaaactggtgacataagtgaagtaaagaggacccatgagtttcttcaaaagtggctaagcaggcatccacaatatttctccaaccctttatatgtagttggagattcttattccggtatgattgtcccggccctcgttcaagaaatctcacaaggaaattatatatgttgcgaacctcctataaatctacagggttatatgcttggaaaccctgtaacatatatggactttgaacaaaacttccgcattccatatgcttatggtatgggattaatctccgacgaaatctatgagccaatgaagagaatctgcaacggaaattattacaatgtggatccatctaacacacaatgtttgaaacttactgaagaatatcataagtgcactgccaaaataaatatccatcacatattaacaccagattgcgatgtaaccaatgtaacatctcctgattgttattattatccatatcatctcattgaatgttgggctaacgacgagagcgttcgcgaagctcttcatattgaaaagggtagtaaaggaaaatgggcgcgatgtaatcggactattccatacaatcacgacattgtaagcagcataccatatcacatgaataacagcatcagtggataccgatctcttatttacagtggtgatcacgacatcgcggtcccttttcttgcaactcaagcctggataagatctctcaattactcccccattcataactggaggccatggatgataaacaatcaaatcgctggatacacgagagcttattccaataagatgacatttgctactatcaaaggaggtggacacacggcagagtatagaccaaacgagacctttatcatgttccaaaggtggatcagtggccaacccctgtaacaaaaggcttatgaccttcacctataattatctaccaactaatatccacgttaagcgcagttgtttgtgttgaaatgtttttgttgtttgctttgttgcattcttttgtgctttatgttacaattttatgtgttttatgtactacagttcattattgtgcgttgtgcaattccttttacatttaactagggactaacccgggctagccccggtatatttcctaactatacgtgcaagaaaatgatgttctattt

SEQ ID NO: 99859 - protein, 458 aa, Arabidopsis thaliana
  peptide (1)..(458): Ceres Seq. ID no. 13603803
  misc_feature (52)..(455): Pfam Name: Serine carboxypeptidase Pfam Description: Serine carboxypeptidase
  misc_feature (26)..(439): Homolog of NCBI NO: 30681910 NR Description: serine carboxypeptidase -related [Arabidopsis
  misc_feature (26)..(458): Homolog of NCBI NO: 30681900 NR Description: serine carboxypeptidase -related [Arabidopsis
  misc_feature (26)..(458): Homolog of NCBI NO: 18400137 NR Description: serine carboxypeptidase -related [Arabidopsis >gi|20197128|gb|AAC17816.2| putative serine carboxypeptidase I thaliana] >gi|20197274|gb|AAM15006.1| putative serine
  misc_feature (26)..(432): Homolog of NCBI NO: 30681915 NR Description: serine carboxypeptidase -related [Arabidopsis
  misc_feature (26)..(458): Homolog of NCBI NO: 15227773 NR Description: serine carboxypeptidase -related [Arabidopsis
  misc_feature (27)..(458): Homolog of NCBI NO: 15227772 NR Description: serine carboxypeptidase -related [Arabidopsis
  misc_feature (29)..(458): Homolog of NCBI NO: 15227765 NR Description: serine carboxypeptidase -related [Arabidopsis
  misc_feature (26)..(458): Homolog of NCBI NO: 15227769 NR Description: serine carboxypeptidase -related [Arabidopsis
  misc_feature (26)..(458): Homolog of NCBI NO: 25289782 NR Description: probable serine carboxypeptidase I [imported] - thaliana >gi|3169172|gb|AAC17815.1| putative serine I [Arabidopsis thaliana] >gi|20197276|gb|AAM15008.1| putative
  misc_feature (34)..(458): Homolog of NCBI NO: 15228300 NR Description: serine carboxypeptidase -related [Arabidopsis >gi|8567775|gb|AAF76347.1| glucose acyltransferase, putative
PSYHYFIKILCLSVNGLIFRHTENIMSLKIKFLLLLVLYHHVDSASIVKFLPGFEGPLPFELETGYIGIGEDENVQFFYYFIKSENNPKEDPLLIWLNGGPGCSCLGGIIFENGPVGLKFEVFNGSAPSLFSTTYSWTKMANIIFLDQPVGSGFSYSKTPIDKTGDISEVKRTHEFLQKWLSRHPQYFSNPLYVVGDSYSGMIVPALVQEISQGNYICCEPPINLQGYMLGNPVTYMDFEQNFRIPYAYGMGLISDEIYEPMKRICNGNYYNVDPSNTQCLKLTEEYHKCTAKINIHHILTPDCDVTNVTSPDCYYYPYHLIECWANDESVREALHIEKGSKGKWARCNRTIPYNHDIVSSIPYHMNNSISGYRSLIYSGDHDIAVPFLATQAWIRSLNYSPIHNWRPWMINNQIAGYTRAYSNKMTFATIKGGGHTAEYRPNETFIMFQRWISGQPL

SEQ ID NO: 99860 - protein, 433 aa, Arabidopsis thaliana
  peptide (1)..(433): Ceres Seq. ID no. 13603804
  misc_feature (27)..(430): Pfam Name: Serine carboxypeptidase Pfam Description: Serine carboxypeptidase
  misc_feature (1)..(414): Homolog of NCBI NO: 30681910 NR Description: serine carboxypeptidase -related [Arabidopsis
  misc_feature (1)..(433): Homolog of NCBI NO: 30681900 NR Description: serine carboxypeptidase -related [Arabidopsis
  misc_feature (1)..(433): Homolog of NCBI NO: 18400137 NR Description: serine carboxypeptidase -related [Arabidopsis >gi|20197128|gb|AAC17816.2| putative serine carboxypeptidase I thaliana] >gi|20197274|gb|AAM15006.1| putative serine
  misc_feature (1)..(407): Homolog of NCBI NO: 30681915 NR Description: serine carboxypeptidase -related [Arabidopsis
  misc_feature (1)..(433): Homolog of NCBI NO: 15227773 NR Description: serine carboxypeptidase -related [Arabidopsis
  misc_feature (2)..(433): Homolog of NCBI NO: 15227772 NR Description: serine carboxypeptidase -related [Arabidopsis
  misc_feature (4)..(433): Homolog of NCBI NO: 15227765 NR Description: serine carboxypeptidase -related [Arabidopsis
  misc_feature (1)..(433): Homolog of NCBI NO: 15227769 NR Description: serine carboxypeptidase -related [Arabidopsis
  misc_feature (1)..(433): Homolog of NCBI NO: 25289782 NR Description: probable serine carboxypeptidase I [imported] - thaliana >gi|3169172|gb|AAC17815.1| putative serine I [Arabidopsis thaliana] >gi|20197276|gb|AAM15008.1| putative
  misc_feature (9)..(433): Homolog of NCBI NO: 15228300 NR Description: serine carboxypeptidase -related [Arabidopsis >gi|8567775|gb|AAF76347.1| glucose acyltransferase, putative
MSLKIKFLLLLVLYHHVDSASIVKFLPGFEGPLPFELETGYIGIGEDENVQFFYYFIKSENNPKEDPLLIWLNGGPGCSCLGGIIFENGPVGLKFEVFNGSAPSLFSTTYSWTKMANIIFLDQPVGSGFSYSKTPIDKTGDISEVKRTHEFLQKWLSRHPQYFSNPLYVVGDSYSGMIVPALVQEISQGNYICCEPPINLQGYMLGNPVTYMDFEQNFRIPYAYGMGLISDEIYEPMKRICNGNYYNVDPSNTQCLKLTEEYHKCTAKINIHHILTPDCDVTNVTSPDCYYYPYHLIECWANDESVREALHIEKGSKGKWARCNRTIPYNHDIVSSIPYHMNNSISGYRSLIYSGDHDIAVPFLATQAWIRSLNYSPIHNWRPWMINNQIAGYTRAYSNKMTFATIKGGGHTAEYRPNETFIMFQRWISGQPL

SEQ ID NO: 99861 - protein, 319 aa, Arabidopsis thaliana
  peptide (1)..(319): Ceres Seq. ID no. 13603805
  misc_feature (1)..(316): Pfam Name: Serine carboxypeptidase Pfam Description: Serine carboxypeptidase
  misc_feature (1)..(300): Homolog of NCBI NO: 30681910 NR Description: serine carboxypeptidase -related [Arabidopsis
  misc_feature (1)..(319): Homolog of NCBI NO: 30681900 NR Description: serine carboxypeptidase -related [Arabidopsis
  misc_feature (1)..(319): Homolog of NCBI NO: 18400137 NR Description: serine carboxypeptidase -related [Arabidopsis >gi|20197128|gb|AAC17816.2| putative serine carboxypeptidase I thaliana] >gi|20197274|gb|AAM15006.1| putative serine
  misc_feature (1)..(293): Homolog of NCBI NO: 30681915 NR Description: serine carboxypeptidase -related [Arabidopsis
  misc_feature (1)..(319): Homolog of NCBI NO: 15227773 NR Description: serine carboxypeptidase -related [Arabidopsis
  misc_feature (1)..(319): Homolog of NCBI NO: 15227772 NR Description: serine carboxypeptidase -related [Arabidopsis
  misc_feature (1)..(319): Homolog of NCBI NO: 15227765 NR Description: serine carboxypeptidase -related [Arabidopsis
  misc_feature (1)..(319): Homolog of NCBI NO: 15227769 NR Description: serine carboxypeptidase -related [Arabidopsis
  misc_feature (1)..(319): Homolog of NCBI NO: 25289782 NR Description: probable serine carboxypeptidase I [imported] - thaliana >gi|3169172|gb|AAC17815.1| putative serine I [Arabidopsis thaliana] >gi|20197276|gb|AAM15008.1| putative
  misc_feature (1)..(319): Homolog of NCBI NO: 15228300 NR Description: serine carboxypeptidase -related [Arabidopsis >gi|8567775|gb|AAF76347.1| glucose acyltransferase, putative
MANIIFLDQPVGSGFSYSKTPIDKTGDISEVKRTHEFLQKWLSRHPQYFSNPLYVVGDSYSGMIVPALVQEISQGNYICCEPPINLQGYMLGNPVTYMDFEQNFRIPYAYGMGLISDEIYEPMKRICNGNYYNVDPSNTQCLKLTEEYHKCTAKINIHHILTPDCDVTNVTSPDCYYYPYHLIECWANDESVREALHIEKGSKGKWARCNRTIPYNHDIVSSIPYHMNNSISGYRSLIYSGDHDIAVPFLATQAWIRSLNYSPIHNWRPWMINNQIAGYTRAYSNKMTFATIKGGGHTAEYRPNETFIMFQRWISGQPL

SEQ ID NO: 99862 - DNA, 1505 bp, Arabidopsis thaliana
  misc_feature (1)..(1505): Ceres Seq. ID no. 13603806
  misc_feature: MA Experiment ID: 108461 Result: Up-regulated in Transcription
  misc_feature: MA Experiment 108461 PARAMETER Experiment Name: At_Germinating_Seeds_cDNA_P Parameter: Age (day) Value: 1 vs. 0
  misc_feature: MA Experiment 108461 PARAMETER Experiment Name: At_Germinating_Seeds_cDNA_P Parameter: Tissue Value: Germinating Seeds
  misc_feature: MA Experiment ID: 108462 Result: Up-regulated in Transcription
  misc_feature: MA Experiment 108462 PARAMETER Experiment Name: At_Germinating_Seeds_cDNA_P Parameter: Age (day) Value: 2 vs. 0
  misc_feature: MA Experiment 108462 PARAMETER Experiment Name: At_Germinating_Seeds_cDNA_P Parameter: Tissue Value: Germinating Seeds
  misc_feature: MA Experiment ID: 108463 Result: Up-regulated in Transcription
  misc_feature: MA Experiment 108463 PARAMETER Experiment Name: At_Germinating_Seeds_cDNA_P Parameter: Age (day) Value: 3 vs. 0
  misc_feature: MA Experiment 108463 PARAMETER Experiment Name: At_Germinating_Seeds_cDNA_P Parameter: Tissue Value: Germinating Seeds
  misc_feature: MA Experiment ID: 108464 Result: Up-regulated in Transcription
  misc_feature: MA Experiment 108464 PARAMETER Experiment Name: At_Germinating_Seeds_cDNA_P Parameter: Age (day) Value: 4 vs. 0
  misc_feature: MA Experiment 108464 PARAMETER Experiment Name: At_Germinating_Seeds_cDNA_P Parameter: Tissue Value: Germinating Seeds
  misc_feature: MA Experiment ID: 108489 Result: Down-regulated in Transcription
  misc_feature: MA Experiment ID: 108501 Result: Up-regulated in Transcription
  misc_feature: MA Experiment 108501 PARAMETER Experiment Name: At_ap2_floral_buds_cDNA_P Parameter: Plant Line Value: ap2 (Ler.)
  misc_feature: MA Experiment 108501 PARAMETER Experiment Name: At_ap2_floral_buds_cDNA_P Parameter: Tissue Value: Closed Flower
  misc_feature: MA Experiment ID: 108569 Result: Up-regulated in Transcription
  misc_feature: MA Experiment 108569 PARAMETER Experiment Name: At_0.001%_MeJA__cDNA_P Parameter: Timepoint (hr) Value: 6
  misc_feature: MA Experiment 108569 PARAMETER Experiment Name: At_0.001%_MeJA__cDNA_P Parameter: Tissue Value: Aerial
  misc_feature: MA Experiment 108569 PARAMETER Experiment Name: At_0.001%_MeJA__cDNA_P Parameter: Treatment Value: 0.001% MeJA vs. No Treatment
  misc_feature: MA Experiment ID: 108572 Result: Up-regulated in Transcription
  misc_feature: MA Experiment 108572 PARAMETER Experiment Name: At_Drought_cDNA_P Parameter: Timepoint (hr) Value: 1
  misc_feature: MA Experiment 108572 PARAMETER Experiment Name: At_Drought_cDNA_P Parameter: Tissue Value: Aerial
  misc_feature: MA Experiment 108572 PARAMETER Experiment Name: At_Drought_cDNA_P Parameter: Treatment Value: Drought vs. No Drought
  misc_feature: MA Experiment ID: 108594 Result: Down-regulated in Transcription
  misc_feature: MA Experiment 108594 PARAMETER Experiment Name: At_Ler-rhl_Root_cDNA_P Parameter: Plant Line Value: null
  misc_feature: MA Experiment ID: 108595 Result: Down-regulated in Transcription
  misc_feature: MA Experiment 108595 PARAMETER Experiment Name: At_Ler-pi_Ovule_cDNA_P Parameter: Plant Line Value: null
  misc_feature: MA Experiment ID: 20000069 Result: Down-regulated in Transcription
  misc_feature: MA Experiment 20000069 PARAMETER Experiment Name: At_100uM_ABA_Mutants_cDNA_P Parameter: Plant Line Value: CS23
  misc_feature: MA Experiment 20000069 PARAMETER Experiment Name: At_100uM_ABA_Mutants_cDNA_P Parameter: Timepoint (hr) Value: 6
  misc_feature: MA Experiment 20000069 PARAMETER Experiment Name: At_100uM_ABA_Mutants_cDNA_P Parameter: Tissue Value: Aerial
  misc_feature: MA Experiment 20000069 PARAMETER Experiment Name: At_100uM_ABA_Mutants_cDNA_P Parameter: Treatment Value: 100uM ABA vs. No Treatment
  misc_feature: MA Experiment ID: 20000070 Result: Down-regulated in Transcription
  misc_feature: MA Experiment 20000070 PARAMETER Experiment Name: At_100uM_ABA_Mutants_cDNA_P Parameter: Plant Line Value: CS24
  misc_feature: MA Experiment 20000070 PARAMETER Experiment Name: At_100uM_ABA_Mutants_cDNA_P Parameter: Timepoint (hr) Value: 6
  misc_feature: MA Experiment 20000070 PARAMETER Experiment Name: At_100uM_ABA_Mutants_cDNA_P Parameter: Tissue Value: Aerial
  misc_feature: MA Experiment 20000070 PARAMETER Experiment Name: At_100uM_ABA_Mutants_cDNA_P Parameter: Treatment Value: 100uM ABA vs. No Treatment
  misc_feature: MA Experiment ID: 20000071 Result: Down-regulated in Transcription
  misc_feature: MA Experiment 20000071 PARAMETER Experiment Name: At_100uM_ABA_Mutants_cDNA_P Parameter: Plant Line Value: CS8104
  misc_feature: MA Experiment 20000071 PARAMETER Experiment Name: At_100uM_ABA_Mutants_cDNA_P Parameter: Timepoint (hr) Value: 6
  misc_feature: MA Experiment 20000071 PARAMETER Experiment Name: At_100uM_ABA_Mutants_cDNA_P Parameter: Tissue Value: Aerial
  misc_feature: MA Experiment 20000071 PARAMETER Experiment Name: At_100uM_ABA_Mutants_cDNA_P Parameter: Treatment Value: 100uM ABA vs. No Treatment
  misc_feature: MA Experiment ID: 20000086 Result: Down-regulated in Transcription
  misc_feature: MA Experiment 20000086 PARAMETER Experiment Name: At_100uM_ABA_Mutants_cDNA_P Parameter: Plant Line Value: CS22
  misc_feature: MA Experiment 20000086 PARAMETER Experiment Name: At_100uM_ABA_Mutants_cDNA_P Parameter: Timepoint (hr) Value: 6
  misc_feature: MA Experiment 20000086 PARAMETER Experiment Name: At_100uM_ABA_Mutants_cDNA_P Parameter: Tissue Value: Aerial
  misc_feature: MA Experiment 20000086 PARAMETER Experiment Name: At_100uM_ABA_Mutants_cDNA_P Parameter: Treatment Value: 100uM ABA vs. No Treatment
  misc_feature: MA Experiment ID: 20000087 Result: Down-regulated in Transcription
  misc_feature: MA Experiment 20000087 PARAMETER Experiment Name: At_100uM_ABA_Mutants_cDNA_P Parameter: Plant Line Value: WS
  misc_feature: MA Experiment 20000087 PARAMETER Experiment Name: At_100uM_ABA_Mutants_cDNA_P Parameter: Timepoint (hr) Value: 6
  misc_feature: MA Experiment 20000087 PARAMETER Experiment Name: At_100uM_ABA_Mutants_cDNA_P Parameter: Tissue Value: Aerial
  misc_feature: MA Experiment 20000087 PARAMETER Experiment Name: At_100uM_ABA_Mutants_cDNA_P Parameter: Treatment Value: 100uM ABA vs. No Treatment
  misc_feature: MA Experiment ID: 20000089 Result: Down-regulated in Transcription
  misc_feature: MA Experiment ID: 20000090 Result: Down-regulated in Transcription
  misc_feature: MA Experiment ID: 20000117 Result: Down-regulated in Transcription
  misc_feature: MA Experiment 20000117 PARAMETER Experiment Name: At_100uM_ABA_Mutants_cDNA_P Parameter: Plant Line Value: Columbia
  misc_feature: MA Experiment 20000117 PARAMETER Experiment Name: At_100uM_ABA_Mutants_cDNA_P Parameter: Timepoint (hr) Value: 6
  misc_feature: MA Experiment 20000117 PARAMETER Experiment Name: At_100uM_ABA_Mutants_cDNA_P Parameter: Tissue Value: Aerial
  misc_feature: MA Experiment 20000117 PARAMETER Experiment Name: At_100uM_ABA_Mutants_cDNA_P Parameter: Treatment Value: 100uM ABA vs. No Treatment
  misc_feature: MA Experiment ID: 20000184 Result: Up-regulated in Transcription
  misc_feature: MA Experiment 20000184 PARAMETER Experiment Name: At_Shoots__P Parameter: Age (day) Value: 7
  misc_feature: MA Experiment 20000184 PARAMETER Experiment Name: At_Shoots__P Parameter: Tissue Value: Shoots vs. Whole Plant
  misc_feature: MA Experiment ID: 20000185 Result: Up-regulated in Transcription
  misc_feature: MA Experiment 20000185 PARAMETER Experiment Name: At_Roots__P Parameter: Age (day) Value: 7 vs. 21
  misc_feature: MA Experiment 20000185 PARAMETER Experiment Name: At_Roots__P Parameter: Organism Value: A. thaliana
  misc_feature: MA Experiment 20000185 PARAMETER Experiment Name: At_Roots__P Parameter: Tissue Value: Roots vs. Whole Plant
  misc_feature: MA Experiment ID: 20000234 Result: Up-regulated in Transcription
  misc_feature: MA Experiment 20000234 PARAMETER Experiment Name: At_Siliques_P Parameter: Age (day) Value: 21
  misc_feature: MA Experiment 20000234 PARAMETER Experiment Name: At_Siliques_P Parameter: Organism Value: A. thaliana
  misc_feature: MA Experiment 20000234 PARAMETER Experiment Name: At_Siliques_P Parameter: Plant Line Value: WS
  misc_feature: MA Experiment 20000234 PARAMETER Experiment Name: At_Siliques_P Parameter: Tissue Value: Less Than 5mm Siliques vs. Whole Plant
  misc_feature: MA Experiment ID: 20000235 Result: Up-regulated in Transcription
  misc_feature: MA Experiment 20000235 PARAMETER Experiment Name: At_Siliques_P Parameter: Age (day) Value: 21
  misc_feature: MA Experiment 20000235 PARAMETER Experiment Name: At_Siliques_P Parameter: Organism Value: A. thaliana
  misc_feature: MA Experiment 20000235 PARAMETER Experiment Name: At_Siliques_P Parameter: Plant Line Value: WS
  misc_feature: MA Experiment 20000235 PARAMETER Experiment Name: At_Siliques_P Parameter: Tissue Value: 5-10mm Siliques vs. Whole Plant
  misc_feature: MA Experiment ID: 20000264 Result: Up-regulated in Transcription
  misc_feature: MA Experiment 20000264 PARAMETER Experiment Name: At_Open_Flower_P Parameter: Age (day) Value: 21
  misc_feature: MA Experiment 20000264 PARAMETER Experiment Name: At_Open_Flower_P Parameter: Plant Line Value: WS
  misc_feature: MA Experiment 20000264 PARAMETER Experiment Name: At_Open_Flower_P Parameter: Tissue Value: Open Flower vs. Whole Plant
  misc_feature: MA Experiment ID: 20000265 Result: Up-regulated in Transcription
  misc_feature: MA Experiment 20000265 PARAMETER Experiment Name: At_Open_Flower_P Parameter: Age (day) Value: 21
  misc_feature: MA Experiment 20000265 PARAMETER Experiment Name: At_Open_Flower_P Parameter: Plant Line Value: WS
  misc_feature: MA Experiment 20000265 PARAMETER Experiment Name: At_Open_Flower_P Parameter: Tissue Value: Closed Flower vs. Whole Plant
  misc_feature: MA Experiment ID: 20000438 Result: Up-regulated in Transcription
  misc_feature: MA Experiment 20000438 PARAMETER Experiment Name: At_Shoots__P Parameter: Age (day) Value: 14
  misc_feature: MA Experiment 20000438 PARAMETER Experiment Name: At_Shoots__P Parameter: Tissue Value: Shoots vs. Whole Plant
  misc_feature: MA Experiment ID: 20000460 Result: Up-regulated in Transcription
  misc_feature: MA Experiment 20000460 PARAMETER Experiment Name: At_10percent_PEG_P Parameter: Age (day) Value: 12
  misc_feature: MA Experiment 20000460 PARAMETER Experiment Name: At_10percent_PEG_P Parameter: Organism Value: A. thaliana
  misc_feature: MA Experiment 20000460 PARAMETER Experiment Name: At_10percent_PEG_P Parameter: Plant Line Value: WS
  misc_feature: MA Experiment 20000460 PARAMETER Experiment Name: At_10percent_PEG_P Parameter: Timepoint (day) Value: 12
  misc_feature: MA Experiment 20000460 PARAMETER Experiment Name: At_10percent_PEG_P Parameter: Tissue Value: Whole Plant
  misc_feature: MA Experiment 20000460 PARAMETER Experiment Name: At_10percent_PEG_P Parameter: Treatment Value: 10percent PEG vs. No Treatment
  misc_feature: MA Experiment ID: 20000527 Result: Up-regulated in Transcription
  misc_feature: MA Experiment 20000527 PARAMETER Experiment Name: At_10percent_PEG_P Parameter: Age (day) Value: 20
  misc_feature: MA Experiment 20000527 PARAMETER Experiment Name: At_10percent_PEG_P Parameter: Organism Value: A. thaliana
  misc_feature: MA Experiment 20000527 PARAMETER Experiment Name: At_10percent_PEG_P Parameter: Plant Line Value: WS
  misc_feature: MA Experiment 20000527 PARAMETER Experiment Name: At_10percent_PEG_P Parameter: Timepoint (day) Value: 20
  misc_feature: MA Experiment 20000527 PARAMETER Experiment Name: At_10percent_PEG_P Parameter: Tissue Value: Whole Plant
  misc_feature: MA Experiment 20000527 PARAMETER Experiment Name: At_10percent_PEG_P Parameter: Treatment Value: 10percent PEG vs. No Treatment
  misc_feature: MA Experiment ID: 20000574 Result: Down-regulated in Transcription
  misc_feature: MA Experiment 20000574 PARAMETER Experiment Name: At_100uM_ABA_Mutants__P Parameter: Organism Value: A. thaliana
  misc_feature: MA Experiment 20000574 PARAMETER Experiment Name: At_100uM_ABA_Mutants__P Parameter: Plant Line Value: CS23 vs. Ler wt
  misc_feature: MA Experiment 20000574 PARAMETER Experiment Name: At_100uM_ABA_Mutants__P Parameter: Timepoint (hr) Value: N/A
  misc_feature: MA Experiment 20000574 PARAMETER Experiment Name: At_100uM_ABA_Mutants__P Parameter: Tissue Value: Whole Plant
  misc_feature: MA Experiment 20000574 PARAMETER Experiment Name: At_100uM_ABA_Mutants__P Parameter: Treatment Value: None
  misc_feature: MA Experiment ID: 20000794 Result: Up-regulated in Transcription
  misc_feature: MA Experiment 20000794 PARAMETER Experiment Name: At_Petals_P Parameter: Age (day) Value: 23-25 days
  misc_feature: MA Experiment 20000794 PARAMETER Experiment Name: At_Petals_P Parameter: Plant Line Value: WS
  misc_feature: MA Experiment 20000794 PARAMETER Experiment Name: At_Petals_P Parameter: Tissue Value: Petals vs. Whole plant
  misc_feature: MA Experiment ID: 20001248 Result: Down-regulated in Transcription
  misc_feature: MA Experiment 20001248 PARAMETER Experiment Name: At_Far-red-induction_P Parameter: Age (day) Value: 7
  misc_feature: MA Experiment 20001248 PARAMETER Experiment Name: At_Far-red-induction_P Parameter: Light Value: Far-red vs. White
  misc_feature: MA Experiment 20001248 PARAMETER Experiment Name: At_Far-red-induction_P Parameter: Organism Value: A. thaliana
  misc_feature: MA Experiment 20001248 PARAMETER Experiment Name: At_Far-red-induction_P Parameter: Plant Line Value: Columbia
  misc_feature: MA Experiment 20001248 PARAMETER Experiment Name: At_Far-red-induction_P Parameter: Timepoint (hr) Value: 4
  misc_feature: MA Experiment 20001248 PARAMETER Experiment Name: At_Far-red-induction_P Parameter: Tissue Value: Whole Plant
  misc_feature: MA Experiment ID: 20001450 Result: Down-regulated in Transcription
  misc_feature: MA Experiment 20001450 PARAMETER Experiment Name: At_Far-red-induction_P Parameter: Age (day) Value: 7
  misc_feature: MA Experiment 20001450 PARAMETER Experiment Name: At_Far-red-induction_P Parameter: Light Value: Far-red vs. White
  misc_feature: MA Experiment 20001450 PARAMETER Experiment Name: At_Far-red-induction_P Parameter: Organism Value: A. thaliana
  misc_feature: MA Experiment 20001450 PARAMETER Experiment Name: At_Far-red-induction_P Parameter: Plant Line Value: Columbia
  misc_feature: MA Experiment 20001450 PARAMETER Experiment Name: At_Far-red-induction_P Parameter: Timepoint (hr) Value: 8
  misc_feature: MA Experiment 20001450 PARAMETER Experiment Name: At_Far-red-induction_P Parameter: Tissue Value: Whole Plant
  misc_feature: MA Experiment ID: 20001451 Result: Down-regulated in Transcription
  misc_feature: MA Experiment 20001451 PARAMETER Experiment Name: At_Far-red-induction_P Parameter: Age (day) Value: 7
  misc_feature: MA Experiment 20001451 PARAMETER Experiment Name: At_Far-red-induction_P Parameter: Light Value: Far-red vs. White
  misc_feature: MA Experiment 20001451 PARAMETER Experiment Name: At_Far-red-induction_P Parameter: Organism Value: A. thaliana
  misc_feature: MA Experiment 20001451 PARAMETER Experiment Name: At_Far-red-induction_P Parameter: Plant Line Value: Columbia
  misc_feature: MA Experiment 20001451 PARAMETER Experiment Name: At_Far-red-induction_P Parameter: Timepoint (hr) Value: 24
  misc_feature: MA Experiment 20001451 PARAMETER Experiment Name: At_Far-red-induction_P Parameter: Tissue Value: Whole Plant
  misc_feature: MA Experiment ID: 20001503 Result: Up-regulated in Transcription
  misc_feature: MA Experiment 20001503 PARAMETER Experiment Name: At_Far-red-enriched_P Parameter: Age (day) Value: 7
  misc_feature: MA Experiment 20001503 PARAMETER Experiment Name: At_Far-red-enriched_P Parameter: Light Value: Far-red enriched vs. White
  misc_feature: MA Experiment 20001503 PARAMETER Experiment Name: At_Far-red-enriched_P Parameter: Organism Value: A. thaliana
  misc_feature: MA Experiment 20001503 PARAMETER Experiment Name: At_Far-red-enriched_P Parameter: Plant Line Value: Columbia
  misc_feature: MA Experiment 20001503 PARAMETER Experiment Name: At_Far-red-enriched_P Parameter: Timepoint (day) Value: 3
  misc_feature: MA Experiment 20001503 PARAMETER Experiment Name: At_Far-red-enriched_P Parameter: Tissue Value: Whole Plant
  misc_feature: MA Experiment ID: 20001556 Result: Up-regulated in Transcription
  misc_feature: MA Experiment 20001556 PARAMETER Experiment Name: At_Drought_Soil_Dry_P Parameter: Age (day) Value: 26
  misc_feature: MA Experiment 20001556 PARAMETER Experiment Name: At_Drought_Soil_Dry_P Parameter: Organism Value: A. thaliana
  misc_feature: MA Experiment 20001556 PARAMETER Experiment Name: At_Drought_Soil_Dry_P Parameter: Plant Line Value: WS
  misc_feature: MA Experiment 20001556 PARAMETER Experiment Name: At_Drought_Soil_Dry_P Parameter: Post Timepoint (hr) Value: None
  misc_feature: MA Experiment 20001556 PARAMETER Experiment Name: At_Drought_Soil_Dry_P Parameter: Post-Treatment Value: None
  misc_feature: MA Experiment 20001556 PARAMETER Experiment Name: At_Drought_Soil_Dry_P Parameter: Timepoint (day) Value: 12
  misc_feature: MA Experiment 20001556 PARAMETER Experiment Name: At_Drought_Soil_Dry_P Parameter: Treatment Value: Drought vs. No Drought
  misc_feature: MA Experiment ID: 20001558 Result: Up-regulated in Transcription
  misc_feature: MA Experiment 20001558 PARAMETER Experiment Name: At_Drought_Soil_Dry_P Parameter: Age (day) Value: 27
  misc_feature: MA Experiment 20001558 PARAMETER Experiment Name: At_Drought_Soil_Dry_P Parameter: Organism Value: A. thaliana
  misc_feature: MA Experiment 20001558 PARAMETER Experiment Name: At_Drought_Soil_Dry_P Parameter: Plant Line Value: WS
  misc_feature: MA Experiment 20001558 PARAMETER Experiment Name: At_Drought_Soil_Dry_P Parameter: Post Timepoint (hr) Value: 6
  misc_feature: MA Experiment 20001558 PARAMETER Experiment Name: At_Drought_Soil_Dry_P Parameter: Post-Treatment Value: Re-Water vs. No Drought
  misc_feature: MA Experiment 20001558 PARAMETER Experiment Name: At_Drought_Soil_Dry_P Parameter: Timepoint (day) Value: 13
  misc_feature: MA Experiment 20001558 PARAMETER Experiment Name: At_Drought_Soil_Dry_P Parameter: Treatment Value: Drought vs. No Drought
  misc_feature: MA Experiment ID: 20001560 Result: Up-regulated in Transcription
  misc_feature: MA Experiment 20001560 PARAMETER Experiment Name: At_Drought_Soil_Dry_P Parameter: Age (day) Value: 28
  misc_feature: MA Experiment 20001560 PARAMETER Experiment Name: At_Drought_Soil_Dry_P Parameter: Organism Value: A. thaliana
  misc_feature: MA Experiment 20001560 PARAMETER Experiment Name: At_Drought_Soil_Dry_P Parameter: Plant Line Value: WS
  misc_feature: MA Experiment 20001560 PARAMETER Experiment Name: At_Drought_Soil_Dry_P Parameter: Post Timepoint (hr) Value: None
  misc_feature: MA Experiment 20001560 PARAMETER Experiment Name: At_Drought_Soil_Dry_P Parameter: Post-Treatment Value: None
  misc_feature: MA Experiment 20001560 PARAMETER Experiment Name: At_Drought_Soil_Dry_P Parameter: Timepoint (day) Value: 14
  misc_feature: MA Experiment 20001560 PARAMETER Experiment Name: At_Drought_Soil_Dry_P Parameter: Treatment Value: Drought vs. No Drought
  misc_feature: MA Experiment ID: 20001904 Result: Up-regulated in Transcription
  misc_feature: MA Experiment 20001904 PARAMETER Experiment Name: At_Drought_Reproduction_P Parameter: Age (day) Value: 37
  misc_feature: MA Experiment 20001904 PARAMETER Experiment Name: At_Drought_Reproduction_P Parameter: Organism Value: A. thaliana
  misc_feature: MA Experiment 20001904 PARAMETER Experiment Name: At_Drought_Reproduction_P Parameter: Plant Line Value: WS
  misc_feature: MA Experiment 20001904 PARAMETER Experiment Name: At_Drought_Reproduction_P Parameter: Timepoint (day) Value: 7
  misc_feature: MA Experiment 20001904 PARAMETER Experiment Name: At_Drought_Reproduction_P Parameter: Tissue Value: Rosettes
  misc_feature: MA Experiment 20001904 PARAMETER Experiment Name: At_Drought_Reproduction_P Parameter: Treatment Value: Drought vs. No Drought
  misc_feature: MA Experiment ID: 20001905 Result: Up-regulated in Transcription
  misc_feature: MA Experiment 20001905 PARAMETER Experiment Name: At_Drought_Reproduction_P Parameter: Age (day) Value: 40
  misc_feature: MA Experiment 20001905 PARAMETER Experiment Name: At_Drought_Reproduction_P Parameter: Organism Value: A. thaliana
  misc_feature: MA Experiment 20001905 PARAMETER Experiment Name: At_Drought_Reproduction_P Parameter: Plant Line Value: WS
  misc_feature: MA Experiment 20001905 PARAMETER Experiment Name: At_Drought_Reproduction_P Parameter: Timepoint (day) Value: 10
  misc_feature: MA Experiment 20001905 PARAMETER Experiment Name: At_Drought_Reproduction_P Parameter: Tissue Value: Rosettes
  misc_feature: MA Experiment 20001905 PARAMETER Experiment Name: At_Drought_Reproduction_P Parameter: Treatment Value: Drought vs. No Drought
  misc_feature: MA Experiment ID: 20001906 Result: Down-regulated in Transcription
  misc_feature: MA Experiment 20001906 PARAMETER Experiment Name: At_Drought_Reproduction_P Parameter: Age (day) Value: 35
  misc_feature: MA Experiment 20001906 PARAMETER Experiment Name: At_Drought_Reproduction_P Parameter: Organism Value: A. thaliana
  misc_feature: MA Experiment 20001906 PARAMETER Experiment Name: At_Drought_Reproduction_P Parameter: Plant Line Value: WS
  misc_feature: MA Experiment 20001906 PARAMETER Experiment Name: At_Drought_Reproduction_P Parameter: Timepoint (day) Value: 5
  misc_feature: MA Experiment 20001906 PARAMETER Experiment Name: At_Drought_Reproduction_P Parameter: Tissue Value: Siliques
  misc_feature: MA Experiment 20001906 PARAMETER Experiment Name: At_Drought_Reproduction_P Parameter: Treatment Value: Drought vs. No Drought
aaaagggcagtctaactttccttttctaatgattataaatatcctttttccgtaaaaagaaattaaaagaaaatgggttcgacactaaagcatctgcttttgcttctacttgttttgattcgtcatgttgattctgctgctatagtcaagtctcttcctggtttagaaggccgtcttcctttcgaactcgaaaccgggtacattggtattggagaggaagaggacatacaattgttctactatttcatcaaatctgagaacaatccaaaagaagaccctcttcttctatggttagatggaggacctggatgttcttctctcggtggccttctttttgagaacggaccggtggctttgaagtctgcggtttacaatggaagtaatccttctttgttctccactacatattcatggacaaagatggcaaacataatatacttggatcagccagttggatctggtttctcttactcaagaactccaattggaaaatctagtgacacaagtgaagttaagaggatccatgagtttcttcaaaagtggctaagcaagcatccacagtttttctccaaccctttttacgtcaccggagattcttactctggtatgattgttccggccctcgttcaagaaatctctaaaggaaattatatatgttgcaaacatcttataaatctacagggttacgtgctcggaaacccgataacatatgctgaacatgagaaaaactatcgtattccattttctcatggaatgtcattaatctctgatgaactctatgagtcactgaagagaaactgcaaaggaaattatgaaaatgtggatccacgtaacacaaaatgtgtgagacttgttgaagaataccataagtgcactgacaaaataaatacgcaacatatattaataccagattgcgataaaaaaggacatggaataacatctcctgattgctattattatctgtattttcttattgaatgttgggccaacaacgagagagttcgtgaagctcttcatgttactaaggggactaaaggacaatggcagcgatgtaattggactattccatacgataacaacatcataagcagcgtaccatatcatatggataacagcatcaatggatatcgatctcttatttacagtggtgatcatgacatcacaatgcctttccaagcaactcaagcctggataaaatctctaaattactccatcgttgatgactggaggccttggatgataaacgatcaaatcgctggatacacgagaacttattccaataagatgacatttgctactgtcaaaggaggtggacacacggcagagtatctaccaaacgagagttccatcatgttccaaaggtggatcagtggccaacctttgtaatagaaggcctcttttagaggcttattgcctgtacgtattacatatattaatattcacgctacgcgcaattcttttgttttgagatgtttacagaaaataggataaaaagtttgtccttg

SEQ ID NO: 99863 - protein, 437 aa, Arabidopsis thaliana
  peptide (1)..(437): Ceres Seq. ID no. 13603807
  misc_feature (29)..(434): Pfam Name: Serine carboxypeptidase Pfam Description: Serine carboxypeptidase
  misc_feature (1)..(437): Homolog of NCBI NO: 15227772 NR Description: serine carboxypeptidase -related [Arabidopsis
  misc_feature (4)..(437): Homolog of NCBI NO: 30681900 NR Description: serine carboxypeptidase -related [Arabidopsis
  misc_feature (1)..(437): Homolog of NCBI NO: 15227773 NR Description: serine carboxypeptidase -related [Arabidopsis
  misc_feature (4)..(437): Homolog of NCBI NO: 18400137 NR Description: serine carboxypeptidase -related [Arabidopsis >gi|20197128|gb|AAC17816.2| putative serine carboxypeptidase I thaliana] >gi|20197274|gb|AAM15006.1| putative serine
  misc_feature (4)..(418): Homolog of NCBI NO: 30681910 NR Description: serine carboxypeptidase -related [Arabidopsis
  misc_feature (1)..(437): Homolog of NCBI NO: 15227765 NR Description: serine carboxypeptidase -related [Arabidopsis
  misc_feature (1)..(437): Homolog of NCBI NO: 15227769 NR Description: serine carboxypeptidase -related [Arabidopsis
  misc_feature (4)..(411): Homolog of NCBI NO: 30681915 NR Description: serine carboxypeptidase -related [Arabidopsis
  misc_feature (1)..(437): Homolog of NCBI NO: 25289782 NR Description: probable serine carboxypeptidase I [imported] - thaliana >gi|3169172|gb|AAC17815.1| putative serine I [Arabidopsis thaliana] >gi|20197276|gb|AAM15008.1| putative
  misc_feature (3)..(437): Homolog of NCBI NO: 15228300 NR Description: serine carboxypeptidase -related [Arabidopsis >gi|8567775|gb|AAF76347.1| glucose acyltransferase, putative
MGSTLKHLLLLLLVLIRHVDSAAIVKSLPGLEGRLPFELETGYIGIGEEEDIQLFYYFIKSENNPKEDPLLLWLDGGPGCSSLGGLLFENGPVALKSAVYNGSNPSLFSTTYSWTKMANIIYLDQPVGSGFSYSRTPIGKSSDTSEVKRIHEFLQKWLSKHPQFFSNPFYVTGDSYSGMIVPALVQEISKGNYICCKHLINLQGYVLGNPITYAEHEKNYRIPFSHGMSLISDELYESLKRNCKGNYENVDPRNTKCVRLVEEYHKCTDKINTQHILIPDCDKKGHGITSPDCYYYLYFLIECWANNERVREALHVTKGTKGQWQRCNWTIPYDNNIISSVPYHMDNSINGYRSLIYSGDHDITMPFQATQAWIKSLNYSIVDDWRPWMINDQIAGYTRTYSNKMTFATVKGGGHTAEYLPNESSIMFQRWISGQPL

SEQ ID NO: 99864 - protein, 321 aa, Arabidopsis thaliana; identical to SEQ ID NO: 22296
  peptide (1)..(321): Ceres Seq. ID no. 13603808
  misc_feature (1)..(318): Pfam Name: Serine carboxypeptidase Pfam Description: Serine carboxypeptidase
  misc_feature (1)..(321): Homolog of NCBI NO: 15227772 NR Description: serine carboxypeptidase -related [Arabidopsis
  misc_feature (1)..(321): Homolog of NCBI NO: 30681900 NR Description: serine carboxypeptidase -related [Arabidopsis
  misc_feature (1)..(321): Homolog of NCBI NO: 15227773 NR Description: serine carboxypeptidase -related [Arabidopsis
  misc_feature (1)..(321): Homolog of NCBI NO: 18400137 NR Description: serine carboxypeptidase -related [Arabidopsis >gi|20197128|gb|AAC17816.2| putative serine carboxypeptidase I thaliana] >gi|20197274|gb|AAM15006.1| putative serine
  misc_feature (1)..(302): Homolog of NCBI NO: 30681910 NR Description: serine carboxypeptidase -related [Arabidopsis
  misc_feature (1)..(321): Homolog of NCBI NO: 15227765 NR Description: serine carboxypeptidase -related [Arabidopsis
  misc_feature (1)..(321): Homolog of NCBI NO: 15227769 NR Description: serine carboxypeptidase -related [Arabidopsis
  misc_feature (1)..(295): Homolog of NCBI NO: 30681915 NR Description: serine carboxypeptidase -related [Arabidopsis
  misc_feature (1)..(321): Homolog of NCBI NO: 25289782 NR Description: probable serine carboxypeptidase I [imported] - thaliana >gi|3169172|gb|AAC17815.1| putative serine I [Arabidopsis thaliana] >gi|20197276|gb|AAM15008.1| putative
  misc_feature (1)..(321): Homolog of NCBI NO: 15228300 NR Description: serine carboxypeptidase -related [Arabidopsis >gi|8567775|gb|AAF76347.1| glucose acyltransferase, putative

SEQ ID NO: 99865 - protein, 259 aa, Arabidopsis thaliana; identical to SEQ ID NO: 22297
  peptide (1)..(259): Ceres Seq. ID no. 13603809
  misc_feature (1)..(256): Pfam Name: Serine carboxypeptidase Pfam Description: Serine carboxypeptidase
  misc_feature (1)..(259): Homolog of NCBI NO: 15227772 NR Description: serine carboxypeptidase -related [Arabidopsis
  misc_feature (1)..(259): Homolog of NCBI NO: 30681900 NR Description: serine carboxypeptidase -related [Arabidopsis
  misc_feature (1)..(259): Homolog of NCBI NO: 15227773 NR Description: serine carboxypeptidase -related [Arabidopsis
  misc_feature (1)..(259): Homolog of NCBI NO: 18400137 NR Description: serine carboxypeptidase -related [Arabidopsis >gi|20197128|gb|AAC17816.2| putative serine carboxypeptidase I thaliana] >gi|20197274|gb|AAM15006.1| putative serine
  misc_feature (1)..(240): Homolog of NCBI NO: 30681910 NR Description: serine carboxypeptidase -related [Arabidopsis
  misc_feature (1)..(259): Homolog of NCBI NO: 15227765 NR Description: serine carboxypeptidase -related [Arabidopsis
  misc_feature (1)..(259): Homolog of NCBI NO: 15227769 NR Description: serine carboxypeptidase -related [Arabidopsis
  misc_feature (1)..(233): Homolog of NCBI NO: 30681915 NR Description: serine carboxypeptidase -related [Arabidopsis
  misc_feature (1)..(259): Homolog of NCBI NO: 25289782 NR Description: probable serine carboxypeptidase I [imported] - thaliana >gi|3169172|gb|AAC17815.1| putative serine I [Arabidopsis thaliana] >gi|20197276|gb|AAM15008.1| putative
  misc_feature (1)..(259): Homolog of NCBI NO: 15228300 NR Description: serine carboxypeptidase -related [Arabidopsis >gi|8567775|gb|AAF76347.1| glucose acyltransferase, putative

SEQ ID NO: 99866 - DNA, 1134 bp, Arabidopsis thaliana
  misc_feature (1)..(1134): Ceres Seq. ID no. 13603810
  misc_feature: MA Experiment ID: 20000179 Result: Up-regulated in Transcription
  misc_feature: MA Experiment 20000179 PARAMETER Experiment Name: At_Germinating_Seeds_P Parameter: Age (hr) Value: 6 vs. 0
  misc_feature: MA Experiment 20000179 PARAMETER Experiment Name: At_Germinating_Seeds_P Parameter: Tissue Value: Germinating Seeds
  misc_feature: MA Experiment ID: 20000227 Result: Up-regulated in Transcription
  misc_feature: MA Experiment 20000227 PARAMETER Experiment Name: At_Root-Tips-vs-Tops_P Parameter: Tissue Value: Root Tips vs. Root Tops
  misc_feature: MA Experiment ID: 20000235 Result: Down-regulated in Transcription
  misc_feature: MA Experiment 20000235 PARAMETER Experiment Name: At_Siliques_P Parameter: Age (day) Value: 21
  misc_feature: MA Experiment 20000235 PARAMETER Experiment Name: At_Siliques_P Parameter: Organism Value: A. thaliana
  misc_feature: MA Experiment 20000235 PARAMETER Experiment Name: At_Siliques_P Parameter: Plant Line Value: WS
  misc_feature: MA Experiment 20000235 PARAMETER Experiment Name: At_Siliques_P Parameter: Tissue Value: 5-10mm Siliques vs. Whole Plant
  misc_feature: MA Experiment ID: 20000268 Result: Down-regulated in Transcription
  misc_feature: MA Experiment 20000268 PARAMETER Experiment Name: At_100mM_NaCl__P Parameter: Age (day) Value: 14
  misc_feature: MA Experiment 20000268 PARAMETER Experiment Name: At_100mM_NaCl__P Parameter: Organism Value: A. thaliana
  misc_feature: MA Experiment 20000268 PARAMETER Experiment Name: At_100mM_NaCl__P Parameter: Plant Line Value: WS
  misc_feature: MA Experiment 20000268 PARAMETER Experiment Name: At_100mM_NaCl__P Parameter: Timepoint (hr) Value: 6
  misc_feature: MA Experiment 20000268 PARAMETER Experiment Name: At_100mM_NaCl__P Parameter: Tissue Value: Whole Plant
  misc_feature: MA Experiment 20000268 PARAMETER Experiment Name: At_100mM_NaCl__P Parameter: Treatment Value: 100mM NaCl vs. No Treatment
  misc_feature: MA Experiment ID: 20000574 Result: Down-regulated in Transcription
  misc_feature: MA Experiment 20000574 PARAMETER Experiment Name: At_100uM_ABA_Mutants__P Parameter: Organism Value: A. thaliana
  misc_feature: MA Experiment 20000574 PARAMETER Experiment Name: At_100uM_ABA_Mutants__P Parameter: Plant Line Value: CS23 vs. Ler wt
  misc_feature: MA Experiment 20000574 PARAMETER Experiment Name: At_100uM_ABA_Mutants__P Parameter: Timepoint (hr) Value: N/A
  misc_feature: MA Experiment 20000574 PARAMETER Experiment Name: At_100uM_ABA_Mutants__P Parameter: Tissue Value: Whole Plant
  misc_feature: MA Experiment 20000574 PARAMETER Experiment Name: At_100uM_ABA_Mutants__P Parameter: Treatment Value: None
  misc_feature: MA Experiment ID: 20001247 Result: Up-regulated in Transcription
  misc_feature: MA Experiment 20001247 PARAMETER Experiment Name: At_Far-red-induction_P Parameter: Age (day) Value: 7
  misc_feature: MA Experiment 20001247 PARAMETER Experiment Name: At_Far-red-induction_P Parameter: Light Value: Far-red vs. White
  misc_feature: MA Experiment 20001247 PARAMETER Experiment Name: At_Far-red-induction_P Parameter: Organism Value: A. thaliana
  misc_feature: MA Experiment 20001247 PARAMETER Experiment Name: At_Far-red-induction_P Parameter: Plant Line Value: Columbia
  misc_feature: MA Experiment 20001247 PARAMETER Experiment Name: At_Far-red-induction_P Parameter: Timepoint (hr) Value: 1
  misc_feature: MA Experiment 20001247 PARAMETER Experiment Name: At_Far-red-induction_P Parameter: Tissue Value: Whole Plant
  misc_feature: MA Experiment ID: 20001451 Result: Up-regulated in Transcription
  misc_feature: MA Experiment 20001451 PARAMETER Experiment Name: At_Far-red-induction_P Parameter: Age (day) Value: 7
  misc_feature: MA Experiment 20001451 PARAMETER Experiment Name: At_Far-red-induction_P Parameter: Light Value: Far-red vs. White
  misc_feature: MA Experiment 20001451 PARAMETER Experiment Name: At_Far-red-induction_P Parameter: Organism Value: A. thaliana
  misc_feature: MA Experiment 20001451 PARAMETER Experiment Name: At_Far-red-induction_P Parameter: Plant Line Value: Columbia
  misc_feature: MA Experiment 20001451 PARAMETER Experiment Name: At_Far-red-induction_P Parameter: Timepoint (hr) Value: 24
  misc_feature: MA Experiment 20001451 PARAMETER Experiment Name: At_Far-red-induction_P Parameter: Tissue Value: Whole Plant
  misc_feature: MA Experiment ID: 20001554 Result: Down-regulated in Transcription
  misc_feature: MA Experiment 20001554 PARAMETER Experiment Name: At_Drought_Soil_Dry_P Parameter: Age (day) Value: 21
  misc_feature: MA Experiment 20001554 PARAMETER Experiment Name: At_Drought_Soil_Dry_P Parameter: Organism Value: A. thaliana
  misc_feature: MA Experiment 20001554 PARAMETER Experiment Name: At_Drought_Soil_Dry_P Parameter: Plant Line Value: WS
  misc_feature: MA Experiment 20001554 PARAMETER Experiment Name: At_Drought_Soil_Dry_P Parameter: Post Timepoint (hr) Value: None
  misc_feature: MA Experiment 20001554 PARAMETER Experiment Name: At_Drought_Soil_Dry_P Parameter: Post-Treatment Value: None
  misc_feature: MA Experiment 20001554 PARAMETER Experiment Name: At_Drought_Soil_Dry_P Parameter: Timepoint (day) Value: 7
  misc_feature: MA Experiment 20001554 PARAMETER Experiment Name: At_Drought_Soil_Dry_P Parameter: Treatment Value: Drought vs. No Drought
  misc_feature: MA Experiment ID: 20001555 Result: Down-regulated in Transcription
  misc_feature: MA Experiment 20001555 PARAMETER Experiment Name: At_Drought_Soil_Dry_P Parameter: Age (day) Value: 24
  misc_feature: MA Experiment 20001555 PARAMETER Experiment Name: At_Drought_Soil_Dry_P Parameter: Organism Value: A. thaliana
  misc_feature: MA Experiment 20001555 PARAMETER Experiment Name: At_Drought_Soil_Dry_P Parameter: Plant Line Value: WS
  misc_feature: MA Experiment 20001555 PARAMETER Experiment Name: At_Drought_Soil_Dry_P Parameter: Post Timepoint (hr) Value: None
  misc_feature: MA Experiment 20001555 PARAMETER Experiment Name: At_Drought_Soil_Dry_P Parameter: Post-Treatment Value: None
  misc_feature: MA Experiment 20001555 PARAMETER Experiment Name: At_Drought_Soil_Dry_P Parameter: Timepoint (day) Value: 10
  misc_feature: MA Experiment 20001555 PARAMETER Experiment Name: At_Drought_Soil_Dry_P Parameter: Treatment Value: Drought vs. No Drought
  misc_feature: MA Experiment ID: 20001556 Result: Down-regulated in Transcription
  misc_feature: MA Experiment 20001556 PARAMETER Experiment Name: At_Drought_Soil_Dry_P Parameter: Age (day) Value: 26
  misc_feature: MA Experiment 20001556 PARAMETER Experiment Name: At_Drought_Soil_Dry_P Parameter: Organism Value: A. thaliana
  misc_feature: MA Experiment 20001556 PARAMETER Experiment Name: At_Drought_Soil_Dry_P Parameter: Plant Line Value: WS
  misc_feature: MA Experiment 20001556 PARAMETER Experiment Name: At_Drought_Soil_Dry_P Parameter: Post Timepoint (hr) Value: None
  misc_feature: MA Experiment 20001556 PARAMETER Experiment Name: At_Drought_Soil_Dry_P Parameter: Post-Treatment Value: None
  misc_feature: MA Experiment 20001556 PARAMETER Experiment Name: At_Drought_Soil_Dry_P Parameter: Timepoint (day) Value: 12
  misc_feature: MA Experiment 20001556 PARAMETER Experiment Name: At_Drought_Soil_Dry_P Parameter: Treatment Value: Drought vs. No Drought
  misc_feature: MA Experiment ID: 20001558 Result: Up-regulated in Transcription
  misc_feature: MA Experiment 20001558 PARAMETER Experiment Name: At_Drought_Soil_Dry_P Parameter: Age (day) Value: 27
  misc_feature: MA Experiment 20001558 PARAMETER Experiment Name: At_Drought_Soil_Dry_P Parameter: Organism Value: A. thaliana
  misc_feature: MA Experiment 20001558 PARAMETER Experiment Name: At_Drought_Soil_Dry_P Parameter: Plant Line Value: WS
  misc_feature: MA Experiment 20001558 PARAMETER Experiment Name: At_Drought_Soil_Dry_P Parameter: Post Timepoint (hr) Value: 6
  misc_feature: MA Experiment 20001558 PARAMETER Experiment Name: At_Drought_Soil_Dry_P Parameter: Post-Treatment Value: Re-Water vs. No Drought
  misc_feature: MA Experiment 20001558 PARAMETER Experiment Name: At_Drought_Soil_Dry_P Parameter: Timepoint (day) Value: 13
  misc_feature: MA Experiment 20001558 PARAMETER Experiment Name: At_Drought_Soil_Dry_P Parameter: Treatment Value: Drought vs. No Drought
  misc_feature: MA Experiment ID: 20001560 Result: Up-regulated in Transcription
  misc_feature: MA Experiment 20001560 PARAMETER Experiment Name: At_Drought_Soil_Dry_P Parameter: Age (day) Value: 28
  misc_feature: MA Experiment 20001560 PARAMETER Experiment Name: At_Drought_Soil_Dry_P Parameter: Organism Value: A. thaliana
  misc_feature: MA Experiment 20001560 PARAMETER Experiment Name: At_Drought_Soil_Dry_P Parameter: Plant Line Value: WS
  misc_feature: MA Experiment 20001560 PARAMETER Experiment Name: At_Drought_Soil_Dry_P Parameter: Post Timepoint (hr) Value: None
  misc_feature: MA Experiment 20001560 PARAMETER Experiment Name: At_Drought_Soil_Dry_P Parameter: Post-Treatment Value: None
  misc_feature: MA Experiment 20001560 PARAMETER Experiment Name: At_Drought_Soil_Dry_P Parameter: Timepoint (day) Value: 14
  misc_feature: MA Experiment 20001560 PARAMETER Experiment Name: At_Drought_Soil_Dry_P Parameter: Treatment Value: Drought vs. No Drought
  misc_feature: MA Experiment ID: 20001757 Result: Down-regulated in Transcription
  misc_feature: MA Experiment 20001757 PARAMETER Experiment Name: At_50mM_NH4NO3_L-to-H_P Parameter: Timepoint (hr) Value: 6
  misc_feature: MA Experiment 20001757 PARAMETER Experiment Name: At_50mM_NH4NO3_L-to-H_P Parameter: Tissue Value: Leaf
  misc_feature: MA Experiment 20001757 PARAMETER Experiment Name: At_50mM_NH4NO3_L-to-H_P Parameter: Treatment Value: 50mM NH4NO3 vs 100mM Mannitol
  misc_feature: MA Experiment ID: 20001772 Result: Up-regulated in Transcription
  misc_feature: MA Experiment 20001772 PARAMETER Experiment Name: At_Far-red-enriched-adult_P Parameter: Age (day) Value: 29
  misc_feature: MA Experiment 20001772 PARAMETER Experiment Name: At_Far-red-enriched-adult_P Parameter: Light Value: Far-red enriched vs. White
  misc_feature: MA Experiment 20001772 PARAMETER Experiment Name: At_Far-red-enriched-adult_P Parameter: Organism Value: A. thaliana
  misc_feature: MA Experiment 20001772 PARAMETER Experiment Name: At_Far-red-enriched-adult_P Parameter: Plant Line Value: Columbia
  misc_feature: MA Experiment 20001772 PARAMETER Experiment Name: At_Far-red-enriched-adult_P Parameter: Timepoint (hr) Value: 24
  misc_feature: MA Experiment 20001772 PARAMETER Experiment Name: At_Far-red-enriched-adult_P Parameter: Tissue Value: Aerial
  misc_feature: MA Experiment ID: 20001904 Result: Down-regulated in Transcription
  misc_feature: MA Experiment 20001904 PARAMETER Experiment Name: At_Drought_Reproduction_P Parameter: Age (day) Value: 37
  misc_feature: MA Experiment 20001904 PARAMETER Experiment Name: At_Drought_Reproduction_P Parameter: Organism Value: A. thaliana
  misc_feature: MA Experiment 20001904 PARAMETER Experiment Name: At_Drought_Reproduction_P Parameter: Plant Line Value: WS
  misc_feature: MA Experiment 20001904 PARAMETER Experiment Name: At_Drought_Reproduction_P Parameter: Timepoint (day) Value: 7
  misc_feature: MA Experiment 20001904 PARAMETER Experiment Name: At_Drought_Reproduction_P Parameter: Tissue Value: Rosettes
  misc_feature: MA Experiment 20001904 PARAMETER Experiment Name: At_Drought_Reproduction_P Parameter: Treatment Value: Drought vs. No Drought
  misc_feature: MA Experiment ID: 20001905 Result: Down-regulated in Transcription
  misc_feature: MA Experiment 20001905 PARAMETER Experiment Name: At_Drought_Reproduction_P Parameter: Age (day) Value: 40
  misc_feature: MA Experiment 20001905 PARAMETER Experiment Name: At_Drought_Reproduction_P Parameter: Organism Value: A. thaliana
  misc_feature: MA Experiment 20001905 PARAMETER Experiment Name: At_Drought_Reproduction_P Parameter: Plant Line Value: WS
  misc_feature: MA Experiment 20001905 PARAMETER Experiment Name: At_Drought_Reproduction_P Parameter: Timepoint (day) Value: 10
  misc_feature: MA Experiment 20001905 PARAMETER Experiment Name: At_Drought_Reproduction_P Parameter: Tissue Value: Rosettes
  misc_feature: MA Experiment 20001905 PARAMETER Experiment Name: At_Drought_Reproduction_P Parameter: Treatment Value: Drought vs. No Drought
aacaaaaatcgtttcgttcttttccaaaatccccaaacaatagaaacgcgttttaaacgatttgattagttttaaattaaaaagaagatccgagcgatgtctggttcgacccggaaagaaatggatcggatcaaaggaccatggagtcctgaagaagacgatctgttacaatcgttggttcagaagcacggaccaaggaactggtctctgataagcaaatcaatccctggacgttccggtaaatcttgccgtctccgttggtgtaatcagctttctccggaggtagagcaccgtggattcacggcggaggaagatgatacgattatactagcgcacgctcggtttggtaacaagtgggcgacgattgcacggcttctcaatggtcgcactgataacgcgattaagaatcactggaactcaacgctgaagcggaaatgtagcggcggaggcggcggaggagaggaagggcagagttgtgatttcggtggtaatggagggtatgatggtaatttaactgatgaaaaaccgttaaaacggagggcgagtggtggaggaggagttgttgtggtgacggcgttaagtccaacgggatctgacgtcagcgagcaatcgcaatctagtggatctgttttaccggtttcttcttcttgtcatgtttttaaaccgacggcgagagctggtggagtggtgattgagtcatcatcgccggaggaggaggagaaagatccgatgacttgtttgaggttgtctttgccttgggtcaatgagtcaacaactccaccggagttgtttccggtgaagagagaagaagaagaagagaaggaaagagagatttctggacttggtggagattttatgacggtggtgcaggagatgattaagacggaggttaggagttacatggcggatttacagctaggaaacggcggaggagctggaggaggagcaagttcgtgtatggtgcaaggaactaatggtcgtaatgtagggtttagagagtttattggattaggtaggatcgagtagtgagtgagaaaagagaagaattgtgtagcaaatgcagagaaagagccaatttcatgatttgagatttgattcattcgaaaaaaaaactgaataaatgtattgattttg

SEQ ID NO: 99867 - protein, 309 aa, Arabidopsis thaliana
  peptide (1)..(309): Ceres Seq. ID no. 13603811
  misc_feature (13)..(59): Pfam Name: Myb-like DNA-binding domain Pfam Description: Myb-like DNA-binding domain
  misc_feature (1)..(309): Homolog of NCBI NO: 15227806 NR Description: MYB family transcription factor [Arabidopsis
  misc_feature (1)..(309): Homolog of NCBI NO: 21593586 NR Description: putative MYB family transcription factor
  misc_feature (1)..(309): Homolog of NCBI NO: 15235484 NR Description: myb DNA-binding protein (AtMYB73) [Arabidopsis
  misc_feature (53)..(309): Homolog of NCBI NO: 11358558 NR Description: myb-related transcription factor MYB73 [imported] Arabidopsis thaliana (fragment) >gi|3941504|gb|AAC83628.1|
  misc_feature (10)..(309): Homolog of NCBI NO: 15240708 NR Description: myb family transcription factor [Arabidopsis
  misc_feature (10)..(309): Homolog of NCBI NO: 2129648 NR Description: myb-related protein, 33.3K - Arabidopsis thaliana
  misc_feature (10)..(309): Homolog of NCBI NO: 15450393 NR Description: AT5g67300/K8K14_2 [Arabidopsis thaliana]
  misc_feature (10)..(309): Homolog of NCBI NO: 21592897 NR Description: myb-related protein, 33.3K [Arabidopsis thaliana]
  misc_feature (10)..(301): Homolog of NCBI NO: 15229664 NR Description: myb DNA-binding protein (MYB77) [Arabidopsis
  misc_feature (10)..(301): Homolog of NCBI NO: 2832406 NR Description: R2R3-MYB transcription factor [Arabidopsis
MSGSTRKEMDRIKGPWSPEEDDLLQSLVQKHGPRNWSLISKSIPGRSGKSCRLRWCNQLSPEVEHRGFTAEEDDTIILAHARFGNKWATIARLLNGRTDNAIKNHWNSTLKRKCSGGGGGGEEGQSCDFGGNGGYDGNLTDEKPLKRRASGGGGVVVVTALSPTGSDVSEQSQSSGSVLPVSSSCHVFKPTARAGGVVIESSSPEEEEKDPMTCLRLSLPWVNESTTPPELFPVKREEEEEKEREISGLGGDFMTVVQEMIKTEVRSYMADLQLGNGGGAGGGASSCMVQGTNGRNVGFREFIGLGRIE

SEQ ID NO: 99868 - protein, 301 aa, Arabidopsis thaliana
  peptide (1)..(301): Ceres Seq. ID no. 13603812
  misc_feature (5)..(51): Pfam Name: Myb-like DNA-binding domain Pfam Description: Myb-like DNA-binding domain
  misc_feature (1)..(301): Homolog of NCBI NO: 15227806 NR Description: MYB family transcription factor [Arabidopsis
  misc_feature (1)..(301): Homolog of NCBI NO: 21593586 NR Description: putative MYB family transcription factor
  misc_feature (1)..(301): Homolog of NCBI NO: 15235484 NR Description: myb DNA-binding protein (AtMYB73) [Arabidopsis
  misc_feature (45)..(301): Homolog of NCBI NO: 11358558 NR Description: myb-related transcription factor MYB73 [imported] Arabidopsis thaliana (fragment) >gi|3941504|gb|AAC83628.1|
  misc_feature (2)..(301): Homolog of NCBI NO: 15240708 NR Description: myb family transcription factor [Arabidopsis
  misc_feature (2)..(301): Homolog of NCBI NO: 2129648 NR Description: myb-related protein, 33.3K - Arabidopsis thaliana
  misc_feature (2)..(301): Homolog of NCBI NO: 15450393 NR Description: AT5g67300/K8K14_2 [Arabidopsis thaliana]
  misc_feature (2)..(301): Homolog of NCBI NO: 21592897 NR Description: myb-related protein, 33.3K [Arabidopsis thaliana]
  misc_feature (2)..(293): Homolog of NCBI NO: 15229664 NR Description: myb DNA-binding protein (MYB77) [Arabidopsis
  misc_feature (2)..(293): Homolog of NCBI NO: 2832406 NR Description: R2R3-MYB transcription factor [Arabidopsis
MDRIKGPWSPEEDDLLQSLVQKHGPRNWSLISKSIPGRSGKSCRLRWCNQLSPEVEHRGFTAEEDDTIILAHARFGNKWATIARLLNGRTDNAIKNHWNSTLKRKCSGGGGGGEEGQSCDFGGNGGYDGNLTDEKPLKRRASGGGGVVVVTALSPTGSDVSEQSQSSGSVLPVSSSCHVFKPTARAGGVVIESSSPEEEEKDPMTCLRLSLPWVNESTTPPELFPVKREEEEEKEREISGLGGDFMTVVQEMIKTEVRSYMADLQLGNGGGAGGGASSCMVQGTNGRNVGFREFIGLGRIE

SEQ ID NO: 99869 - DNA, 939 bp, Arabidopsis thaliana
  misc_feature (1)..(939): Ceres Seq. ID no. 13603821
  misc_feature: MA Experiment ID: 108433 Result: Up-regulated in Transcription
  misc_feature: MA Experiment 108433 PARAMETER Experiment Name: At_rhl_Mutant2_cDNA_P Parameter: Age (day) Value: 7
  misc_feature: MA Experiment 108433 PARAMETER Experiment Name: At_rhl_Mutant2_cDNA_P Parameter: Organism Value: A. thaliana
  misc_feature: MA Experiment 108433 PARAMETER Experiment Name: At_rhl_Mutant2_cDNA_P Parameter: Plant Line Value: rhl Mutant vs. wt landsburg
  misc_feature: MA Experiment 108433 PARAMETER Experiment Name: At_rhl_Mutant2_cDNA_P Parameter: Tissue Value: Roots
  misc_feature: MA Experiment ID: 108434 Result: Down-regulated in Transcription
  misc_feature: MA Experiment 108434 PARAMETER Experiment Name: At_Root_Tips_cDNA_P Parameter: Tissue Value: Root Tips
  misc_feature: MA Experiment ID: 108461 Result: Up-regulated in Transcription
  misc_feature: MA Experiment 108461 PARAMETER Experiment Name: At_Germinating_Seeds_cDNA_P Parameter: Age (day) Value: 1 vs. 0
  misc_feature: MA Experiment 108461 PARAMETER Experiment Name: At_Germinating_Seeds_cDNA_P Parameter: Tissue Value: Germinating Seeds
  misc_feature: MA Experiment ID: 108462 Result: Up-regulated in Transcription
  misc_feature: MA Experiment 108462 PARAMETER Experiment Name: At_Germinating_Seeds_cDNA_P Parameter: Age (day) Value: 2 vs. 0
  misc_feature: MA Experiment 108462 PARAMETER Experiment Name: At_Germinating_Seeds_cDNA_P Parameter: Tissue Value: Germinating Seeds
  misc_feature: MA Experiment ID: 108463 Result: Up-regulated in Transcription
  misc_feature: MA Experiment 108463 PARAMETER Experiment Name: At_Germinating_Seeds_cDNA_P Parameter: Age (day) Value: 3 vs. 0
  misc_feature: MA Experiment 108463 PARAMETER Experiment Name: At_Germinating_Seeds_cDNA_P Parameter: Tissue Value: Germinating Seeds
  misc_feature: MA Experiment ID: 108464 Result: Up-regulated in Transcription
  misc_feature: MA Experiment 108464 PARAMETER Experiment Name: At_Germinating_Seeds_cDNA_P Parameter: Age (day) Value: 4 vs. 0
  misc_feature: MA Experiment 108464 PARAMETER Experiment Name: At_Germinating_Seeds_cDNA_P Parameter: Tissue Value: Germinating Seeds
  misc_feature: MA Experiment ID: 108488 Result: Up-regulated in Transcription
  misc_feature: MA Experiment ID: 108561 Result: Down-regulated in Transcription
  misc_feature: MA Experiment 108561 PARAMETER Experiment Name: At_100uM_ABA_cDNA_P Parameter: Timepoint (hr) Value: 6
  misc_feature: MA Experiment 108561 PARAMETER Experiment Name: At_100uM_ABA_cDNA_P Parameter: Tissue Value: Aerial
  misc_feature: MA Experiment 108561 PARAMETER Experiment Name: At_100uM_ABA_cDNA_P Parameter: Treatment Value: 100uM ABA vs. No Treatment
  misc_feature: MA Experiment ID: 108572 Result: Down-regulated in Transcription
  misc_feature: MA Experiment 108572 PARAMETER Experiment Name: At_Drought_cDNA_P Parameter: Timepoint (hr) Value: 1
  misc_feature: MA Experiment 108572 PARAMETER Experiment Name: At_Drought_cDNA_P Parameter: Tissue Value: Aerial
  misc_feature: MA Experiment 108572 PARAMETER Experiment Name: At_Drought_cDNA_P Parameter: Treatment Value: Drought vs. No Drought
  misc_feature: MA Experiment ID: 108573 Result: Down-regulated in Transcription
  misc_feature: MA Experiment 108573 PARAMETER Experiment Name: At_Drought_cDNA_P Parameter: Timepoint (hr) Value: 6
  misc_feature: MA Experiment 108573 PARAMETER Experiment Name: At_Drought_cDNA_P Parameter: Tissue Value: Aerial
  misc_feature: MA Experiment 108573 PARAMETER Experiment Name: At_Drought_cDNA_P Parameter: Treatment Value: Drought vs. No Drought
  misc_feature: MA Experiment ID: 108595 Result: Down-regulated in Transcription
  misc_feature: MA Experiment 108595 PARAMETER Experiment Name: At_Ler-pi_Ovule_cDNA_P Parameter: Plant Line Value: null
  misc_feature: MA Experiment ID: 108605 Result: Down-regulated in Transcription
  misc_feature: MA Experiment 108605 PARAMETER Experiment Name: At_100uM_ABA_cDNA_P Parameter: Timepoint (hr) Value: 6
  misc_feature: MA Experiment 108605 PARAMETER Experiment Name: At_100uM_ABA_cDNA_P Parameter: Tissue Value: Aerial
  misc_feature: MA Experiment 108605 PARAMETER Experiment Name: At_100uM_ABA_cDNA_P Parameter: Treatment Value: 100uM ABA vs. No Treatment
  misc_feature: MA Experiment ID: 108607 Result: Down-regulated in Transcription
  misc_feature: MA Experiment 108607 PARAMETER Experiment Name: At_100uM_ABA_cDNA_P Parameter: Timepoint (hr) Value: 4
  misc_feature: MA Experiment 108607 PARAMETER Experiment Name: At_100uM_ABA_cDNA_P Parameter: Tissue Value: Aerial
  misc_feature: MA Experiment 108607 PARAMETER Experiment Name: At_100uM_ABA_cDNA_P Parameter: Treatment Value: 100uM ABA vs. No Treatment
  misc_feature: MA Experiment ID: 108608 Result: Down-regulated in Transcription
  misc_feature: MA Experiment 108608 PARAMETER Experiment Name: At_100uM_ABA_cDNA_P Parameter: Timepoint (hr) Value: 1
  misc_feature: MA Experiment 108608 PARAMETER Experiment Name: At_100uM_ABA_cDNA_P Parameter: Tissue Value: Aerial
  misc_feature: MA Experiment 108608 PARAMETER Experiment Name: At_100uM_ABA_cDNA_P Parameter: Treatment Value: 100uM ABA vs. No Treatment
  misc_feature: MA Experiment ID: 108609 Result: Down-regulated in Transcription
  misc_feature: MA Experiment 108609 PARAMETER Experiment Name: At_100uM_ABA_cDNA_P Parameter: Timepoint (hr) Value: 24
  misc_feature: MA Experiment 108609 PARAMETER Experiment Name: At_100uM_ABA_cDNA_P Parameter: Tissue Value: Aerial
  misc_feature: MA Experiment 108609 PARAMETER Experiment Name: At_100uM_ABA_cDNA_P Parameter: Treatment Value: 100uM ABA vs. No Treatment
  misc_feature: MA Experiment ID: 20000069 Result: Down-regulated in Transcription
  misc_feature: MA Experiment 20000069 PARAMETER Experiment Name: At_100uM_ABA_Mutants_cDNA_P Parameter: Plant Line Value: CS23
  misc_feature: MA Experiment 20000069 PARAMETER Experiment Name: At_100uM_ABA_Mutants_cDNA_P Parameter: Timepoint (hr) Value: 6
  misc_feature: MA Experiment 20000069 PARAMETER Experiment Name: At_100uM_ABA_Mutants_cDNA_P Parameter: Tissue Value: Aerial
  misc_feature: MA Experiment 20000069 PARAMETER Experiment Name: At_100uM_ABA_Mutants_cDNA_P Parameter: Treatment Value: 100uM ABA vs. No Treatment
  misc_feature: MA Experiment ID: 20000070 Result: Down-regulated in Transcription
  misc_feature: MA Experiment 20000070 PARAMETER Experiment Name: At_100uM_ABA_Mutants_cDNA_P Parameter: Plant Line Value: CS24
  misc_feature: MA Experiment 20000070 PARAMETER Experiment Name: At_100uM_ABA_Mutants_cDNA_P Parameter: Timepoint (hr) Value: 6
  misc_feature: MA Experiment 20000070 PARAMETER Experiment Name: At_100uM_ABA_Mutants_cDNA_P Parameter: Tissue Value: Aerial
  misc_feature: MA Experiment 20000070 PARAMETER Experiment Name: At_100uM_ABA_Mutants_cDNA_P Parameter: Treatment Value: 100uM ABA vs. No Treatment
  misc_feature: MA Experiment ID: 20000071 Result: Down-regulated in Transcription
  misc_feature: MA Experiment 20000071 PARAMETER Experiment Name: At_100uM_ABA_Mutants_cDNA_P Parameter: Plant Line Value: CS8104
  misc_feature: MA Experiment 20000071 PARAMETER Experiment Name: At_100uM_ABA_Mutants_cDNA_P Parameter: Timepoint (hr) Value: 6
  misc_feature: MA Experiment 20000071 PARAMETER Experiment Name: At_100uM_ABA_Mutants_cDNA_P Parameter: Tissue Value: Aerial
  misc_feature: MA Experiment 20000071 PARAMETER Experiment Name: At_100uM_ABA_Mutants_cDNA_P Parameter: Treatment Value: 100uM ABA vs. No Treatment
  misc_feature: MA Experiment ID: 20000072 Result: Down-regulated in Transcription
  misc_feature: MA Experiment 20000072 PARAMETER Experiment Name: At_100uM_ABA_Mutants_cDNA_P Parameter: Plant Line Value: CS8105
  misc_feature: MA Experiment 20000072 PARAMETER Experiment Name: At_100uM_ABA_Mutants_cDNA_P Parameter: Timepoint (hr) Value: 6
  misc_feature: MA Experiment 20000072 PARAMETER Experiment Name: At_100uM_ABA_Mutants_cDNA_P Parameter: Tissue Value: Aerial
  misc_feature: MA Experiment 20000072 PARAMETER Experiment Name: At_100uM_ABA_Mutants_cDNA_P Parameter: Treatment Value: 100uM ABA vs. No Treatment
  misc_feature: MA Experiment ID: 20000086 Result: Down-regulated in Transcription
  misc_feature: MA Experiment 20000086 PARAMETER Experiment Name: At_100uM_ABA_Mutants_cDNA_P Parameter: Plant Line Value: CS22
  misc_feature: MA Experiment 20000086 PARAMETER Experiment Name: At_100uM_ABA_Mutants_cDNA_P Parameter: Timepoint (hr) Value: 6
  misc_feature: MA Experiment 20000086 PARAMETER Experiment Name: At_100uM_ABA_Mutants_cDNA_P Parameter: Tissue Value: Aerial
  misc_feature: MA Experiment 20000086 PARAMETER Experiment Name: At_100uM_ABA_Mutants_cDNA_P Parameter: Treatment Value: 100uM ABA vs. No Treatment
  misc_feature: MA Experiment ID: 20000087 Result: Down-regulated in Transcription
  misc_feature: MA Experiment 20000087 PARAMETER Experiment Name: At_100uM_ABA_Mutants_cDNA_P Parameter: Plant Line Value: WS
  misc_feature: MA Experiment 20000087 PARAMETER Experiment Name: At_100uM_ABA_Mutants_cDNA_P Parameter: Timepoint (hr) Value: 6
  misc_feature: MA Experiment 20000087 PARAMETER Experiment Name: At_100uM_ABA_Mutants_cDNA_P Parameter: Tissue Value: Aerial
  misc_feature: MA Experiment 20000087 PARAMETER Experiment Name: At_100uM_ABA_Mutants_cDNA_P Parameter: Treatment Value: 100uM ABA vs. No Treatment
  misc_feature: MA Experiment ID: 20000088 Result: Down-regulated in Transcription
  misc_feature: MA Experiment 20000088 PARAMETER Experiment Name: At_100uM_ABA_Mutants_cDNA_P Parameter: Plant Line Value: Landsberg
  misc_feature: MA Experiment 20000088 PARAMETER Experiment Name: At_100uM_ABA_Mutants_cDNA_P Parameter: Timepoint (hr) Value: 6
  misc_feature: MA Experiment 20000088 PARAMETER Experiment Name: At_100uM_ABA_Mutants_cDNA_P Parameter: Tissue Value: Aerial
  misc_feature: MA Experiment 20000088 PARAMETER Experiment Name: At_100uM_ABA_Mutants_cDNA_P Parameter: Treatment Value: 100uM ABA vs. No Treatment
  misc_feature: MA Experiment ID: 20000117 Result: Down-regulated in Transcription
  misc_feature: MA Experiment 20000117 PARAMETER Experiment Name: At_100uM_ABA_Mutants_cDNA_P Parameter: Plant Line Value: Columbia
  misc_feature: MA Experiment 20000117 PARAMETER Experiment Name: At_100uM_ABA_Mutants_cDNA_P Parameter: Timepoint (hr) Value: 6
  misc_feature: MA Experiment 20000117 PARAMETER Experiment Name: At_100uM_ABA_Mutants_cDNA_P Parameter: Tissue Value: Aerial
  misc_feature: MA Experiment 20000117 PARAMETER Experiment Name: At_100uM_ABA_Mutants_cDNA_P Parameter: Treatment Value: 100uM ABA vs. No Treatment
  misc_feature: MA Experiment ID: 20000166 Result: Down-regulated in Transcription
  misc_feature: MA Experiment 20000166 PARAMETER Experiment Name: At_100uM_ABA_P Parameter: Age (day) Value: 14
  misc_feature: MA Experiment 20000166 PARAMETER Experiment Name: At_100uM_ABA_P Parameter: Organism Value: A. thaliana
  misc_feature: MA Experiment 20000166 PARAMETER Experiment Name: At_100uM_ABA_P Parameter: Plant Line Value: WS
  misc_feature: MA Experiment 20000166 PARAMETER Experiment Name: At_100uM_ABA_P Parameter: Timepoint (hr) Value: 1
  misc_feature: MA Experiment 20000166 PARAMETER Experiment Name: At_100uM_ABA_P Parameter: Tissue Value: Aerial
  misc_feature: MA Experiment 20000166 PARAMETER Experiment Name: At_100uM_ABA_P Parameter: Treatment Value: 100uM ABA vs. No Treatment
  misc_feature: MA Experiment ID: 20000169 Result: Down-regulated in Transcription
  misc_feature: MA Experiment 20000169 PARAMETER Experiment Name: At_100uM_ABA_P Parameter: Age (day) Value: 14
  misc_feature: MA Experiment 20000169 PARAMETER Experiment Name: At_100uM_ABA_P Parameter: Organism Value: A. thaliana
  misc_feature: MA Experiment 20000169 PARAMETER Experiment Name: At_100uM_ABA_P Parameter: Plant Line Value: WS
  misc_feature: MA Experiment 20000169 PARAMETER Experiment Name: At_100uM_ABA_P Parameter: Timepoint (hr) Value: 6
  misc_feature: MA Experiment 20000169 PARAMETER Experiment Name: At_100uM_ABA_P Parameter: Tissue Value: Aerial
  misc_feature: MA Experiment 20000169 PARAMETER Experiment Name: At_100uM_ABA_P Parameter: Treatment Value: 100uM ABA vs. No Treatment
  misc_feature: MA Experiment ID: 20000179 Result: Up-regulated in Transcription
  misc_feature: MA Experiment 20000179 PARAMETER Experiment Name: At_Germinating_Seeds_P Parameter: Age (hr) Value: 6 vs. 0
  misc_feature: MA Experiment 20000179 PARAMETER Experiment Name: At_Germinating_Seeds_P Parameter: Tissue Value: Germinating Seeds
  misc_feature: MA Experiment ID: 20000180 Result: Up-regulated in Transcription
  misc_feature: MA Experiment 20000180 PARAMETER Experiment Name: At_Germinating_Seeds_P Parameter: Age (hr) Value: 24 vs. 0
  misc_feature: MA Experiment 20000180 PARAMETER Experiment Name: At_Germinating_Seeds_P Parameter: Tissue Value: Germinating Seeds
  misc_feature: MA Experiment ID: 20000185 Result: Down-regulated in Transcription
  misc_feature: MA Experiment 20000185 PARAMETER Experiment Name: At_Roots__P Parameter: Age (day) Value: 7 vs. 21
  misc_feature: MA Experiment 20000185 PARAMETER Experiment Name: At_Roots__P Parameter: Organism Value: A. thaliana
  misc_feature: MA Experiment 20000185 PARAMETER Experiment Name: At_Roots__P Parameter: Tissue Value: Roots vs. Whole Plant
  misc_feature: MA Experiment ID: 20000234 Result: Down-regulated in Transcription
  misc_feature: MA Experiment 20000234 PARAMETER Experiment Name: At_Siliques_P Parameter: Age (day) Value: 21
  misc_feature: MA Experiment 20000234 PARAMETER Experiment Name: At_Siliques_P Parameter: Organism Value: A. thaliana
  misc_feature: MA Experiment 20000234 PARAMETER Experiment Name: At_Siliques_P Parameter: Plant Line Value: WS
  misc_feature: MA Experiment 20000234 PARAMETER Experiment Name: At_Siliques_P Parameter: Tissue Value: Less Than 5mm Siliques vs. Whole Plant
  misc_feature: MA Experiment ID: 20000264 Result: Down-regulated in Transcription
  misc_feature: MA Experiment 20000264 PARAMETER Experiment Name: At_Open_Flower_P Parameter: Age (day) Value: 21
  misc_feature: MA Experiment 20000264 PARAMETER Experiment Name: At_Open_Flower_P Parameter: Plant Line Value: WS
  misc_feature: MA Experiment 20000264 PARAMETER Experiment Name: At_Open_Flower_P Parameter: Tissue Value: Open Flower vs. Whole Plant
  misc_feature: MA Experiment ID: 20000265 Result: Down-regulated in Transcription
  misc_feature: MA Experiment 20000265 PARAMETER Experiment Name: At_Open_Flower_P Parameter: Age (day) Value: 21
  misc_feature: MA Experiment 20000265 PARAMETER Experiment Name: At_Open_Flower_P Parameter: Plant Line Value: WS
  misc_feature: MA Experiment 20000265 PARAMETER Experiment Name: At_Open_Flower_P Parameter: Tissue Value: Closed Flower vs. Whole Plant
  misc_feature: MA Experiment ID: 20000286 Result: Down-regulated in Transcription
  misc_feature: MA Experiment 20000286 PARAMETER Experiment Name: At_Open_Flower_P Parameter: Age (day) Value: 21
  misc_feature: MA Experiment 20000286 PARAMETER Experiment Name: At_Open_Flower_P Parameter: Plant Line Value: WS
  misc_feature: MA Experiment 20000286 PARAMETER Experiment Name: At_Open_Flower_P Parameter: Tissue Value: Half Open vs. Whole Plant
  misc_feature: MA Experiment ID: 20000436 Result: Down-regulated in Transcription
  misc_feature: MA Experiment 20000436 PARAMETER Experiment Name: At_Drought_P Parameter: Age (day) Value: 7
  misc_feature: MA Experiment 20000436 PARAMETER Experiment Name: At_Drought_P Parameter: Organism Value: A. thaliana
  misc_feature: MA Experiment 20000436 PARAMETER Experiment Name: At_Drought_P Parameter: Plant Line Value: WS
  misc_feature: MA Experiment 20000436 PARAMETER Experiment Name: At_Drought_P Parameter: Timepoint (hr) Value: 12
  misc_feature: MA Experiment 20000436 PARAMETER Experiment Name: At_Drought_P Parameter: Tissue Value: Whole Plant
  misc_feature: MA Experiment 20000436 PARAMETER Experiment Name: At_Drought_P Parameter: Treatment Value: Drought vs. No Drought
  misc_feature: MA Experiment ID: 20000437 Result: Down-regulated in Transcription
  misc_feature: MA Experiment 20000437 PARAMETER Experiment Name: At_Drought_P Parameter: Age (day) Value: 8
  misc_feature: MA Experiment 20000437 PARAMETER Experiment Name: At_Drought_P Parameter: Organism Value: A. thaliana
  misc_feature: MA Experiment 20000437 PARAMETER Experiment Name: At_Drought_P Parameter: Plant Line Value: WS
  misc_feature: MA Experiment 20000437 PARAMETER Experiment Name: At_Drought_P Parameter: Timepoint (hr) Value: 24
  misc_feature: MA Experiment 20000437 PARAMETER Experiment Name: At_Drought_P Parameter: Tissue Value: Whole Plant
  misc_feature: MA Experiment 20000437 PARAMETER Experiment Name: At_Drought_P Parameter: Treatment Value: Drought vs. No Drought
  misc_feature: MA Experiment ID: 20000439 Result: Down-regulated in Transcription
  misc_feature: MA Experiment 20000439 PARAMETER Experiment Name: At_Roots__P Parameter: Age (day) Value: 14 vs. 21
  misc_feature: MA Experiment 20000439 PARAMETER Experiment Name: At_Roots__P Parameter: Organism Value: A. thaliana
  misc_feature: MA Experiment 20000439 PARAMETER Experiment Name: At_Roots__P Parameter: Tissue Value: Roots vs. Whole Plant
  misc_feature: MA Experiment ID: 20000441 Result: Up-regulated in Transcription
  misc_feature: MA Experiment 20000441 PARAMETER Experiment Name: At_1uM_BR-BRZ__P Parameter: Tissue Value: Shoot Apices
  misc_feature: MA Experiment 20000441 PARAMETER Experiment Name: At_1uM_BR-BRZ__P Parameter: Treatment Value: 1uM BR vs. No Treatment
  misc_feature: MA Experiment ID: 20000443 Result: Up-regulated in Transcription
  misc_feature: MA Experiment 20000443 PARAMETER Experiment Name: At_1uM_BR-BRZ__P Parameter: Tissue Value: Shoot Apices
  misc_feature: MA Experiment 20000443 PARAMETER Experiment Name: At_1uM_BR-BRZ__P Parameter: Treatment Value: 1uM BRZ vs. No Treatment
  misc_feature: MA Experiment ID: 20000453 Result: Down-regulated in Transcription
  misc_feature: MA Experiment 20000453 PARAMETER Experiment Name: At_100uM_ABA_P Parameter: Age (day) Value: 15
  misc_feature: MA Experiment 20000453 PARAMETER Experiment Name: At_100uM_ABA_P Parameter: Organism Value: A. thaliana
  misc_feature: MA Experiment 20000453 PARAMETER Experiment Name: At_100uM_ABA_P Parameter: Plant Line Value: WS
  misc_feature: MA Experiment 20000453 PARAMETER Experiment Name: At_100uM_ABA_P Parameter: Timepoint (hr) Value: 24
  misc_feature: MA Experiment 20000453 PARAMETER Experiment Name: At_100uM_ABA_P Parameter: Tissue Value: Aerial
  misc_feature: MA Experiment 20000453 PARAMETER Experiment Name: At_100uM_ABA_P Parameter: Treatment Value: 100uM ABA vs. No Treatment
  misc_feature: MA Experiment ID: 20000495 Result: Down-regulated in Transcription
  misc_feature: MA Experiment 20000495 PARAMETER Experiment Name: At_Guard_Cells_P Parameter: Harvest Date Value: 8/2/2002
  misc_feature: MA Experiment 20000495 PARAMETER Experiment Name: At_Guard_Cells_P Parameter: Organism Value: A. thaliana
  misc_feature: MA Experiment 20000495 PARAMETER Experiment Name: At_Guard_Cells_P Parameter: Tissue Value: Guard Cells vs. Leaves
  misc_feature: MA Experiment ID: 20000576 Result: Down-regulated in Transcription
  misc_feature: MA Experiment 20000576 PARAMETER Experiment Name: At_100uM_ABA_Mutants__P Parameter: Organism Value: A. thaliana
  misc_feature: MA Experiment 20000576 PARAMETER Experiment Name: At_100uM_ABA_Mutants__P Parameter: Plant Line Value: CS23
  misc_feature: MA Experiment 20000576 PARAMETER Experiment Name: At_100uM_ABA_Mutants__P Parameter: Timepoint (hr) Value: 6
  misc_feature: MA Experiment 20000576 PARAMETER Experiment Name: At_100uM_ABA_Mutants__P Parameter: Tissue Value: Whole Plant
  misc_feature: MA Experiment 20000576 PARAMETER Experiment Name: At_100uM_ABA_Mutants__P Parameter: Treatment Value: 1uM ABA vs. No Treatment
  misc_feature: MA Experiment ID: 20000794 Result: Down-regulated in Transcription
  misc_feature: MA Experiment 20000794 PARAMETER Experiment Name: At_Petals_P Parameter: Age (day) Value: 23-25 days
  misc_feature: MA Experiment 20000794 PARAMETER Experiment Name: At_Petals_P Parameter: Plant Line Value: WS
  misc_feature: MA Experiment 20000794 PARAMETER Experiment Name: At_Petals_P Parameter: Tissue Value: Petals vs. Whole plant
  misc_feature: MA Experiment ID: 20001248 Result: Down-regulated in Transcription
  misc_feature: MA Experiment 20001248 PARAMETER Experiment Name: At_Far-red-induction_P Parameter: Age (day) Value: 7
  misc_feature: MA Experiment 20001248 PARAMETER Experiment Name: At_Far-red-induction_P Parameter: Light Value: Far-red vs. White
  misc_feature: MA Experiment 20001248 PARAMETER Experiment Name: At_Far-red-induction_P Parameter: Organism Value: A. thaliana
  misc_feature: MA Experiment 20001248 PARAMETER Experiment Name: At_Far-red-induction_P Parameter: Plant Line Value: Columbia
  misc_feature: MA Experiment 20001248 PARAMETER Experiment Name: At_Far-red-induction_P Parameter: Timepoint (hr) Value: 4
  misc_feature: MA Experiment 20001248 PARAMETER Experiment Name: At_Far-red-induction_P Parameter: Tissue Value: Whole Plant
  misc_feature: MA Experiment ID: 20001450 Result: Down-regulated in Transcription
  misc_feature: MA Experiment 20001450 PARAMETER Experiment Name: At_Far-red-induction_P Parameter: Age (day) Value: 7
  misc_feature: MA Experiment 20001450 PARAMETER Experiment Name: At_Far-red-induction_P Parameter: Light Value: Far-red vs. White
  misc_feature: MA Experiment 20001450 PARAMETER Experiment Name: At_Far-red-induction_P Parameter: Organism Value: A. thaliana
  misc_feature: MA Experiment 20001450 PARAMETER Experiment Name: At_Far-red-induction_P Parameter: Plant Line Value: Columbia
  misc_feature: MA Experiment 20001450 PARAMETER Experiment Name: At_Far-red-induction_P Parameter: Timepoint (hr) Value: 8
  misc_feature: MA Experiment 20001450 PARAMETER Experiment Name: At_Far-red-induction_P Parameter: Tissue Value: Whole Plant
  misc_feature: MA Experiment ID: 20001451 Result: Down-regulated in Transcription
  misc_feature: MA Experiment 20001451 PARAMETER Experiment Name: At_Far-red-induction_P Parameter: Age (day) Value: 7
  misc_feature: MA Experiment 20001451 PARAMETER Experiment Name: At_Far-red-induction_P Parameter: Light Value: Far-red vs. White
  misc_feature: MA Experiment 20001451 PARAMETER Experiment Name: At_Far-red-induction_P Parameter: Organism Value: A. thaliana
  misc_feature: MA Experiment 20001451 PARAMETER Experiment Name: At_Far-red-induction_P Parameter: Plant Line Value: Columbia
  misc_feature: MA Experiment 20001451 PARAMETER Experiment Name: At_Far-red-induction_P Parameter: Timepoint (hr) Value: 24
  misc_feature: MA Experiment 20001451 PARAMETER Experiment Name: At_Far-red-induction_P Parameter: Tissue Value: Whole Plant
  misc_feature: MA Experiment ID: 20001555 Result: Down-regulated in Transcription
  misc_feature: MA Experiment 20001555 PARAMETER Experiment Name: At_Drought_Soil_Dry_P Parameter: Age (day) Value: 24
  misc_feature: MA Experiment 20001555 PARAMETER Experiment Name: At_Drought_Soil_Dry_P Parameter: Organism Value: A. thaliana
  misc_feature: MA Experiment 20001555 PARAMETER Experiment Name: At_Drought_Soil_Dry_P Parameter: Plant Line Value: WS
  misc_feature: MA Experiment 20001555 PARAMETER Experiment Name: At_Drought_Soil_Dry_P Parameter: Post Timepoint (hr) Value: None
  misc_feature: MA Experiment 20001555 PARAMETER Experiment Name: At_Drought_Soil_Dry_P Parameter: Post-Treatment Value: None
  misc_feature: MA Experiment 20001555 PARAMETER Experiment Name: At_Drought_Soil_Dry_P Parameter: Timepoint (day) Value: 10
  misc_feature: MA Experiment 20001555 PARAMETER Experiment Name: At_Drought_Soil_Dry_P Parameter: Treatment Value: Drought vs. No Drought
  misc_feature: MA Experiment ID: 20001556 Result: Down-regulated in Transcription
  misc_feature: MA Experiment 20001556 PARAMETER Experiment Name: At_Drought_Soil_Dry_P Parameter: Age (day) Value: 26
  misc_feature: MA Experiment 20001556 PARAMETER Experiment Name: At_Drought_Soil_Dry_P Parameter: Organism Value: A. thaliana
  misc_feature: MA Experiment 20001556 PARAMETER Experiment Name: At_Drought_Soil_Dry_P Parameter: Plant Line Value: WS
  misc_feature: MA Experiment 20001556 PARAMETER Experiment Name: At_Drought_Soil_Dry_P Parameter: Post Timepoint (hr) Value: None
  misc_feature: MA Experiment 20001556 PARAMETER Experiment Name: At_Drought_Soil_Dry_P Parameter: Post-Treatment Value: None
  misc_feature: MA Experiment 20001556 PARAMETER Experiment Name: At_Drought_Soil_Dry_P Parameter: Timepoint (day) Value: 12
  misc_feature: MA Experiment 20001556 PARAMETER Experiment Name: At_Drought_Soil_Dry_P Parameter: Treatment Value: Drought vs. No Drought
  misc_feature: MA Experiment ID: 20001559 Result: Down-regulated in Transcription
  misc_feature: MA Experiment 20001559 PARAMETER Experiment Name: At_Drought_Soil_Dry_P Parameter: Age (day) Value: 28
  misc_feature: MA Experiment 20001559 PARAMETER Experiment Name: At_Drought_Soil_Dry_P Parameter: Organism Value: A. thaliana
  misc_feature: MA Experiment 20001559 PARAMETER Experiment Name: At_Drought_Soil_Dry_P Parameter: Plant Line Value: WS
  misc_feature: MA Experiment 20001559 PARAMETER Experiment Name: At_Drought_Soil_Dry_P Parameter: Post Timepoint (hr) Value: 29
  misc_feature: MA Experiment 20001559 PARAMETER Experiment Name: At_Drought_Soil_Dry_P Parameter: Post-Treatment Value: Re-Water vs. No Drought
  misc_feature: MA Experiment 20001559 PARAMETER Experiment Name: At_Drought_Soil_Dry_P Parameter: Timepoint (day) Value: 14
  misc_feature: MA Experiment 20001559 PARAMETER Experiment Name: At_Drought_Soil_Dry_P Parameter: Treatment Value: Drought vs. No Drought
  misc_feature: MA Experiment ID: 20001560 Result: Down-regulated in Transcription
  misc_feature: MA Experiment 20001560 PARAMETER Experiment Name: At_Drought_Soil_Dry_P Parameter: Age (day) Value: 28
  misc_feature: MA Experiment 20001560 PARAMETER Experiment Name: At_Drought_Soil_Dry_P Parameter: Organism Value: A. thaliana
  misc_feature: MA Experiment 20001560 PARAMETER Experiment Name: At_Drought_Soil_Dry_P Parameter: Plant Line Value: WS
  misc_feature: MA Experiment 20001560 PARAMETER Experiment Name: At_Drought_Soil_Dry_P Parameter: Post Timepoint (hr) Value: None
  misc_feature: MA Experiment 20001560 PARAMETER Experiment Name: At_Drought_Soil_Dry_P Parameter: Post-Treatment Value: None
  misc_feature: MA Experiment 20001560 PARAMETER Experiment Name: At_Drought_Soil_Dry_P Parameter: Timepoint (day) Value: 14
  misc_feature: MA Experiment 20001560 PARAMETER Experiment Name: At_Drought_Soil_Dry_P Parameter: Treatment Value: Drought vs. No Drought
  misc_feature: MA Experiment ID: 20001757 Result: Up-regulated in Transcription
  misc_feature: MA Experiment 20001757 PARAMETER Experiment Name: At_50mM_NH4NO3_L-to-H_P Parameter: Timepoint (hr) Value: 6
  misc_feature: MA Experiment 20001757 PARAMETER Experiment Name: At_50mM_NH4NO3_L-to-H_P Parameter: Tissue Value: Leaf
  misc_feature: MA Experiment 20001757 PARAMETER Experiment Name: At_50mM_NH4NO3_L-to-H_P Parameter: Treatment Value: 50mM NH4NO3 vs 100mM Mannitol
  misc_feature: MA Experiment ID: 20001904 Result: Down-regulated in Transcription
  misc_feature: MA Experiment 20001904 PARAMETER Experiment Name: At_Drought_Reproduction_P Parameter: Age (day) Value: 37
  misc_feature: MA Experiment 20001904 PARAMETER Experiment Name: At_Drought_Reproduction_P Parameter: Organism Value: A. thaliana
  misc_feature: MA Experiment 20001904 PARAMETER Experiment Name: At_Drought_Reproduction_P Parameter: Plant Line Value: WS
  misc_feature: MA Experiment 20001904 PARAMETER Experiment Name: At_Drought_Reproduction_P Parameter: Timepoint (day) Value: 7
  misc_feature: MA Experiment 20001904 PARAMETER Experiment Name: At_Drought_Reproduction_P Parameter: Tissue Value: Rosettes
  misc_feature: MA Experiment 20001904 PARAMETER Experiment Name: At_Drought_Reproduction_P Parameter: Treatment Value: Drought vs. No Drought
  misc_feature: MA Experiment ID: 20001905 Result: Down-regulated in Transcription
  misc_feature: MA Experiment 20001905 PARAMETER Experiment Name: At_Drought_Reproduction_P Parameter: Age (day) Value: 40
  misc_feature: MA Experiment 20001905 PARAMETER Experiment Name: At_Drought_Reproduction_P Parameter: Organism Value: A. thaliana
  misc_feature: MA Experiment 20001905 PARAMETER Experiment Name: At_Drought_Reproduction_P Parameter: Plant Line Value: WS
  misc_feature: MA Experiment 20001905 PARAMETER Experiment Name: At_Drought_Reproduction_P Parameter: Timepoint (day) Value: 10
  misc_feature: MA Experiment 20001905 PARAMETER Experiment Name: At_Drought_Reproduction_P Parameter: Tissue Value: Rosettes
  misc_feature: MA Experiment 20001905 PARAMETER Experiment Name: At_Drought_Reproduction_P Parameter: Treatment Value: Drought vs. No Drought
  misc_feature: MA Experiment ID: 20001906 Result: Down-regulated in Transcription
  misc_feature: MA Experiment 20001906 PARAMETER Experiment Name: At_Drought_Reproduction_P Parameter: Age (day) Value: 35
  misc_feature: MA Experiment 20001906 PARAMETER Experiment Name: At_Drought_Reproduction_P Parameter: Organism Value: A. thaliana
  misc_feature: MA Experiment 20001906 PARAMETER Experiment Name: At_Drought_Reproduction_P Parameter: Plant Line Value: WS
  misc_feature: MA Experiment 20001906 PARAMETER Experiment Name: At_Drought_Reproduction_P Parameter: Timepoint (day) Value: 5
  misc_feature: MA Experiment 20001906 PARAMETER Experiment Name: At_Drought_Reproduction_P Parameter: Tissue Value: Siliques
  misc_feature: MA Experiment 20001906 PARAMETER Experiment Name: At_Drought_Reproduction_P Parameter: Treatment Value: Drought vs. No Drought
  misc_feature: MA Experiment ID: 20001907 Result: Down-regulated in Transcription
  misc_feature: MA Experiment 20001907 PARAMETER Experiment Name: At_Drought_Reproduction_P Parameter: Age (day) Value: 37
  misc_feature: MA Experiment 20001907 PARAMETER Experiment Name: At_Drought_Reproduction_P Parameter: Organism Value: A. thaliana
  misc_feature: MA Experiment 20001907 PARAMETER Experiment Name: At_Drought_Reproduction_P Parameter: Plant Line Value: WS
  misc_feature: MA Experiment 20001907 PARAMETER Experiment Name: At_Drought_Reproduction_P Parameter: Timepoint (day) Value: 7
  misc_feature: MA Experiment 20001907 PARAMETER Experiment Name: At_Drought_Reproduction_P Parameter: Tissue Value: Siliques
  misc_feature: MA Experiment 20001907 PARAMETER Experiment Name: At_Drought_Reproduction_P Parameter: Treatment Value: Drought vs. No Drought
  misc_feature: MA Experiment ID: 20001911 Result: Down-regulated in Transcription
  misc_feature: MA Experiment 20001911 PARAMETER Experiment Name: At_Drought_Reproduction_P Parameter: Age (day) Value: 40
  misc_feature: MA Experiment 20001911 PARAMETER Experiment Name: At_Drought_Reproduction_P Parameter: Organism Value: A. thaliana
  misc_feature: MA Experiment 20001911 PARAMETER Experiment Name: At_Drought_Reproduction_P Parameter: Plant Line Value: WS
  misc_feature: MA Experiment 20001911 PARAMETER Experiment Name: At_Drought_Reproduction_P Parameter: Timepoint (day) Value: 10
  misc_feature: MA Experiment 20001911 PARAMETER Experiment Name: At_Drought_Reproduction_P Parameter: Tissue Value: Flowers
  misc_feature: MA Experiment 20001911 PARAMETER Experiment Name: At_Drought_Reproduction_P Parameter: Treatment Value: Drought vs. No Drought
aaaaagtacgaaaggaaaatatgagtgaggagaagaggaagcaacacttcgtgctagtacatggtgcgtgccacggcgcatggtgctggtacaaggttaagcctcttctcgaggctttgggccatcgtgtaaccgccttagacctagctgcttccggtatagacacaaccaggtcaatcactgacatttctacatgtgaacaatattctgagccattgatgcagctaatgacttcattgccgaatgatgagaaggttgtactcgttggtcatagctttggaggtttgagtttagccttagccatggataagtttcccgataaaatctctgtctctgtcttcgtgactgcattcatgcccgacaccaaacactcaccatcgttcgtcgaggaaaagtttgcaagcagcatgacaccagaaggatggatgggctctgagctcgagacatatggttcagataattccggcttgtctgtgttcttcagcaccgacttcatgaagcaccgtctctaccaactttctcctgtggaggatcttgagcttggattgcttctaaagaggcctagttcattgtttattaatgaattatcgaagatggagaacttttctgagaaagggtatggatctgttcctcgagcttacattgtgtgcaaagaggacaacattatctcggaagaccatcaacgatggatgatccataattatccggcgaatttagtgattgagatggaagagactgatcatatgccaatgttttgcaaacctcaactactaagtgaccatctattggcaatcgctgacaatttctgttaaataatattttgatgaaaatgtatttggagtggatacaatcaaacgtgttctaaaatggatcttcataaaggttcaaacttatttcttagttcttactatggttgaaatgagaaacctaagtcaatct

SEQ ID NO: 99870 - protein, 269 aa, Arabidopsis thaliana; identical to SEQ ID NO: 36075
  peptide (1)..(269): Ceres Seq. ID no. 13603822
  misc_feature (41)..(263): Pfam Name: alpha/beta hydrolase fold Pfam Description: alpha/beta hydrolase fold
  misc_feature (7)..(269): Homolog of NCBI NO: 15227863 NR Description: hydrolase, alpha/beta fold family [Arabidopsis
  misc_feature (7)..(268): Homolog of NCBI NO: 21554666 NR Description: putative acetone-cyanohydrin lyase [Arabidopsis
  misc_feature (7)..(268): Homolog of NCBI NO: 15227867 NR Description: esterase, putative [Arabidopsis thaliana]
  misc_feature (7)..(268): Homolog of NCBI NO: 27754457 NR Description: putative acetone-cyanohydrin lyase [Arabidopsis
  misc_feature (8)..(268): Homolog of NCBI NO: 15227861 NR Description: hydrolase, alpha/beta fold family [Arabidopsis
  misc_feature (7)..(268): Homolog of NCBI NO: 15227865 NR Description: esterase, putative [Arabidopsis thaliana]
  misc_feature (13)..(265): Homolog of NCBI NO: 14279437 NR Description: ethylene-induced esterase [Citrus sinensis]
  misc_feature (11)..(268): Homolog of NCBI NO: 40549303 NR Description: salicylic acid-binding protein 2 [Nicotiana
  misc_feature (14)..(268): Homolog of NCBI NO: 15235445 NR Description: hydrolase, alpha/beta fold family [Arabidopsis
  misc_feature (9)..(265): Homolog of NCBI NO: 15227859 NR Description: hydrolase, alpha/beta fold family [Arabidopsis

SEQ ID NO: 99871 - protein, 263 aa, Arabidopsis thaliana; identical to SEQ ID NO: 36076
  peptide (1)..(263): Ceres Seq. ID no. 13603823
  misc_feature (35)..(257): Pfam Name: alpha/beta hydrolase fold Pfam Description: alpha/beta hydrolase fold
  misc_feature (1)..(263): Homolog of NCBI NO: 15227863 NR Description: hydrolase, alpha/beta fold family [Arabidopsis
  misc_feature (1)..(262): Homolog of NCBI NO: 21554666 NR Description: putative acetone-cyanohydrin lyase [Arabidopsis
  misc_feature (1)..(262): Homolog of NCBI NO: 15227867 NR Description: esterase, putative [Arabidopsis thaliana]
  misc_feature (1)..(262): Homolog of NCBI NO: 27754457 NR Description: putative acetone-cyanohydrin lyase [Arabidopsis
  misc_feature (2)..(262): Homolog of NCBI NO: 15227861 NR Description: hydrolase, alpha/beta fold family [Arabidopsis
  misc_feature (1)..(262): Homolog of NCBI NO: 15227865 NR Description: esterase, putative [Arabidopsis thaliana]
  misc_feature (7)..(259): Homolog of NCBI NO: 14279437 NR Description: ethylene-induced esterase [Citrus sinensis]
  misc_feature (5)..(262): Homolog of NCBI NO: 40549303 NR Description: salicylic acid-binding protein 2 [Nicotiana
  misc_feature (8)..(262): Homolog of NCBI NO: 15235445 NR Description: hydrolase, alpha/beta fold family [Arabidopsis
  misc_feature (3)..(259): Homolog of NCBI NO: 15227859 NR Description: hydrolase, alpha/beta fold family [Arabidopsis

SEQ ID NO: 99872 - protein, 197 aa, Arabidopsis thaliana; identical to SEQ ID NO: 36077
  peptide (1)..(197): Ceres Seq. ID no. 13603824
  misc_feature (1)..(191): Pfam Name: alpha/beta hydrolase fold Pfam Description: alpha/beta hydrolase fold
  misc_feature (1)..(197): Homolog of NCBI NO: 15227863 NR Description: hydrolase, alpha/beta fold family [Arabidopsis
  misc_feature (1)..(196): Homolog of NCBI NO: 21554666 NR Description: putative acetone-cyanohydrin lyase [Arabidopsis
  misc_feature (1)..(196): Homolog of NCBI NO: 15227867 NR Description: esterase, putative [Arabidopsis thaliana]
  misc_feature (1)..(196): Homolog of NCBI NO: 27754457 NR Description: putative acetone-cyanohydrin lyase [Arabidopsis
  misc_feature (1)..(196): Homolog of NCBI NO: 15227861 NR Description: hydrolase, alpha/beta fold family [Arabidopsis
  misc_feature (1)..(196): Homolog of NCBI NO: 15227865 NR Description: esterase, putative [Arabidopsis thaliana]
  misc_feature (1)..(193): Homolog of NCBI NO: 14279437 NR Description: ethylene-induced esterase [Citrus sinensis]
  misc_feature (1)..(196): Homolog of NCBI NO: 40549303 NR Description: salicylic acid-binding protein 2 [Nicotiana
  misc_feature (1)..(196): Homolog of NCBI NO: 15235445 NR Description: hydrolase, alpha/beta fold family [Arabidopsis
  misc_feature (1)..(193): Homolog of NCBI NO: 15227859 NR Description: hydrolase, alpha/beta fold family [Arabidopsis

SEQ ID NO: 99873 - DNA, 1208 bp, Arabidopsis thaliana
  misc_feature (1)..(1208): Ceres Seq. ID no. 13603825
  misc_feature: MA Experiment ID: 20001451 Result: Up-regulated in Transcription
  misc_feature: MA Experiment 20001451 PARAMETER Experiment Name: At_Far-red-induction_P Parameter: Age (day) Value: 7
  misc_feature: MA Experiment 20001451 PARAMETER Experiment Name: At_Far-red-induction_P Parameter: Light Value: Far-red vs. White
  misc_feature: MA Experiment 20001451 PARAMETER Experiment Name: At_Far-red-induction_P Parameter: Organism Value: A. thaliana
  misc_feature: MA Experiment 20001451 PARAMETER Experiment Name: At_Far-red-induction_P Parameter: Plant Line Value: Columbia
  misc_feature: MA Experiment 20001451 PARAMETER Experiment Name: At_Far-red-induction_P Parameter: Timepoint (hr) Value: 24
  misc_feature: MA Experiment 20001451 PARAMETER Experiment Name: At_Far-red-induction_P Parameter: Tissue Value: Whole Plant
  misc_feature: MA Experiment ID: 20001910 Result: Up-regulated in Transcription
  misc_feature: MA Experiment 20001910 PARAMETER Experiment Name: At_Drought_Reproduction_P Parameter: Age (day) Value: 37
  misc_feature: MA Experiment 20001910 PARAMETER Experiment Name: At_Drought_Reproduction_P Parameter: Organism Value: A. thaliana
  misc_feature: MA Experiment 20001910 PARAMETER Experiment Name: At_Drought_Reproduction_P Parameter: Plant Line Value: WS
  misc_feature: MA Experiment 20001910 PARAMETER Experiment Name: At_Drought_Reproduction_P Parameter: Timepoint (day) Value: 7
  misc_feature: MA Experiment 20001910 PARAMETER Experiment Name: At_Drought_Reproduction_P Parameter: Tissue Value: Flowers
  misc_feature: MA Experiment 20001910 PARAMETER Experiment Name: At_Drought_Reproduction_P Parameter: Treatment Value: Drought vs. No Drought
  misc_feature: MA Experiment ID: 20001911 Result: Up-regulated in Transcription
  misc_feature: MA Experiment 20001911 PARAMETER Experiment Name: At_Drought_Reproduction_P Parameter: Age (day) Value: 40
  misc_feature: MA Experiment 20001911 PARAMETER Experiment Name: At_Drought_Reproduction_P Parameter: Organism Value: A. thaliana
  misc_feature: MA Experiment 20001911 PARAMETER Experiment Name: At_Drought_Reproduction_P Parameter: Plant Line Value: WS
  misc_feature: MA Experiment 20001911 PARAMETER Experiment Name: At_Drought_Reproduction_P Parameter: Timepoint (day) Value: 10
  misc_feature: MA Experiment 20001911 PARAMETER Experiment Name: At_Drought_Reproduction_P Parameter: Tissue Value: Flowers
  misc_feature: MA Experiment 20001911 PARAMETER Experiment Name: At_Drought_Reproduction_P Parameter: Treatment Value: Drought vs. No Drought
aaatctcatttttgtctccttaaaattttctcagaaacatttccgtcatttgttccttagttttgtaatcaatcttcacgattcctcaggtaccatcctccaaggtcataagagaacaggatcggtgttctcgaacgagcggtgttgtgtcttaagtggggatggcttcaacaccttgtgcagcatgtaagctcttgaggcgtaaatgcactcaagaatgtgtgtttgcgccgtattttccaccaactaatcctcaaaagtttatctttgttcaccgagtttttggagcaagcaatgtaaccaagatcctcaacgatcttccacctgatcaacgcgaagacactgttaattccctcttttatgaagcggaagcgcgtatccgtgacccaatctatggatgtgttggtctcatttcttttttacaacaatacctcaagaaaattcaacaagatcttctcactgctaaagaagagcttgttggttacttgggacccgatgctgtgattccgccgccttatcttcctcctataggtaacaatcctcctcccaatttcatgatgtctatggaaggaatgccaccaggagtgatccctcaaggagaacctttgatgatacgcgaaccaaacatgtctcagcaacatcatcatcaacaaccgcaagatgagcagttgcaattcatagcttctgatgcacagagaatggctgcaatgatgttggagagaggagatcaacaagggatgttcaatggttacggaatagacaacaatggttcggttacagccacgggttttaaccaaatggatgtgaatgatcaaggtgctggtggttcgttgtctggaccatctcttgctttaggaagctttggtgatgcttatcagatgggtcaagagacagagcatggtcatatcaaccatgatcagcttcagacacagcttatgcttcagcctccattacaagaaggtcaagaacaaacagaggaaggacagttcttgatgcaaccaatgggacaagagaatcttcatgacgaagaggaggaggaagagcttgagccaccggttaaatggaggatgtctgagaacaaggaagctagtttttaagacctaaatgcatttaggagaacaaaaaaaaattcctattttcttggatagtttacttaactcttgaggatctatttggtttttttttttaataatcaaatggtattattc

SEQ ID NO: 99874 - protein, 311 aa, Arabidopsis thaliana
  peptide (1)..(311): Ceres Seq. ID no. 13603826
  misc_feature (5)..(105): Pfam Name: Protein of unknown function DUF260 Pfam Description: Protein of unknown function DUF260
  misc_feature (1)..(311): Homolog of NCBI NO: 15227870 NR Description: lateral organ boundaries (LOB) domain family thaliana] >gi|29427575|sp|O64836|LB10_ARATH Putative LOB domain
  misc_feature (2)..(290): Homolog of NCBI NO: 15240110 NR Description: lateral organ boundaries (LOB) domain family thaliana] >gi|29428002|sp|Q9FKZ3|LB36_ARATH Putative LOB domain
  misc_feature (1)..(146): Homolog of NCBI NO: 34907508 NR Description: B1099D03.24 [Oryza sativa (japonica
  misc_feature (3)..(108): Homolog of NCBI NO: 15218746 NR Description: lateral organ boundaries (LOB) domain protein 6 [Arabidopsis thaliana] >gi|29427552|sp|O04479|LBD6_ARATH LOB protein 6 (ASYMMETRIC LEAVES2) >gi|25404562|pir||C96681
  misc_feature (2)..(116): Homolog of NCBI NO: 34896184 NR Description: contains ESTs C98868(E3203),C98869(E3203)~similar Arabidopsis thaliana chromosome 5, MDC12.5~unknown protein [Oryza
  misc_feature (1)..(110): Homolog of NCBI NO: 21618134 NR Description: unknown [Arabidopsis thaliana]
  misc_feature (3)..(140): Homolog of NCBI NO: 15242624 NR Description: lateral organ boundaries (LOB) protein thaliana] >gi|30697777|ref|NP_851252.1| lateral organ boundaries protein [Arabidopsis thaliana] >gi|30697779|ref|NP_851253.1|
  misc_feature (1)..(110): Homolog of NCBI NO: 18405472 NR Description: lateral organ boundaries (LOB) domain protein 25 [Arabidopsis thaliana] >gi|17227166|gb|AAL38037.1|AF447892_1 LOB
  misc_feature (1)..(110): Homolog of NCBI NO: 29427827 NR Description: LOB domain protein 25
  misc_feature (3)..(110): Homolog of NCBI NO: 9294470 NR Description: gb|AAB60912.1~gene_id:MGF10.6~similar to unknown
MASTPCAACKLLRRKCTQECVFAPYFPPTNPQKFIFVHRVFGASNVTKILNDLPPDQREDTVNSLFYEAEARIRDPIYGCVGLISFLQQYLKKIQQDLLTAKEELVGYLGPDAVIPPPYLPPIGNNPPPNFMMSMEGMPPGVIPQGEPLMIREPNMSQQHHHQQPQDEQLQFIASDAQRMAAMMLERGDQQGMFNGYGIDNNGSVTATGFNQMDVNDQGAGGSLSGPSLALGSFGDAYQMGQETEHGHINHDQLQTQLMLQPPLQEGQEQTEEGQFLMQPMGQENLHDEEEEEELEPPVKWRMSENKEASF

SEQ ID NO: 99875 - protein, 180 aa, Arabidopsis thaliana
  peptide (1)..(180): Ceres Seq. ID no. 13603827
  misc_feature (1)..(180): Homolog of NCBI NO: 15227870 NR Description: lateral organ boundaries (LOB) domain family thaliana] >gi|29427575|sp|O64836|LB10_ARATH Putative LOB domain
  misc_feature (1)..(159): Homolog of NCBI NO: 15240110 NR Description: lateral organ boundaries (LOB) domain family thaliana] >gi|29428002|sp|Q9FKZ3|LB36_ARATH Putative LOB domain
  misc_feature (1)..(15): Homolog of NCBI NO: 34907508 NR Description: B1099D03.24 [Oryza sativa (japonica
  misc_feature (1)..(13): Homolog of NCBI NO: 30690020 NR Description: lateral organ boundaries (LOB) domain protein 18 [Arabidopsis thaliana] >gi|27805494|sp|O22131|LB18_ARATH LOB protein 18 >gi|17227164|gb|AAL38036.1|AF447891_1 LOB DOMAIN 18
  misc_feature (1)..(13): Homolog of NCBI NO: 25354729 NR Description: hypothetical protein At2g45420 [imported] -
  misc_feature (1)..(27): Homolog of NCBI NO: 15231388 NR Description: lateral organ boundaries (LOB) domain family thaliana] >gi|29428016|sp|Q9LRW1|LB22_ARATH Putative LOB domain
  misc_feature (1)..(58): Homolog of NCBI NO: 34914280 NR Description: B1151A10.6 [Oryza sativa (japonica
  misc_feature (1)..(16): Homolog of NCBI NO: 34905124 NR Description: P0686C03.45 [Oryza sativa (japonica
MMSMEGMPPGVIPQGEPLMIREPNMSQQHHHQQPQDEQLQFIASDAQRMAAMMLERGDQQGMFNGYGIDNNGSVTATGFNQMDVNDQGAGGSLSGPSLALGSFGDAYQMGQETEHGHINHDQLQTQLMLQPPLQEGQEQTEEGQFLMQPMGQENLHDEEEEEELEPPVKWRMSENKEASF

SEQ ID NO: 99876 - protein, 179 aa, Arabidopsis thaliana
  peptide (1)..(179): Ceres Seq. ID no. 13603828
  misc_feature (1)..(179): Homolog of NCBI NO: 15227870 NR Description: lateral organ boundaries (LOB) domain family thaliana] >gi|29427575|sp|O64836|LB10_ARATH Putative LOB domain
  misc_feature (1)..(158): Homolog of NCBI NO: 15240110 NR Description: lateral organ boundaries (LOB) domain family thaliana] >gi|29428002|sp|Q9FKZ3|LB36_ARATH Putative LOB domain
  misc_feature (1)..(14): Homolog of NCBI NO: 34907508 NR Description: B1099D03.24 [Oryza sativa (japonica
  misc_feature (1)..(12): Homolog of NCBI NO: 30690020 NR Description: lateral organ boundaries (LOB) domain protein 18 [Arabidopsis thaliana] >gi|27805494|sp|O22131|LB18_ARATH LOB protein 18 >gi|17227164|gb|AAL38036.1|AF447891_1 LOB DOMAIN 18
  misc_feature (1)..(12): Homolog of NCBI NO: 25354729 NR Description: hypothetical protein At2g45420 [imported] -
  misc_feature (1)..(26): Homolog of NCBI NO: 15231388 NR Description: lateral organ boundaries (LOB) domain family thaliana] >gi|29428016|sp|Q9LRW1|LB22_ARATH Putative LOB domain
  misc_feature (1)..(57): Homolog of NCBI NO: 34914280 NR Description: B1151A10.6 [Oryza sativa (japonica
  misc_feature (1)..(15): Homolog of NCBI NO: 34905124 NR Description: P0686C03.45 [Oryza sativa (japonica
MSMEGMPPGVIPQGEPLMIREPNMSQQHHHQQPQDEQLQFIASDAQRMAAMMLERGDQQGMFNGYGIDNNGSVTATGFNQMDVNDQGAGGSLSGPSLALGSFGDAYQMGQETEHGHINHDQLQTQLMLQPPLQEGQEQTEEGQFLMQPMGQENLHDEEEEEELEPPVKWRMSENKEASF

SEQ ID NO: 99877 - DNA, 690 bp, Arabidopsis thaliana
  misc_feature (1)..(690): Ceres Seq. ID no. 13603829
  misc_feature: MA Experiment ID: 108461 Result: Up-regulated in Transcription
  misc_feature: MA Experiment 108461 PARAMETER Experiment Name: At_Germinating_Seeds_cDNA_P Parameter: Age (day) Value: 1 vs. 0
  misc_feature: MA Experiment 108461 PARAMETER Experiment Name: At_Germinating_Seeds_cDNA_P Parameter: Tissue Value: Germinating Seeds
  misc_feature: MA Experiment ID: 108561 Result: Down-regulated in Transcription
  misc_feature: MA Experiment 108561 PARAMETER Experiment Name: At_100uM_ABA_cDNA_P Parameter: Timepoint (hr) Value: 6
  misc_feature: MA Experiment 108561 PARAMETER Experiment Name: At_100uM_ABA_cDNA_P Parameter: Tissue Value: Aerial
  misc_feature: MA Experiment 108561 PARAMETER Experiment Name: At_100uM_ABA_cDNA_P Parameter: Treatment Value: 100uM ABA vs. No Treatment
  misc_feature: MA Experiment ID: 108573 Result: Down-regulated in Transcription
  misc_feature: MA Experiment 108573 PARAMETER Experiment Name: At_Drought_cDNA_P Parameter: Timepoint (hr) Value: 6
  misc_feature: MA Experiment 108573 PARAMETER Experiment Name: At_Drought_cDNA_P Parameter: Tissue Value: Aerial
  misc_feature: MA Experiment 108573 PARAMETER Experiment Name: At_Drought_cDNA_P Parameter: Treatment Value: Drought vs. No Drought
  misc_feature: MA Experiment ID: 108577 Result: Down-regulated in Transcription
  misc_feature: MA Experiment 108577 PARAMETER Experiment Name: At_42deg_Heat_cDNA_P Parameter: Temperature (deg C) Value: 42 vs. 22
  misc_feature: MA Experiment 108577 PARAMETER Experiment Name: At_42deg_Heat_cDNA_P Parameter: Timepoint (hr) Value: 6
  misc_feature: MA Experiment 108577 PARAMETER Experiment Name: At_42deg_Heat_cDNA_P Parameter: Tissue Value: Aerial
  misc_feature: MA Experiment ID: 108579 Result: Up-regulated in Transcription
  misc_feature: MA Experiment 108579 PARAMETER Experiment Name: At_4deg_Cold_cDNA_P Parameter: Temperature (deg C) Value: 4 vs. 22
  misc_feature: MA Experiment 108579 PARAMETER Experiment Name: At_4deg_Cold_cDNA_P Parameter: Timepoint (hr) Value: 6
  misc_feature: MA Experiment 108579 PARAMETER Experiment Name: At_4deg_Cold_cDNA_P Parameter: Tissue Value: Aerial
  misc_feature: MA Experiment ID: 108595 Result: Down-regulated in Transcription
  misc_feature: MA Experiment 108595 PARAMETER Experiment Name: At_Ler-pi_Ovule_cDNA_P Parameter: Plant Line Value: null
  misc_feature: MA Experiment ID: 20000072 Result: Down-regulated in Transcription
  misc_feature: MA Experiment 20000072 PARAMETER Experiment Name: At_100uM_ABA_Mutants_cDNA_P Parameter: Plant Line Value: CS8105
  misc_feature: MA Experiment 20000072 PARAMETER Experiment Name: At_100uM_ABA_Mutants_cDNA_P Parameter: Timepoint (hr) Value: 6
  misc_feature: MA Experiment 20000072 PARAMETER Experiment Name: At_100uM_ABA_Mutants_cDNA_P Parameter: Tissue Value: Aerial
  misc_feature: MA Experiment 20000072 PARAMETER Experiment Name: At_100uM_ABA_Mutants_cDNA_P Parameter: Treatment Value: 100uM ABA vs. No Treatment
  misc_feature: MA Experiment ID: 20000117 Result: Down-regulated in Transcription
  misc_feature: MA Experiment 20000117 PARAMETER Experiment Name: At_100uM_ABA_Mutants_cDNA_P Parameter: Plant Line Value: Columbia
  misc_feature: MA Experiment 20000117 PARAMETER Experiment Name: At_100uM_ABA_Mutants_cDNA_P Parameter: Timepoint (hr) Value: 6
  misc_feature: MA Experiment 20000117 PARAMETER Experiment Name: At_100uM_ABA_Mutants_cDNA_P Parameter: Tissue Value: Aerial
  misc_feature: MA Experiment 20000117 PARAMETER Experiment Name: At_100uM_ABA_Mutants_cDNA_P Parameter: Treatment Value: 100uM ABA vs. No Treatment
  misc_feature: MA Experiment ID: 20000184 Result: Up-regulated in Transcription
  misc_feature: MA Experiment 20000184 PARAMETER Experiment Name: At_Shoots__P Parameter: Age (day) Value: 7
  misc_feature: MA Experiment 20000184 PARAMETER Experiment Name: At_Shoots__P Parameter: Tissue Value: Shoots vs. Whole Plant
  misc_feature: MA Experiment ID: 20000185 Result: Down-regulated in Transcription
  misc_feature: MA Experiment 20000185 PARAMETER Experiment Name: At_Roots__P Parameter: Age (day) Value: 7 vs. 21
  misc_feature: MA Experiment 20000185 PARAMETER Experiment Name: At_Roots__P Parameter: Organism Value: A. thaliana
  misc_feature: MA Experiment 20000185 PARAMETER Experiment Name: At_Roots__P Parameter: Tissue Value: Roots vs. Whole Plant
  misc_feature: MA Experiment ID: 20000234 Result: Up-regulated in Transcription
  misc_feature: MA Experiment 20000234 PARAMETER Experiment Name: At_Siliques_P Parameter: Age (day) Value: 21
  misc_feature: MA Experiment 20000234 PARAMETER Experiment Name: At_Siliques_P Parameter: Organism Value: A. thaliana
  misc_feature: MA Experiment 20000234 PARAMETER Experiment Name: At_Siliques_P Parameter: Plant Line Value: WS
  misc_feature: MA Experiment 20000234 PARAMETER Experiment Name: At_Siliques_P Parameter: Tissue Value: Less Than 5mm Siliques vs. Whole Plant
  misc_feature: MA Experiment ID: 20000436 Result: Down-regulated in Transcription
  misc_feature: MA Experiment 20000436 PARAMETER Experiment Name: At_Drought_P Parameter: Age (day) Value: 7
  misc_feature: MA Experiment 20000436 PARAMETER Experiment Name: At_Drought_P Parameter: Organism Value: A. thaliana
  misc_feature: MA Experiment 20000436 PARAMETER Experiment Name: At_Drought_P Parameter: Plant Line Value: WS
  misc_feature: MA Experiment 20000436 PARAMETER Experiment Name: At_Drought_P Parameter: Timepoint (hr) Value: 12
  misc_feature: MA Experiment 20000436 PARAMETER Experiment Name: At_Drought_P Parameter: Tissue Value: Whole Plant
  misc_feature: MA Experiment 20000436 PARAMETER Experiment Name: At_Drought_P Parameter: Treatment Value: Drought vs. No Drought
  misc_feature: MA Experiment ID: 20000437 Result: Down-regulated in Transcription
  misc_feature: MA Experiment 20000437 PARAMETER Experiment Name: At_Drought_P Parameter: Age (day) Value: 8
  misc_feature: MA Experiment 20000437 PARAMETER Experiment Name: At_Drought_P Parameter: Organism Value: A. thaliana
  misc_feature: MA Experiment 20000437 PARAMETER Experiment Name: At_Drought_P Parameter: Plant Line Value: WS
  misc_feature: MA Experiment 20000437 PARAMETER Experiment Name: At_Drought_P Parameter: Timepoint (hr) Value: 24
  misc_feature: MA Experiment 20000437 PARAMETER Experiment Name: At_Drought_P Parameter: Tissue Value: Whole Plant
  misc_feature: MA Experiment 20000437 PARAMETER Experiment Name: At_Drought_P Parameter: Treatment Value: Drought vs. No Drought
  misc_feature: MA Experiment ID: 20000438 Result: Up-regulated in Transcription
  misc_feature: MA Experiment 20000438 PARAMETER Experiment Name: At_Shoots__P Parameter: Age (day) Value: 14
  misc_feature: MA Experiment 20000438 PARAMETER Experiment Name: At_Shoots__P Parameter: Tissue Value: Shoots vs. Whole Plant
  misc_feature: MA Experiment ID: 20000439 Result: Down-regulated in Transcription
  misc_feature: MA Experiment 20000439 PARAMETER Experiment Name: At_Roots__P Parameter: Age (day) Value: 14 vs. 21
  misc_feature: MA Experiment 20000439 PARAMETER Experiment Name: At_Roots__P Parameter: Organism Value: A. thaliana
  misc_feature: MA Experiment 20000439 PARAMETER Experiment Name: At_Roots__P Parameter: Tissue Value: Roots vs. Whole Plant
  misc_feature: MA Experiment ID: 20000453 Result: Down-regulated in Transcription
  misc_feature: MA Experiment 20000453 PARAMETER Experiment Name: At_100uM_ABA_P Parameter: Age (day) Value: 15
  misc_feature: MA Experiment 20000453 PARAMETER Experiment Name: At_100uM_ABA_P Parameter: Organism Value: A. thaliana
  misc_feature: MA Experiment 20000453 PARAMETER Experiment Name: At_100uM_ABA_P Parameter: Plant Line Value: WS
  misc_feature: MA Experiment 20000453 PARAMETER Experiment Name: At_100uM_ABA_P Parameter: Timepoint (hr) Value: 24
  misc_feature: MA Experiment 20000453 PARAMETER Experiment Name: At_100uM_ABA_P Parameter: Tissue Value: Aerial
  misc_feature: MA Experiment 20000453 PARAMETER Experiment Name: At_100uM_ABA_P Parameter: Treatment Value: 100uM ABA vs. No Treatment
  misc_feature: MA Experiment ID: 20001248 Result: Down-regulated in Transcription
  misc_feature: MA Experiment 20001248 PARAMETER Experiment Name: At_Far-red-induction_P Parameter: Age (day) Value: 7
  misc_feature: MA Experiment 20001248 PARAMETER Experiment Name: At_Far-red-induction_P Parameter: Light Value: Far-red vs. White
  misc_feature: MA Experiment 20001248 PARAMETER Experiment Name: At_Far-red-induction_P Parameter: Organism Value: A. thaliana
  misc_feature: MA Experiment 20001248 PARAMETER Experiment Name: At_Far-red-induction_P Parameter: Plant Line Value: Columbia
  misc_feature: MA Experiment 20001248 PARAMETER Experiment Name: At_Far-red-induction_P Parameter: Timepoint (hr) Value: 4
  misc_feature: MA Experiment 20001248 PARAMETER Experiment Name: At_Far-red-induction_P Parameter: Tissue Value: Whole Plant
  misc_feature: MA Experiment ID: 20001450 Result: Down-regulated in Transcription
  misc_feature: MA Experiment 20001450 PARAMETER Experiment Name: At_Far-red-induction_P Parameter: Age (day) Value: 7
  misc_feature: MA Experiment 20001450 PARAMETER Experiment Name: At_Far-red-induction_P Parameter: Light Value: Far-red vs. White
  misc_feature: MA Experiment 20001450 PARAMETER Experiment Name: At_Far-red-induction_P Parameter: Organism Value: A. thaliana
  misc_feature: MA Experiment 20001450 PARAMETER Experiment Name: At_Far-red-induction_P Parameter: Plant Line Value: Columbia
  misc_feature: MA Experiment 20001450 PARAMETER Experiment Name: At_Far-red-induction_P Parameter: Timepoint (hr) Value: 8
  misc_feature: MA Experiment 20001450 PARAMETER Experiment Name: At_Far-red-induction_P Parameter: Tissue Value: Whole Plant
  misc_feature: MA Experiment ID: 20001757 Result: Up-regulated in Transcription
  misc_feature: MA Experiment 20001757 PARAMETER Experiment Name: At_50mM_NH4NO3_L-to-H_P Parameter: Timepoint (hr) Value: 6
  misc_feature: MA Experiment 20001757 PARAMETER Experiment Name: At_50mM_NH4NO3_L-to-H_P Parameter: Tissue Value: Leaf
  misc_feature: MA Experiment 20001757 PARAMETER Experiment Name: At_50mM_NH4NO3_L-to-H_P Parameter: Treatment Value: 50mM NH4NO3 vs 100mM Mannitol
  misc_feature: MA Experiment ID: 20001905 Result: Down-regulated in Transcription
  misc_feature: MA Experiment 20001905 PARAMETER Experiment Name: At_Drought_Reproduction_P Parameter: Age (day) Value: 40
  misc_feature: MA Experiment 20001905 PARAMETER Experiment Name: At_Drought_Reproduction_P Parameter: Organism Value: A. thaliana
  misc_feature: MA Experiment 20001905 PARAMETER Experiment Name: At_Drought_Reproduction_P Parameter: Plant Line Value: WS
  misc_feature: MA Experiment 20001905 PARAMETER Experiment Name: At_Drought_Reproduction_P Parameter: Timepoint (day) Value: 10
  misc_feature: MA Experiment 20001905 PARAMETER Experiment Name: At_Drought_Reproduction_P Parameter: Tissue Value: Rosettes
  misc_feature: MA Experiment 20001905 PARAMETER Experiment Name: At_Drought_Reproduction_P Parameter: Treatment Value: Drought vs. No Drought
tttctatttcacatctgagagcttttttcgtttcttgtgagatcatctaaaaaatggcttcgactgtttcgctttctttactcagcggcggcagtggagctcttcaggcgcgttgcgcaagaaccgcgcatgttagcccacgagcggcgcattctaacaaacccgcgctttcttcgttctcgctgaccggcgcctctcgcaggaatctgttattttcgttgacggcagcgacggtagtgacgggacttcagcctgcatcaatggcggagaatattccgttatttggtataagaaagaaactgaagaaagcagaagaagaagcggtggagatcgtgaaagaaggctttgagacggcggagaaaggcgttgatgcggcggagaaaggattagaagcggcggagagaggtgtagagacggcagagaaggaaatcgtgacggcggttagctttaatggattgacacaagctggagccgtcgtggcggctgagttcgtcggagttcttgtcgctacgtcagtagtgaatgggattttaggaccagaagcccagaaatcttaggaataacctaatgctatgtgtacttttgtgttggagttaaagaaatatttgtctaaatttttgctgttaattatgttttgtaatatcataaaccatatacctagagatgaagaagatcagaattatgtggtct

SEQ ID NO: 99878 - protein, 167 aa, Arabidopsis thaliana; identical to SEQ ID NO: 31053
  peptide (1)..(167): Ceres Seq. ID no. 13603830
  misc_feature (1)..(167): Homolog of NCBI NO: 18400342 NR Description: expressed protein [Arabidopsis thaliana]
  misc_feature (1)..(167): Homolog of NCBI NO: 21554083 NR Description: unknown [Arabidopsis thaliana]

SEQ ID NO: 99879 - protein, 98 aa, Arabidopsis thaliana; identical to SEQ ID NO: 31054
  peptide (1)..(98): Ceres Seq. ID no. 13603831
  misc_feature (1)..(98): Homolog of NCBI NO: 18400342 NR Description: expressed protein [Arabidopsis thaliana]
  misc_feature (1)..(98): Homolog of NCBI NO: 21554083 NR Description: unknown [Arabidopsis thaliana]

SEQ ID NO: 99880 - DNA, 1066 bp, Arabidopsis thaliana
  misc_feature (1)..(1066): Ceres Seq. ID no. 13603840
  misc_feature: MA Experiment ID: 108569 Result: Up-regulated in Transcription
  misc_feature: MA Experiment 108569 PARAMETER Experiment Name: At_0.001%_MeJA__cDNA_P Parameter: Timepoint (hr) Value: 6
  misc_feature: MA Experiment 108569 PARAMETER Experiment Name: At_0.001%_MeJA__cDNA_P Parameter: Tissue Value: Aerial
  misc_feature: MA Experiment 108569 PARAMETER Experiment Name: At_0.001%_MeJA__cDNA_P Parameter: Treatment Value: 0.001% MeJA vs. No Treatment
  misc_feature: MA Experiment ID: 108573 Result: Up-regulated in Transcription
  misc_feature: MA Experiment 108573 PARAMETER Experiment Name: At_Drought_cDNA_P Parameter: Timepoint (hr) Value: 6
  misc_feature: MA Experiment 108573 PARAMETER Experiment Name: At_Drought_cDNA_P Parameter: Tissue Value: Aerial
  misc_feature: MA Experiment 108573 PARAMETER Experiment Name: At_Drought_cDNA_P Parameter: Treatment Value: Drought vs. No Drought
  misc_feature: MA Experiment ID: 108585 Result: Up-regulated in Transcription
  misc_feature: MA Experiment 108585 PARAMETER Experiment Name: At_5mM_NaNP_cDNA_P Parameter: Timepoint (hr) Value: 6
  misc_feature: MA Experiment 108585 PARAMETER Experiment Name: At_5mM_NaNP_cDNA_P Parameter: Tissue Value: Aerial
  misc_feature: MA Experiment 108585 PARAMETER Experiment Name: At_5mM_NaNP_cDNA_P Parameter: Treatment Value: null
  misc_feature: MA Experiment ID: 108595 Result: Down-regulated in Transcription
  misc_feature: MA Experiment 108595 PARAMETER Experiment Name: At_Ler-pi_Ovule_cDNA_P Parameter: Plant Line Value: null
  misc_feature: MA Experiment ID: 20000112 Result: Up-regulated in Transcription
  misc_feature: MA Experiment 20000112 PARAMETER Experiment Name: At_42deg_Heat_cDNA_P Parameter: Temperature (deg C) Value: 42 vs. 22
  misc_feature: MA Experiment 20000112 PARAMETER Experiment Name: At_42deg_Heat_cDNA_P Parameter: Timepoint (hr) Value: 2
  misc_feature: MA Experiment 20000112 PARAMETER Experiment Name: At_42deg_Heat_cDNA_P Parameter: Tissue Value: Aerial
  misc_feature: MA Experiment ID: 20000171 Result: Up-regulated in Transcription
  misc_feature: MA Experiment 20000171 PARAMETER Experiment Name: At_42deg_Heat_P Parameter: Age (day) Value: 14
  misc_feature: MA Experiment 20000171 PARAMETER Experiment Name: At_42deg_Heat_P Parameter: Organism Value: A. thaliana
  misc_feature: MA Experiment 20000171 PARAMETER Experiment Name: At_42deg_Heat_P Parameter: Plant Line Value: WS
  misc_feature: MA Experiment 20000171 PARAMETER Experiment Name: At_42deg_Heat_P Parameter: Temperature (deg C) Value: 42 vs. 22
  misc_feature: MA Experiment 20000171 PARAMETER Experiment Name: At_42deg_Heat_P Parameter: Timepoint (hr) Value: 1
  misc_feature: MA Experiment 20000171 PARAMETER Experiment Name: At_42deg_Heat_P Parameter: Tissue Value: Aerial
  misc_feature: MA Experiment ID: 20000224 Result: Down-regulated in Transcription
  misc_feature: MA Experiment ID: 20000234 Result: Down-regulated in Transcription
  misc_feature: MA Experiment 20000234 PARAMETER Experiment Name: At_Siliques_P Parameter: Age (day) Value: 21
  misc_feature: MA Experiment 20000234 PARAMETER Experiment Name: At_Siliques_P Parameter: Organism Value: A. thaliana
  misc_feature: MA Experiment 20000234 PARAMETER Experiment Name: At_Siliques_P Parameter: Plant Line Value: WS
  misc_feature: MA Experiment 20000234 PARAMETER Experiment Name: At_Siliques_P Parameter: Tissue Value: Less Than 5mm Siliques vs. Whole Plant
aagactctgttttttcccaagatgtctggtttcctcttttgtttcgtccaaatctctactttttagggatcttgtccttctcttttctgctgattaaaaccctcgaatttgctccaattcgacgcgaaaaagggcattgagatggtgaatggagaatcatcaactagtacgtcttactctgatagtaacaatgacacaaatgatcaaggaggagactttgaatgtaacatttgtttcgaactagctcaagatccgattgtcactctctgtggccatctcttttgctggccttgcttataccgttggcttcaccaccattcacattctcaagaatgtccggtttgtaaagccgtggttcaagacgataagcttgttcctctttacggtagaggcaagaaccagactgacccgagatcaaaacgttatccgggtttacggattcctaaccgaccaacaggtcaaagacctgagactgctgctcctcctcctcagcctgaagctgcgagtaattttttcaactacggtattggtttgatgggtggaattatgccgatgatggcgactacgaggtttgggaatttcagtatggggtttggtggtttgttaccttctttgtttaactttcagtttcatggatttcatgatgctacgctttatggttcaacaccgggttatccttacggtggttatcataacggtttccgtggagttcctcctcgtggacaagagcgtcctatggctcgtggaggaaaccaaagtgatgcatttctgaagaatatcctcttttttgttggaatctgtgtggtgatatttctcatctggtgaaaacgaatcacatttggtgtatttccaggtatgatcaaacttacttacttggtgcaagttgtgtatgtaaatatggtaatagctgagtgtacttgtctgctatttcgacgttgttattgtatttttgttttgaagatgaaccgtgagtctacaagcttttttacacaactcttttgttgcttttgtgttttgtctaagcatcttgtgaaaactagttgtgaaataaatggtgcgtgttatg

SEQ ID NO: 99881 - protein, 227 aa, Arabidopsis thaliana; identical to SEQ ID NO: 30318
  peptide (1)..(227): Ceres Seq. ID no. 13603841
  misc_feature (28)..(68): Pfam Name: Zinc finger, C3HC4 type (RING finger) Pfam Description: Zinc finger, C3HC4 type (RING finger)
  misc_feature (1)..(227): Homolog of NCBI NO: 15224062 NR Description: zinc finger (C3HC4-type RING finger) protein [Arabidopsis thaliana] >gi|7486265|pir||T02413 probable RING zinc
  misc_feature (1)..(227): Homolog of NCBI NO: 21553849 NR Description: putative RING zinc finger protein [Arabidopsis
  misc_feature (15)..(225): Homolog of NCBI NO: 18394721 NR Description: zinc finger (C3HC4-type RING finger) protein
  misc_feature (9)..(226): Homolog of NCBI NO: 29150403 NR Description: unknown protein [Oryza sativa (japonica
  misc_feature (4)..(226): Homolog of NCBI NO: 34909840 NR Description: P0403C05.28 [Oryza sativa (japonica
  misc_feature (17)..(147): Homolog of NCBI NO: 15222064 NR Description: zinc finger (C3HC4-type RING finger) protein [Arabidopsis thaliana] >gi|25406402|pir||G96779 probable RING
  misc_feature (6)..(227): Homolog of NCBI NO: 17554742 NR Description: Ring finger protein RNF-5 (24.9 kD) (rnf-5) elegans] >gi|2501735|sp|Q09463|YQ57_CAEEL Hypothetical RING protein C16C10.7 in chromosome III >gi|7496097|pir||T19328
  misc_feature (17)..(225): Homolog of NCBI NO: 39581891 NR Description: Hypothetical protein CBG20152 [Caenorhabditis
  misc_feature (13)..(165): Homolog of NCBI NO: 29841097 NR Description: similar to GenBank Accession Number AJ428489
  misc_feature (1)..(151): Homolog of NCBI NO: 15928691 NR Description: RIKEN cDNA 1700022N24 [Mus musculus] unnamed protein product [Mus musculus] unnamed protein product [Mus musculus]

SEQ ID NO: 99882 - DNA, 1356 bp, Arabidopsis thaliana
  misc_feature (1)..(1356): Ceres Seq. ID no. 13603846
  misc_feature: MA Experiment ID: 108461 Result: Up-regulated in Transcription
  misc_feature: MA Experiment 108461 PARAMETER Experiment Name: At_Germinating_Seeds_cDNA_P Parameter: Age (day) Value: 1 vs. 0
  misc_feature: MA Experiment 108461 PARAMETER Experiment Name: At_Germinating_Seeds_cDNA_P Parameter: Tissue Value: Germinating Seeds
  misc_feature: MA Experiment ID: 108462 Result: Up-regulated in Transcription
  misc_feature: MA Experiment 108462 PARAMETER Experiment Name: At_Germinating_Seeds_cDNA_P Parameter: Age (day) Value: 2 vs. 0
  misc_feature: MA Experiment 108462 PARAMETER Experiment Name: At_Germinating_Seeds_cDNA_P Parameter: Tissue Value: Germinating Seeds
  misc_feature: MA Experiment ID: 108463 Result: Up-regulated in Transcription
  misc_feature: MA Experiment 108463 PARAMETER Experiment Name: At_Germinating_Seeds_cDNA_P Parameter: Age (day) Value: 3 vs. 0
  misc_feature: MA Experiment 108463 PARAMETER Experiment Name: At_Germinating_Seeds_cDNA_P Parameter: Tissue Value: Germinating Seeds
  misc_feature: MA Experiment ID: 108464 Result: Up-regulated in Transcription
  misc_feature: MA Experiment 108464 PARAMETER Experiment Name: At_Germinating_Seeds_cDNA_P Parameter: Age (day) Value: 4 vs. 0
  misc_feature: MA Experiment 108464 PARAMETER Experiment Name: At_Germinating_Seeds_cDNA_P Parameter: Tissue Value: Germinating Seeds
  misc_feature: MA Experiment ID: 108501 Result: Down-regulated in Transcription
  misc_feature: MA Experiment 108501 PARAMETER Experiment Name: At_ap2_floral_buds_cDNA_P Parameter: Plant Line Value: ap2 (Ler.)
  misc_feature: MA Experiment 108501 PARAMETER Experiment Name: At_ap2_floral_buds_cDNA_P Parameter: Tissue Value: Closed Flower
  misc_feature: MA Experiment ID: 20000113 Result: Up-regulated in Transcription
  misc_feature: MA Experiment 20000113 PARAMETER Experiment Name: At_42deg_Heat_cDNA_P Parameter: Temperature (deg C) Value: 42 vs. 22
  misc_feature: MA Experiment 20000113 PARAMETER Experiment Name: At_42deg_Heat_cDNA_P Parameter: Timepoint (hr) Value: 8
  misc_feature: MA Experiment 20000113 PARAMETER Experiment Name: At_42deg_Heat_cDNA_P Parameter: Tissue Value: Aerial
  misc_feature: MA Experiment ID: 20000180 Result: Up-regulated in Transcription
  misc_feature: MA Experiment 20000180 PARAMETER Experiment Name: At_Germinating_Seeds_P Parameter: Age (hr) Value: 24 vs. 0
  misc_feature: MA Experiment 20000180 PARAMETER Experiment Name: At_Germinating_Seeds_P Parameter: Tissue Value: Germinating Seeds
  misc_feature: MA Experiment ID: 20000184 Result: Up-regulated in Transcription
  misc_feature: MA Experiment 20000184 PARAMETER Experiment Name: At_Shoots__P Parameter: Age (day) Value: 7
  misc_feature: MA Experiment 20000184 PARAMETER Experiment Name: At_Shoots__P Parameter: Tissue Value: Shoots vs. Whole Plant
  misc_feature: MA Experiment ID: 20000185 Result: Down-regulated in Transcription
  misc_feature: MA Experiment 20000185 PARAMETER Experiment Name: At_Roots__P Parameter: Age (day) Value: 7 vs. 21
  misc_feature: MA Experiment 20000185 PARAMETER Experiment Name: At_Roots__P Parameter: Organism Value: A. thaliana
  misc_feature: MA Experiment 20000185 PARAMETER Experiment Name: At_Roots__P Parameter: Tissue Value: Roots vs. Whole Plant
  misc_feature: MA Experiment ID: 20000234 Result: Up-regulated in Transcription
  misc_feature: MA Experiment 20000234 PARAMETER Experiment Name: At_Siliques_P Parameter: Age (day) Value: 21
  misc_feature: MA Experiment 20000234 PARAMETER Experiment Name: At_Siliques_P Parameter: Organism Value: A. thaliana
  misc_feature: MA Experiment 20000234 PARAMETER Experiment Name: At_Siliques_P Parameter: Plant Line Value: WS
  misc_feature: MA Experiment 20000234 PARAMETER Experiment Name: At_Siliques_P Parameter: Tissue Value: Less Than 5mm Siliques vs. Whole Plant
  misc_feature: MA Experiment ID: 20000235 Result: Up-regulated in Transcription
  misc_feature: MA Experiment 20000235 PARAMETER Experiment Name: At_Siliques_P Parameter: Age (day) Value: 21
  misc_feature: MA Experiment 20000235 PARAMETER Experiment Name: At_Siliques_P Parameter: Organism Value: A. thaliana
  misc_feature: MA Experiment 20000235 PARAMETER Experiment Name: At_Siliques_P Parameter: Plant Line Value: WS
  misc_feature: MA Experiment 20000235 PARAMETER Experiment Name: At_Siliques_P Parameter: Tissue Value: 5-10mm Siliques vs. Whole Plant
  misc_feature: MA Experiment ID: 20000264 Result: Up-regulated in Transcription
  misc_feature: MA Experiment 20000264 PARAMETER Experiment Name: At_Open_Flower_P Parameter: Age (day) Value: 21
  misc_feature: MA Experiment 20000264 PARAMETER Experiment Name: At_Open_Flower_P Parameter: Plant Line Value: WS
  misc_feature: MA Experiment 20000264 PARAMETER Experiment Name: At_Open_Flower_P Parameter: Tissue Value: Open Flower vs. Whole Plant
  misc_feature: MA Experiment ID: 20000265 Result: Up-regulated in Transcription
  misc_feature: MA Experiment 20000265 PARAMETER Experiment Name: At_Open_Flower_P Parameter: Age (day) Value: 21
  misc_feature: MA Experiment 20000265 PARAMETER Experiment Name: At_Open_Flower_P Parameter: Plant Line Value: WS
  misc_feature: MA Experiment 20000265 PARAMETER Experiment Name: At_Open_Flower_P Parameter: Tissue Value: Closed Flower vs. Whole Plant
  misc_feature: MA Experiment ID: 20000286 Result: Up-regulated in Transcription
  misc_feature: MA Experiment 20000286 PARAMETER Experiment Name: At_Open_Flower_P Parameter: Age (day) Value: 21
  misc_feature: MA Experiment 20000286 PARAMETER Experiment Name: At_Open_Flower_P Parameter: Plant Line Value: WS
  misc_feature: MA Experiment 20000286 PARAMETER Experiment Name: At_Open_Flower_P Parameter: Tissue Value: Half Open vs. Whole Plant
  misc_feature: MA Experiment ID: 20000438 Result: Up-regulated in Transcription
  misc_feature: MA Experiment 20000438 PARAMETER Experiment Name: At_Shoots__P Parameter: Age (day) Value: 14
  misc_feature: MA Experiment 20000438 PARAMETER Experiment Name: At_Shoots__P Parameter: Tissue Value: Shoots vs. Whole Plant
  misc_feature: MA Experiment ID: 20000439 Result: Down-regulated in Transcription
  misc_feature: MA Experiment 20000439 PARAMETER Experiment Name: At_Roots__P Parameter: Age (day) Value: 14 vs. 21
  misc_feature: MA Experiment 20000439 PARAMETER Experiment Name: At_Roots__P Parameter: Organism Value: A. thaliana
  misc_feature: MA Experiment 20000439 PARAMETER Experiment Name: At_Roots__P Parameter: Tissue Value: Roots vs. Whole Plant
  misc_feature: MA Experiment ID: 20000496 Result: Up-regulated in Transcription
  misc_feature: MA Experiment 20000496 PARAMETER Experiment Name: At_Guard_Cells_P Parameter: Harvest Date Value: 7/19/2002
  misc_feature: MA Experiment 20000496 PARAMETER Experiment Name: At_Guard_Cells_P Parameter: Organism Value: Canola
  misc_feature: MA Experiment 20000496 PARAMETER Experiment Name: At_Guard_Cells_P Parameter: Tissue Value: Guard Cells vs. Leaves
  misc_feature: MA Experiment ID: 20001247 Result: Down-regulated in Transcription
  misc_feature: MA Experiment 20001247 PARAMETER Experiment Name: At_Far-red-induction_P Parameter: Age (day) Value: 7
  misc_feature: MA Experiment 20001247 PARAMETER Experiment Name: At_Far-red-induction_P Parameter: Light Value: Far-red vs. White
  misc_feature: MA Experiment 20001247 PARAMETER Experiment Name: At_Far-red-induction_P Parameter: Organism Value: A. thaliana
  misc_feature: MA Experiment 20001247 PARAMETER Experiment Name: At_Far-red-induction_P Parameter: Plant Line Value: Columbia
  misc_feature: MA Experiment 20001247 PARAMETER Experiment Name: At_Far-red-induction_P Parameter: Timepoint (hr) Value: 1
  misc_feature: MA Experiment 20001247 PARAMETER Experiment Name: At_Far-red-induction_P Parameter: Tissue Value: Whole Plant
  misc_feature: MA Experiment ID: 20001248 Result: Down-regulated in Transcription
  misc_feature: MA Experiment 20001248 PARAMETER Experiment Name: At_Far-red-induction_P Parameter: Age (day) Value: 7
  misc_feature: MA Experiment 20001248 PARAMETER Experiment Name: At_Far-red-induction_P Parameter: Light Value: Far-red vs. White
  misc_feature: MA Experiment 20001248 PARAMETER Experiment Name: At_Far-red-induction_P Parameter: Organism Value: A. thaliana
  misc_feature: MA Experiment 20001248 PARAMETER Experiment Name: At_Far-red-induction_P Parameter: Plant Line Value: Columbia
  misc_feature: MA Experiment 20001248 PARAMETER Experiment Name: At_Far-red-induction_P Parameter: Timepoint (hr) Value: 4
  misc_feature: MA Experiment 20001248 PARAMETER Experiment Name: At_Far-red-induction_P Parameter: Tissue Value: Whole Plant
  misc_feature: MA Experiment ID: 20001450 Result: Down-regulated in Transcription
  misc_feature: MA Experiment 20001450 PARAMETER Experiment Name: At_Far-red-induction_P Parameter: Age (day) Value: 7
  misc_feature: MA Experiment 20001450 PARAMETER Experiment Name: At_Far-red-induction_P Parameter: Light Value: Far-red vs. White
  misc_feature: MA Experiment 20001450 PARAMETER Experiment Name: At_Far-red-induction_P Parameter: Organism Value: A. thaliana
  misc_feature: MA Experiment 20001450 PARAMETER Experiment Name: At_Far-red-induction_P Parameter: Plant Line Value: Columbia
  misc_feature: MA Experiment 20001450 PARAMETER Experiment Name: At_Far-red-induction_P Parameter: Timepoint (hr) Value: 8
  misc_feature: MA Experiment 20001450 PARAMETER Experiment Name: At_Far-red-induction_P Parameter: Tissue Value: Whole Plant
  misc_feature: MA Experiment ID: 20001911 Result: Down-regulated in Transcription
  misc_feature: MA Experiment 20001911 PARAMETER Experiment Name: At_Drought_Reproduction_P Parameter: Age (day) Value: 40
  misc_feature: MA Experiment 20001911 PARAMETER Experiment Name: At_Drought_Reproduction_P Parameter: Organism Value: A. thaliana
  misc_feature: MA Experiment 20001911 PARAMETER Experiment Name: At_Drought_Reproduction_P Parameter: Plant Line Value: WS
  misc_feature: MA Experiment 20001911 PARAMETER Experiment Name: At_Drought_Reproduction_P Parameter: Timepoint (day) Value: 10
  misc_feature: MA Experiment 20001911 PARAMETER Experiment Name: At_Drought_Reproduction_P Parameter: Tissue Value: Flowers
  misc_feature: MA Experiment 20001911 PARAMETER Experiment Name: At_Drought_Reproduction_P Parameter: Treatment Value: Drought vs. No Drought
atattgttttgagccatggaaactcttttccacactcttcttagattattactattcgtagccatctctcatactctgtcccctctcgccggttctttccggatttctaatgactttccggcggttttcaacttcggagactctaactctgacaccggagaacttagctcgggtcttggattccttccacaaccttcctatgaaataaccttctttagatctccaacttccggaagattctgcaatggacgtcttatcgtcgattttctaatggaagcaattgatcgaccatatttgaggccttatttagattcgataagtcgacaaacttaccgaagaggctgcaattttgctgcggctgcgtcaacgattcagaaggcaaatgctgcatcctatagcccctttggttttggtgttcaagtctctcaattcatcacctttaagtccaaagtccttcaattgatacaacaagatgaagagctccaaagatacttaccgtccgaatatttttttagtaatggattgtatatgtttgatatcggacaaaatgatattgccggagcattttacaccaagacagtagatcaagttcttgctctggttcctataatcttagatatatttcaagatggaataaagagattatatgcagagggggcaagaaactattggatacacaacacaggaccacttgggtgtttagcacaagttgtgtcaatttttggggaagacaaatcaaagcttgatgagtttggttgtgtcagtgaccataaccaagctgctaagcttttcaatttgcagcttcatggtcttttcaaaaaactccctcaacaatatcccaattcccgtttcacatacgtagatatcttctctatcaaatccgacctcatcctgaatcattccaaatatggttttgatcattcgataatggtatgttgtggaaccggaggaccaccactgaactacgatgatcaggttggttgcggtaagacagcaagatcaaatggtacgatcataaccgccaaaccttgttatgatagttccaaatatgttaactgggacggcattcattacactgaagctgcaaatcggtttgttgcactacacattctcaccggtaaatactctgagacggcgtcatctttgaatctttagcaatgtaacaaagaaagttacattatcactttctttatggattacatatatatttagttgtatgttaactggtttatttatgattatatgaataatttccataaacttaactgtttcatttccaaaaaaaggcatttttccaattttctttcacaaagatagatgctttgtcacaataaaatgaatctttcaaatttcctg

SEQ ID NO: 99883 - protein, 379 aa, Arabidopsis thaliana; identical to SEQ ID NO: 30118
  peptide (1)..(379): Ceres Seq. ID no. 13603847
  misc_feature (37)..(365): Pfam Name: GDSL-like Lipase/Acylhydrolase Pfam Description: GDSL-like Lipase/Acylhydrolase
  misc_feature (1)..(379): Homolog of NCBI NO: 15229919 NR Description: GDSL-motif lipase/hydrolase protein [Arabidopsis >gi|6729028|gb|AAF27024.1|AC009177_14 putative nodulin thaliana] >gi|15810237|gb|AAL07236.1| putative nodulin protein
  misc_feature (1)..(379): Homolog of NCBI NO: 21553789 NR Description: putative nodulin [Arabidopsis thaliana]
  misc_feature (25)..(379): Homolog of NCBI NO: 23397291 NR Description: putative nodulin [Arabidopsis thaliana]
  misc_feature (9)..(372): Homolog of NCBI NO: 25405771 NR Description: hypothetical protein T22H22.20 [imported] - thaliana >gi|3776573|gb|AAC64890.1| Similar to nodulins and homolog F14J9.5 gi|3482914 from Arabidopsis thaliana BAC
  misc_feature (8)..(372): Homolog of NCBI NO: 18405064 NR Description: GDSL-motif lipase/hydrolase protein [Arabidopsis >gi|26451464|dbj|BAC42831.1| unknown protein [Arabidopsis
  misc_feature (13)..(372): Homolog of NCBI NO: 21537184 NR Description: early nodule-specific protein, putative
  misc_feature (6)..(371): Homolog of NCBI NO: 15217506 NR Description: GDSL-motif lipase/hydrolase protein [Arabidopsis
  misc_feature (35)..(372): Homolog of NCBI NO: 15223585 NR Description: GDSL-motif lipase/hydrolase protein [Arabidopsis
  misc_feature (8)..(368): Homolog of NCBI NO: 15220550 NR Description: GDSL-motif lipase/hydrolase protein [Arabidopsis >gi|11072007|gb|AAG28886.1|AC008113_2 F12A21.4 [Arabidopsis
  misc_feature (34)..(372): Homolog of NCBI NO: 33147016 NR Description: putative early nodulin 8 precursor [Oryza sativa

SEQ ID NO: 99884 - protein, 294 aa, Arabidopsis thaliana; identical to SEQ ID NO: 30119
  peptide (1)..(294): Ceres Seq. ID no. 13603848
  misc_feature (1)..(280): Pfam Name: GDSL-like Lipase/Acylhydrolase Pfam Description: GDSL-like Lipase/Acylhydrolase
  misc_feature (1)..(294): Homolog of NCBI NO: 15229919 NR Description: GDSL-motif lipase/hydrolase protein [Arabidopsis >gi|6729028|gb|AAF27024.1|AC009177_14 putative nodulin thaliana] >gi|15810237|gb|AAL07236.1| putative nodulin protein
  misc_feature (1)..(294): Homolog of NCBI NO: 21553789 NR Description: putative nodulin [Arabidopsis thaliana]
  misc_feature (1)..(294): Homolog of NCBI NO: 23397291 NR Description: putative nodulin [Arabidopsis thaliana]
  misc_feature (1)..(287): Homolog of NCBI NO: 25405771 NR Description: hypothetical protein T22H22.20 [imported] - thaliana >gi|3776573|gb|AAC64890.1| Similar to nodulins and homolog F14J9.5 gi|3482914 from Arabidopsis thaliana BAC
  misc_feature (1)..(287): Homolog of NCBI NO: 18405064 NR Description: GDSL-motif lipase/hydrolase protein [Arabidopsis >gi|26451464|dbj|BAC42831.1| unknown protein [Arabidopsis
  misc_feature (1)..(287): Homolog of NCBI NO: 21537184 NR Description: early nodule-specific protein, putative
  misc_feature (1)..(286): Homolog of NCBI NO: 15217506 NR Description: GDSL-motif lipase/hydrolase protein [Arabidopsis
  misc_feature (1)..(287): Homolog of NCBI NO: 15223585 NR Description: GDSL-motif lipase/hydrolase protein [Arabidopsis
  misc_feature (1)..(283): Homolog of NCBI NO: 15220550 NR Description: GDSL-motif lipase/hydrolase protein [Arabidopsis >gi|11072007|gb|AAG28886.1|AC008113_2 F12A21.4 [Arabidopsis
  misc_feature (1)..(287): Homolog of NCBI NO: 33147016 NR Description: putative early nodulin 8 precursor [Oryza sativa

SEQ ID NO: 99885 - protein, 208 aa, Arabidopsis thaliana; identical to SEQ ID NO: 30120
  peptide (1)..(208): Ceres Seq. ID no. 13603849
  misc_feature (1)..(194): Pfam Name: GDSL-like Lipase/Acylhydrolase Pfam Description: GDSL-like Lipase/Acylhydrolase
  misc_feature (1)..(208): Homolog of NCBI NO: 15229919 NR Description: GDSL-motif lipase/hydrolase protein [Arabidopsis >gi|6729028|gb|AAF27024.1|AC009177_14 putative nodulin thaliana] >gi|15810237|gb|AAL07236.1| putative nodulin protein
  misc_feature (1)..(208): Homolog of NCBI NO: 21553789 NR Description: putative nodulin [Arabidopsis thaliana]
  misc_feature (1)..(208): Homolog of NCBI NO: 23397291 NR Description: putative nodulin [Arabidopsis thaliana]
  misc_feature (1)..(201): Homolog of NCBI NO: 25405771 NR Description: hypothetical protein T22H22.20 [imported] - thaliana >gi|3776573|gb|AAC64890.1| Similar to nodulins and homolog F14J9.5 gi|3482914 from Arabidopsis thaliana BAC
  misc_feature (1)..(201): Homolog of NCBI NO: 18405064 NR Description: GDSL-motif lipase/hydrolase protein [Arabidopsis >gi|26451464|dbj|BAC42831.1| unknown protein [Arabidopsis
  misc_feature (1)..(201): Homolog of NCBI NO: 21537184 NR Description: early nodule-specific protein, putative
  misc_feature (1)..(200): Homolog of NCBI NO: 15217506 NR Description: GDSL-motif lipase/hydrolase protein [Arabidopsis
  misc_feature (1)..(201): Homolog of NCBI NO: 15223585 NR Description: GDSL-motif lipase/hydrolase protein [Arabidopsis
  misc_feature (1)..(197): Homolog of NCBI NO: 15220550 NR Description: GDSL-motif lipase/hydrolase protein [Arabidopsis >gi|11072007|gb|AAG28886.1|AC008113_2 F12A21.4 [Arabidopsis
  misc_feature (1)..(201): Homolog of NCBI NO: 33147016 NR Description: putative early nodulin 8 precursor [Oryza sativa

SEQ ID NO: 99886 - DNA, 798 bp, Arabidopsis thaliana
  misc_feature (1)..(798): Ceres Seq. ID no. 13603869
  misc_feature: MA Experiment ID: 108434 Result: Up-regulated in Transcription
  misc_feature: MA Experiment 108434 PARAMETER Experiment Name: At_Root_Tips_cDNA_P Parameter: Tissue Value: Root Tips
  misc_feature: MA Experiment ID: 108462 Result: Down-regulated in Transcription
  misc_feature: MA Experiment 108462 PARAMETER Experiment Name: At_Germinating_Seeds_cDNA_P Parameter: Age (day) Value: 2 vs. 0
  misc_feature: MA Experiment 108462 PARAMETER Experiment Name: At_Germinating_Seeds_cDNA_P Parameter: Tissue Value: Germinating Seeds
  misc_feature: MA Experiment ID: 108463 Result: Down-regulated in Transcription
  misc_feature: MA Experiment 108463 PARAMETER Experiment Name: At_Germinating_Seeds_cDNA_P Parameter: Age (day) Value: 3 vs. 0
  misc_feature: MA Experiment 108463 PARAMETER Experiment Name: At_Germinating_Seeds_cDNA_P Parameter: Tissue Value: Germinating Seeds
  misc_feature: MA Experiment ID: 108464 Result: Down-regulated in Transcription
  misc_feature: MA Experiment 108464 PARAMETER Experiment Name: At_Germinating_Seeds_cDNA_P Parameter: Age (day) Value: 4 vs. 0
  misc_feature: MA Experiment 108464 PARAMETER Experiment Name: At_Germinating_Seeds_cDNA_P Parameter: Tissue Value: Germinating Seeds
  misc_feature: MA Experiment ID: 108573 Result: Down-regulated in Transcription
  misc_feature: MA Experiment 108573 PARAMETER Experiment Name: At_Drought_cDNA_P Parameter: Timepoint (hr) Value: 6
  misc_feature: MA Experiment 108573 PARAMETER Experiment Name: At_Drought_cDNA_P Parameter: Tissue Value: Aerial
  misc_feature: MA Experiment 108573 PARAMETER Experiment Name: At_Drought_cDNA_P Parameter: Treatment Value: Drought vs. No Drought
  misc_feature: MA Experiment ID: 20000234 Result: Up-regulated in Transcription
  misc_feature: MA Experiment 20000234 PARAMETER Experiment Name: At_Siliques_P Parameter: Age (day) Value: 21
  misc_feature: MA Experiment 20000234 PARAMETER Experiment Name: At_Siliques_P Parameter: Organism Value: A. thaliana
  misc_feature: MA Experiment 20000234 PARAMETER Experiment Name: At_Siliques_P Parameter: Plant Line Value: WS
  misc_feature: MA Experiment 20000234 PARAMETER Experiment Name: At_Siliques_P Parameter: Tissue Value: Less Than 5mm Siliques vs. Whole Plant
  misc_feature: MA Experiment ID: 20000437 Result: Down-regulated in Transcription
  misc_feature: MA Experiment 20000437 PARAMETER Experiment Name: At_Drought_P Parameter: Age (day) Value: 8
  misc_feature: MA Experiment 20000437 PARAMETER Experiment Name: At_Drought_P Parameter: Organism Value: A. thaliana
  misc_feature: MA Experiment 20000437 PARAMETER Experiment Name: At_Drought_P Parameter: Plant Line Value: WS
  misc_feature: MA Experiment 20000437 PARAMETER Experiment Name: At_Drought_P Parameter: Timepoint (hr) Value: 24
  misc_feature: MA Experiment 20000437 PARAMETER Experiment Name: At_Drought_P Parameter: Tissue Value: Whole Plant
  misc_feature: MA Experiment 20000437 PARAMETER Experiment Name: At_Drought_P Parameter: Treatment Value: Drought vs. No Drought
  misc_feature: MA Experiment ID: 20001557 Result: Up-regulated in Transcription
  misc_feature: MA Experiment 20001557 PARAMETER Experiment Name: At_Drought_Soil_Dry_P Parameter: Age (day) Value: 27
  misc_feature: MA Experiment 20001557 PARAMETER Experiment Name: At_Drought_Soil_Dry_P Parameter: Organism Value: A. thaliana
  misc_feature: MA Experiment 20001557 PARAMETER Experiment Name: At_Drought_Soil_Dry_P Parameter: Plant Line Value: WS
  misc_feature: MA Experiment 20001557 PARAMETER Experiment Name: At_Drought_Soil_Dry_P Parameter: Post Timepoint (hr) Value: 3
  misc_feature: MA Experiment 20001557 PARAMETER Experiment Name: At_Drought_Soil_Dry_P Parameter: Post-Treatment Value: Re-Water vs. No Drought
  misc_feature: MA Experiment 20001557 PARAMETER Experiment Name: At_Drought_Soil_Dry_P Parameter: Timepoint (day) Value: 13
  misc_feature: MA Experiment 20001557 PARAMETER Experiment Name: At_Drought_Soil_Dry_P Parameter: Treatment Value: Drought vs. No Drought
  misc_feature: MA Experiment ID: 20001558 Result: Up-regulated in Transcription
  misc_feature: MA Experiment 20001558 PARAMETER Experiment Name: At_Drought_Soil_Dry_P Parameter: Age (day) Value: 27
  misc_feature: MA Experiment 20001558 PARAMETER Experiment Name: At_Drought_Soil_Dry_P Parameter: Organism Value: A. thaliana
  misc_feature: MA Experiment 20001558 PARAMETER Experiment Name: At_Drought_Soil_Dry_P Parameter: Plant Line Value: WS
  misc_feature: MA Experiment 20001558 PARAMETER Experiment Name: At_Drought_Soil_Dry_P Parameter: Post Timepoint (hr) Value: 6
  misc_feature: MA Experiment 20001558 PARAMETER Experiment Name: At_Drought_Soil_Dry_P Parameter: Post-Treatment Value: Re-Water vs. No Drought
  misc_feature: MA Experiment 20001558 PARAMETER Experiment Name: At_Drought_Soil_Dry_P Parameter: Timepoint (day) Value: 13
  misc_feature: MA Experiment 20001558 PARAMETER Experiment Name: At_Drought_Soil_Dry_P Parameter: Treatment Value: Drought vs. No Drought
  misc_feature: MA Experiment ID: 20001560 Result: Up-regulated in Transcription
  misc_feature: MA Experiment 20001560 PARAMETER Experiment Name: At_Drought_Soil_Dry_P Parameter: Age (day) Value: 28
  misc_feature: MA Experiment 20001560 PARAMETER Experiment Name: At_Drought_Soil_Dry_P Parameter: Organism Value: A. thaliana
  misc_feature: MA Experiment 20001560 PARAMETER Experiment Name: At_Drought_Soil_Dry_P Parameter: Plant Line Value: WS
  misc_feature: MA Experiment 20001560 PARAMETER Experiment Name: At_Drought_Soil_Dry_P Parameter: Post Timepoint (hr) Value: None
  misc_feature: MA Experiment 20001560 PARAMETER Experiment Name: At_Drought_Soil_Dry_P Parameter: Post-Treatment Value: None
  misc_feature: MA Experiment 20001560 PARAMETER Experiment Name: At_Drought_Soil_Dry_P Parameter: Timepoint (day) Value: 14
  misc_feature: MA Experiment 20001560 PARAMETER Experiment Name: At_Drought_Soil_Dry_P Parameter: Treatment Value: Drought vs. No Drought
  misc_feature: MA Experiment ID: 20001757 Result: Up-regulated in Transcription
  misc_feature: MA Experiment 20001757 PARAMETER Experiment Name: At_50mM_NH4NO3_L-to-H_P Parameter: Timepoint (hr) Value: 6
  misc_feature: MA Experiment 20001757 PARAMETER Experiment Name: At_50mM_NH4NO3_L-to-H_P Parameter: Tissue Value: Leaf
  misc_feature: MA Experiment 20001757 PARAMETER Experiment Name: At_50mM_NH4NO3_L-to-H_P Parameter: Treatment Value: 50mM NH4NO3 vs 100mM Mannitol
aggtcggcggttccatcaccacaacgccggacgacaatgggtattgatctgatcgccggaggtaagagtaagaagaccaaaaggacagctccaaagtctgatgatgtctacctcaagcttactgtcaagctttaccggtttctggtaaggagaactaatagcaagttcaatggtgtgatattgaagaggcttttcatgagcaaagtcaacaaagctcctctttctctatctaggcttgtggagttcatgactggcaaggaagataagattgccgtcttggttggaactataactgatgatttgagggtacacgagattccagccatgaaagtgactgccttgaggttcacagagagagcaagggctcgcattgagaaagctggaggtgaatgcttaacctttgaccagctcgctctcagagctccattgggccagaacacggttcttcttagaggacctaagaattcacgtgaagcagtgaagcatttcggacctgctcctggtgtgccacacagtcactccaagccatatgttcgggccaagggaaggaagttcgagaaggccagaggaaagaggaagagtcgtggattcaaggtttaagaaagttgttgccgccattggacttgattctggagtactgttgcttcttggttgcttttgtaatcggatttttgttagggaactctgttttttctttcctctttcagacatgctactaagtttgcttctactggattcatcgtgtggttattacacttgcagctttactatgttaaacttaattcattatctttctac

SEQ ID NO: 99887 - protein, 199 aa, Arabidopsis thaliana; identical to SEQ ID NO: 36513
  peptide (1)..(199): Ceres Seq. ID no. 13603870
  misc_feature (13)..(199): Homolog of NCBI NO: 15230011 NR Description: 60S ribosomal protein L18 (RPL18B) [Arabidopsis >gi|21431838|sp|P42791|RL18_ARATH 60S ribosomal protein L18 putative 60S ribosomal protein L18 [Arabidopsis thaliana]
  misc_feature (13)..(199): Homolog of NCBI NO: 606970 NR Description: cytoplasmic ribosomal protein L18
  misc_feature (13)..(199): Homolog of NCBI NO: 15241061 NR Description: 60S ribosomal protein L18 (RPL18C) [Arabidopsis >gi|15810153|gb|AAL07220.1| putative 60S ribosomal protein thaliana] >gi|21689771|gb|AAM67529.1| putative 60S ribosomal
  misc_feature (13)..(199): Homolog of NCBI NO: 34897628 NR Description: cytoplasmic ribosomal protein L18 [Oryza sativa]
  misc_feature (13)..(199): Homolog of NCBI NO: 34393858 NR Description: putative cytoplasmic ribosomal protein L18 [Oryza
  misc_feature (16)..(199): Homolog of NCBI NO: 6094021 NR Description: 60S RIBOSOMAL PROTEIN L18
  misc_feature (14)..(199): Homolog of NCBI NO: 7440855 NR Description: ribosomal protein L18, cytosolic - Arabidopsis
  misc_feature (13)..(175): Homolog of NCBI NO: 28798549 NR Description: 60S ribosomal protein [Medicago sativa]
  misc_feature (13)..(198): Homolog of NCBI NO: 28630356 NR Description: ribosomal protein L18 [Petromyzon marinus]
  misc_feature (13)..(198): Homolog of NCBI NO: 13592057 NR Description: ribosomal protein L18 [Rattus norvegicus]

SEQ ID NO: 99888 - protein, 187 aa, Arabidopsis thaliana; identical to SEQ ID NO: 36514
  peptide (1)..(187): Ceres Seq. ID no. 13603871
  misc_feature (1)..(187): Homolog of NCBI NO: 15230011 NR Description: 60S ribosomal protein L18 (RPL18B) [Arabidopsis >gi|21431838|sp|P42791|RL18_ARATH 60S ribosomal protein L18 putative 60S ribosomal protein L18 [Arabidopsis thaliana]
  misc_feature (1)..(187): Homolog of NCBI NO: 606970 NR Description: cytoplasmic ribosomal protein L18
  misc_feature (1)..(187): Homolog of NCBI NO: 15241061 NR Description: 60S ribosomal protein L18 (RPL18C) [Arabidopsis >gi|15810153|gb|AAL07220.1| putative 60S ribosomal protein thaliana] >gi|21689771|gb|AAM67529.1| putative 60S ribosomal
  misc_feature (1)..(187): Homolog of NCBI NO: 34897628 NR Description: cytoplasmic ribosomal protein L18 [Oryza sativa]
  misc_feature (1)..(187): Homolog of NCBI NO: 34393858 NR Description: putative cytoplasmic ribosomal protein L18 [Oryza
  misc_feature (4)..(187): Homolog of NCBI NO: 6094021 NR Description: 60S RIBOSOMAL PROTEIN L18
  misc_feature (2)..(187): Homolog of NCBI NO: 7440855 NR Description: ribosomal protein L18, cytosolic - Arabidopsis
  misc_feature (1)..(163): Homolog of NCBI NO: 28798549 NR Description: 60S ribosomal protein [Medicago sativa]
  misc_feature (1)..(186): Homolog of NCBI NO: 28630356 NR Description: ribosomal protein L18 [Petromyzon marinus]
  misc_feature (1)..(186): Homolog of NCBI NO: 13592057 NR Description: ribosomal protein L18 [Rattus norvegicus]

SEQ ID NO: 99889 - protein, 134 aa, Arabidopsis thaliana; identical to SEQ ID NO: 36515
  peptide (1)..(134): Ceres Seq. ID no. 13603872
  misc_feature (1)..(134): Homolog of NCBI NO: 15230011 NR Description: 60S ribosomal protein L18 (RPL18B) [Arabidopsis >gi|21431838|sp|P42791|RL18_ARATH 60S ribosomal protein L18 putative 60S ribosomal protein L18 [Arabidopsis thaliana]
  misc_feature (1)..(134): Homolog of NCBI NO: 606970 NR Description: cytoplasmic ribosomal protein L18
  misc_feature (1)..(134): Homolog of NCBI NO: 15241061 NR Description: 60S ribosomal protein L18 (RPL18C) [Arabidopsis >gi|15810153|gb|AAL07220.1| putative 60S ribosomal protein thaliana] >gi|21689771|gb|AAM67529.1| putative 60S ribosomal
  misc_feature (1)..(134): Homolog of NCBI NO: 34897628 NR Description: cytoplasmic ribosomal protein L18 [Oryza sativa]
  misc_feature (1)..(134): Homolog of NCBI NO: 34393858 NR Description: putative cytoplasmic ribosomal protein L18 [Oryza
  misc_feature (1)..(134): Homolog of NCBI NO: 6094021 NR Description: 60S RIBOSOMAL PROTEIN L18
  misc_feature (1)..(134): Homolog of NCBI NO: 7440855 NR Description: ribosomal protein L18, cytosolic - Arabidopsis
  misc_feature (1)..(110): Homolog of NCBI NO: 28798549 NR Description: 60S ribosomal protein [Medicago sativa]
  misc_feature (1)..(133): Homolog of NCBI NO: 28630356 NR Description: ribosomal protein L18 [Petromyzon marinus]
  misc_feature (1)..(133): Homolog of NCBI NO: 13592057 NR Description: ribosomal protein L18 [Rattus norvegicus]

SEQ ID NO: 99890 - DNA, 1098 bp, Arabidopsis thaliana
  misc_feature (1)..(1098): Ceres Seq. ID no. 13603873
  misc_feature: MA Experiment ID: 108462 Result: Up-regulated in Transcription
  misc_feature: MA Experiment 108462 PARAMETER Experiment Name: At_Germinating_Seeds_cDNA_P Parameter: Age (day) Value: 2 vs. 0
  misc_feature: MA Experiment 108462 PARAMETER Experiment Name: At_Germinating_Seeds_cDNA_P Parameter: Tissue Value: Germinating Seeds
  misc_feature: MA Experiment ID: 108464 Result: Up-regulated in Transcription
  misc_feature: MA Experiment 108464 PARAMETER Experiment Name: At_Germinating_Seeds_cDNA_P Parameter: Age (day) Value: 4 vs. 0
  misc_feature: MA Experiment 108464 PARAMETER Experiment Name: At_Germinating_Seeds_cDNA_P Parameter: Tissue Value: Germinating Seeds
  misc_feature: MA Experiment ID: 108585 Result: Down-regulated in Transcription
  misc_feature: MA Experiment 108585 PARAMETER Experiment Name: At_5mM_NaNP_cDNA_P Parameter: Timepoint (hr) Value: 6
  misc_feature: MA Experiment 108585 PARAMETER Experiment Name: At_5mM_NaNP_cDNA_P Parameter: Tissue Value: Aerial
  misc_feature: MA Experiment 108585 PARAMETER Experiment Name: At_5mM_NaNP_cDNA_P Parameter: Treatment Value: null
  misc_feature: MA Experiment ID: 108595 Result: Down-regulated in Transcription
  misc_feature: MA Experiment 108595 PARAMETER Experiment Name: At_Ler-pi_Ovule_cDNA_P Parameter: Plant Line Value: null
  misc_feature: MA Experiment ID: 108668 Result: Down-regulated in Transcription
  misc_feature: MA Experiment 108668 PARAMETER Experiment Name: At_2mM_SA_cDNA_P Parameter: Plant Line Value: WS
  misc_feature: MA Experiment 108668 PARAMETER Experiment Name: At_2mM_SA_cDNA_P Parameter: Timepoint (hr) Value: 6
  misc_feature: MA Experiment 108668 PARAMETER Experiment Name: At_2mM_SA_cDNA_P Parameter: Treatment Value: 2mM SA vs. No Treatment
  misc_feature: MA Experiment ID: 20000070 Result: Down-regulated in Transcription
  misc_feature: MA Experiment 20000070 PARAMETER Experiment Name: At_100uM_ABA_Mutants_cDNA_P Parameter: Plant Line Value: CS24
  misc_feature: MA Experiment 20000070 PARAMETER Experiment Name: At_100uM_ABA_Mutants_cDNA_P Parameter: Timepoint (hr) Value: 6
  misc_feature: MA Experiment 20000070 PARAMETER Experiment Name: At_100uM_ABA_Mutants_cDNA_P Parameter: Tissue Value: Aerial
  misc_feature: MA Experiment 20000070 PARAMETER Experiment Name: At_100uM_ABA_Mutants_cDNA_P Parameter: Treatment Value: 100uM ABA vs. No Treatment
  misc_feature: MA Experiment ID: 20000087 Result: Down-regulated in Transcription
  misc_feature: MA Experiment 20000087 PARAMETER Experiment Name: At_100uM_ABA_Mutants_cDNA_P Parameter: Plant Line Value: WS
  misc_feature: MA Experiment 20000087 PARAMETER Experiment Name: At_100uM_ABA_Mutants_cDNA_P Parameter: Timepoint (hr) Value: 6
  misc_feature: MA Experiment 20000087 PARAMETER Experiment Name: At_100uM_ABA_Mutants_cDNA_P Parameter: Tissue Value: Aerial
  misc_feature: MA Experiment 20000087 PARAMETER Experiment Name: At_100uM_ABA_Mutants_cDNA_P Parameter: Treatment Value: 100uM ABA vs. No Treatment
  misc_feature: MA Experiment ID: 20000180 Result: Up-regulated in Transcription
  misc_feature: MA Experiment 20000180 PARAMETER Experiment Name: At_Germinating_Seeds_P Parameter: Age (hr) Value: 24 vs. 0
  misc_feature: MA Experiment 20000180 PARAMETER Experiment Name: At_Germinating_Seeds_P Parameter: Tissue Value: Germinating Seeds
  misc_feature: MA Experiment ID: 20000436 Result: Down-regulated in Transcription
  misc_feature: MA Experiment 20000436 PARAMETER Experiment Name: At_Drought_P Parameter: Age (day) Value: 7
  misc_feature: MA Experiment 20000436 PARAMETER Experiment Name: At_Drought_P Parameter: Organism Value: A. thaliana
  misc_feature: MA Experiment 20000436 PARAMETER Experiment Name: At_Drought_P Parameter: Plant Line Value: WS
  misc_feature: MA Experiment 20000436 PARAMETER Experiment Name: At_Drought_P Parameter: Timepoint (hr) Value: 12
  misc_feature: MA Experiment 20000436 PARAMETER Experiment Name: At_Drought_P Parameter: Tissue Value: Whole Plant
  misc_feature: MA Experiment 20000436 PARAMETER Experiment Name: At_Drought_P Parameter: Treatment Value: Drought vs. No Drought
  misc_feature: MA Experiment ID: 20000437 Result: Down-regulated in Transcription
  misc_feature: MA Experiment 20000437 PARAMETER Experiment Name: At_Drought_P Parameter: Age (day) Value: 8
  misc_feature: MA Experiment 20000437 PARAMETER Experiment Name: At_Drought_P Parameter: Organism Value: A. thaliana
  misc_feature: MA Experiment 20000437 PARAMETER Experiment Name: At_Drought_P Parameter: Plant Line Value: WS
  misc_feature: MA Experiment 20000437 PARAMETER Experiment Name: At_Drought_P Parameter: Timepoint (hr) Value: 24
  misc_feature: MA Experiment 20000437 PARAMETER Experiment Name: At_Drought_P Parameter: Tissue Value: Whole Plant
  misc_feature: MA Experiment 20000437 PARAMETER Experiment Name: At_Drought_P Parameter: Treatment Value: Drought vs. No Drought
  misc_feature: MA Experiment ID: 20001247 Result: Down-regulated in Transcription
  misc_feature: MA Experiment 20001247 PARAMETER Experiment Name: At_Far-red-induction_P Parameter: Age (day) Value: 7
  misc_feature: MA Experiment 20001247 PARAMETER Experiment Name: At_Far-red-induction_P Parameter: Light Value: Far-red vs. White
  misc_feature: MA Experiment 20001247 PARAMETER Experiment Name: At_Far-red-induction_P Parameter: Organism Value: A. thaliana
  misc_feature: MA Experiment 20001247 PARAMETER Experiment Name: At_Far-red-induction_P Parameter: Plant Line Value: Columbia
  misc_feature: MA Experiment 20001247 PARAMETER Experiment Name: At_Far-red-induction_P Parameter: Timepoint (hr) Value: 1
  misc_feature: MA Experiment 20001247 PARAMETER Experiment Name: At_Far-red-induction_P Parameter: Tissue Value: Whole Plant
  misc_feature: MA Experiment ID: 20001248 Result: Down-regulated in Transcription
  misc_feature: MA Experiment 20001248 PARAMETER Experiment Name: At_Far-red-induction_P Parameter: Age (day) Value: 7
  misc_feature: MA Experiment 20001248 PARAMETER Experiment Name: At_Far-red-induction_P Parameter: Light Value: Far-red vs. White
  misc_feature: MA Experiment 20001248 PARAMETER Experiment Name: At_Far-red-induction_P Parameter: Organism Value: A. thaliana
  misc_feature: MA Experiment 20001248 PARAMETER Experiment Name: At_Far-red-induction_P Parameter: Plant Line Value: Columbia
  misc_feature: MA Experiment 20001248 PARAMETER Experiment Name: At_Far-red-induction_P Parameter: Timepoint (hr) Value: 4
  misc_feature: MA Experiment 20001248 PARAMETER Experiment Name: At_Far-red-induction_P Parameter: Tissue Value: Whole Plant
  misc_feature: MA Experiment ID: 20001450 Result: Down-regulated in Transcription
  misc_feature: MA Experiment 20001450 PARAMETER Experiment Name: At_Far-red-induction_P Parameter: Age (day) Value: 7
  misc_feature: MA Experiment 20001450 PARAMETER Experiment Name: At_Far-red-induction_P Parameter: Light Value: Far-red vs. White
  misc_feature: MA Experiment 20001450 PARAMETER Experiment Name: At_Far-red-induction_P Parameter: Organism Value: A. thaliana
  misc_feature: MA Experiment 20001450 PARAMETER Experiment Name: At_Far-red-induction_P Parameter: Plant Line Value: Columbia
  misc_feature: MA Experiment 20001450 PARAMETER Experiment Name: At_Far-red-induction_P Parameter: Timepoint (hr) Value: 8
  misc_feature: MA Experiment 20001450 PARAMETER Experiment Name: At_Far-red-induction_P Parameter: Tissue Value: Whole Plant
ccctcccatttgtcatcttatcttctgcgattactggtaaagtgagaaatccgttaatccctagagaaactgtaatcgtcgcggtgattcggagaaattcttctgcttccgcggaaaatgtcactaacccagatcgtgaatccaatcatatatccatctcgcacaattccacggcgtttcacggcgatctcgccttttaaaaccctaagtccccaattttcccgccacccacctcacgcactgtctcgtagactcttccttccttctgtttcctctatatgggatgccataaccggcggcggagattcgaaccctcgtgaggccatcgcagcggttcgacgcggaatgcagctcttcagacagggtgatgttgctggatcggtggcagagttcgatagagcaatcattttggatcccaggcaaaaggcatatctttggcaacgcgggctttctctttactatgtagataggtttgaagaaggtgcagagcagttccggatagatgttgctcagaatcctaatgacacagaggagtccatttggtgctttatctgcgaggcgaggctccatggtgttgatgttgcacgaacacagtttctcgaggttggtagagattctcggcctgtgatgcgagaagcttataatctattcaagaatggtggtgatcctgaaaagttagtaaatgacttctctagcggtcaagcaagcgaatacttctatgcttctctgtacgcagggctctactatgaagctgagggtaaatcagaaaacgcaaagtttcatttaaccgcggcttgtggatctccatatgggcagaggtctgatgattatatggcttcacttgctaaagtccattgcctttgtagaaactggagctccggtattctttgaaccggttcatggttttgtggagccaacatattagttattaaggcccaatttttgaaatatcagcccaattaaaaattggacctgggtttgcgatttccaacctttatttatgggcatgaataaagaaagtaccattcacaaacattataacaaataggcaacattgtgccattttggagtaccattcacaaacattttaaccaaatt

SEQ ID NO: 99891 - protein, 257 aa, Arabidopsis thaliana; identical to SEQ ID NO: 40362
  peptide (1)..(257): Ceres Seq. ID no. 13603874
  misc_feature (1)..(257): Homolog of NCBI NO: 30679555 NR Description: expressed protein [Arabidopsis thaliana] Unknown protein [Arabidopsis thaliana]
  misc_feature (1)..(188): Homolog of NCBI NO: 34895050 NR Description: B1045F02.20 [Oryza sativa (japonica
  misc_feature (64)..(252): Homolog of NCBI NO: 23124977 NR Description: hypothetical protein [Nostoc punctiforme]
  misc_feature (66)..(246): Homolog of NCBI NO: 32477509 NR Description: conserved hypothetical protein [Pirellula sp.]

SEQ ID NO: 99892 - protein, 181 aa, Arabidopsis thaliana; identical to SEQ ID NO: 40363
  peptide (1)..(181): Ceres Seq. ID no. 13603875
  misc_feature (1)..(181): Homolog of NCBI NO: 30679555 NR Description: expressed protein [Arabidopsis thaliana] Unknown protein [Arabidopsis thaliana]
  misc_feature (1)..(112): Homolog of NCBI NO: 34895050 NR Description: B1045F02.20 [Oryza sativa (japonica
  misc_feature (1)..(176): Homolog of NCBI NO: 23124977 NR Description: hypothetical protein [Nostoc punctiforme]
  misc_feature (1)..(170): Homolog of NCBI NO: 32477509 NR Description: conserved hypothetical protein [Pirellula sp.]

SEQ ID NO: 99893 - DNA, 856 bp, Arabidopsis thaliana
  misc_feature (1)..(856): Ceres Seq. ID no. 13603876
  misc_feature: MA Experiment ID: 108462 Result: Up-regulated in Transcription
  misc_feature: MA Experiment 108462 PARAMETER Experiment Name: At_Germinating_Seeds_cDNA_P Parameter: Age (day) Value: 2 vs. 0
  misc_feature: MA Experiment 108462 PARAMETER Experiment Name: At_Germinating_Seeds_cDNA_P Parameter: Tissue Value: Germinating Seeds
  misc_feature: MA Experiment ID: 108464 Result: Up-regulated in Transcription
  misc_feature: MA Experiment 108464 PARAMETER Experiment Name: At_Germinating_Seeds_cDNA_P Parameter: Age (day) Value: 4 vs. 0
  misc_feature: MA Experiment 108464 PARAMETER Experiment Name: At_Germinating_Seeds_cDNA_P Parameter: Tissue Value: Germinating Seeds
  misc_feature: MA Experiment ID: 108569 Result: Down-regulated in Transcription
  misc_feature: MA Experiment 108569 PARAMETER Experiment Name: At_0.001%_MeJA__cDNA_P Parameter: Timepoint (hr) Value: 6
  misc_feature: MA Experiment 108569 PARAMETER Experiment Name: At_0.001%_MeJA__cDNA_P Parameter: Tissue Value: Aerial
  misc_feature: MA Experiment 108569 PARAMETER Experiment Name: At_0.001%_MeJA__cDNA_P Parameter: Treatment Value: 0.001% MeJA vs. No Treatment
  misc_feature: MA Experiment ID: 108594 Result: Down-regulated in Transcription
  misc_feature: MA Experiment 108594 PARAMETER Experiment Name: At_Ler-rhl_Root_cDNA_P Parameter: Plant Line Value: null
  misc_feature: MA Experiment ID: 108667 Result: Down-regulated in Transcription
  misc_feature: MA Experiment 108667 PARAMETER Experiment Name: At_2mM_SA_cDNA_P Parameter: Plant Line Value: WS
  misc_feature: MA Experiment 108667 PARAMETER Experiment Name: At_2mM_SA_cDNA_P Parameter: Timepoint (hr) Value: 1
  misc_feature: MA Experiment 108667 PARAMETER Experiment Name: At_2mM_SA_cDNA_P Parameter: Treatment Value: 2mM SA vs. No Treatment
  misc_feature: MA Experiment ID: 20000030 Result: Up-regulated in Transcription
  misc_feature: MA Experiment 20000030 PARAMETER Experiment Name: At_CS6630_Roots_cDNA_P Parameter: Plant Line Value: CS6630 vs. WS
  misc_feature: MA Experiment 20000030 PARAMETER Experiment Name: At_CS6630_Roots_cDNA_P Parameter: Tissue Value: Roots
  misc_feature: MA Experiment ID: 20000111 Result: Down-regulated in Transcription
  misc_feature: MA Experiment 20000111 PARAMETER Experiment Name: At_42deg_Heat_cDNA_P Parameter: Temperature (deg C) Value: 42 vs. 22
  misc_feature: MA Experiment 20000111 PARAMETER Experiment Name: At_42deg_Heat_cDNA_P Parameter: Timepoint (hr) Value: 6
  misc_feature: MA Experiment 20000111 PARAMETER Experiment Name: At_42deg_Heat_cDNA_P Parameter: Tissue Value: Aerial
  misc_feature: MA Experiment ID: 20000113 Result: Down-regulated in Transcription
  misc_feature: MA Experiment 20000113 PARAMETER Experiment Name: At_42deg_Heat_cDNA_P Parameter: Temperature (deg C) Value: 42 vs. 22
  misc_feature: MA Experiment 20000113 PARAMETER Experiment Name: At_42deg_Heat_cDNA_P Parameter: Timepoint (hr) Value: 8
  misc_feature: MA Experiment 20000113 PARAMETER Experiment Name: At_42deg_Heat_cDNA_P Parameter: Tissue Value: Aerial
  misc_feature: MA Experiment ID: 20000144 Result: Down-regulated in Transcription
  misc_feature: MA Experiment 20000144 PARAMETER Experiment Name: At_42deg_Heat_cDNA_P Parameter: Temperature (deg C) Value: 42 vs. 22
  misc_feature: MA Experiment 20000144 PARAMETER Experiment Name: At_42deg_Heat_cDNA_P Parameter: Timepoint (hr) Value: 1
  misc_feature: MA Experiment 20000144 PARAMETER Experiment Name: At_42deg_Heat_cDNA_P Parameter: Tissue Value: Aerial
  misc_feature: MA Experiment ID: 20000171 Result: Down-regulated in Transcription
  misc_feature: MA Experiment 20000171 PARAMETER Experiment Name: At_42deg_Heat_P Parameter: Age (day) Value: 14
  misc_feature: MA Experiment 20000171 PARAMETER Experiment Name: At_42deg_Heat_P Parameter: Organism Value: A. thaliana
  misc_feature: MA Experiment 20000171 PARAMETER Experiment Name: At_42deg_Heat_P Parameter: Plant Line Value: WS
  misc_feature: MA Experiment 20000171 PARAMETER Experiment Name: At_42deg_Heat_P Parameter: Temperature (deg C) Value: 42 vs. 22
  misc_feature: MA Experiment 20000171 PARAMETER Experiment Name: At_42deg_Heat_P Parameter: Timepoint (hr) Value: 1
  misc_feature: MA Experiment 20000171 PARAMETER Experiment Name: At_42deg_Heat_P Parameter: Tissue Value: Aerial
  misc_feature: MA Experiment ID: 20000173 Result: Down-regulated in Transcription
  misc_feature: MA Experiment 20000173 PARAMETER Experiment Name: At_42deg_Heat_P Parameter: Age (day) Value: 14
  misc_feature: MA Experiment 20000173 PARAMETER Experiment Name: At_42deg_Heat_P Parameter: Organism Value: A. thaliana
  misc_feature: MA Experiment 20000173 PARAMETER Experiment Name: At_42deg_Heat_P Parameter: Plant Line Value: WS
  misc_feature: MA Experiment 20000173 PARAMETER Experiment Name: At_42deg_Heat_P Parameter: Temperature (deg C) Value: 42 vs. 22
  misc_feature: MA Experiment 20000173 PARAMETER Experiment Name: At_42deg_Heat_P Parameter: Timepoint (hr) Value: 6
  misc_feature: MA Experiment 20000173 PARAMETER Experiment Name: At_42deg_Heat_P Parameter: Tissue Value: Aerial
  misc_feature: MA Experiment ID: 20000184 Result: Down-regulated in Transcription
  misc_feature: MA Experiment 20000184 PARAMETER Experiment Name: At_Shoots__P Parameter: Age (day) Value: 7
  misc_feature: MA Experiment 20000184 PARAMETER Experiment Name: At_Shoots__P Parameter: Tissue Value: Shoots vs. Whole Plant
  misc_feature: MA Experiment ID: 20000185 Result: Down-regulated in Transcription
  misc_feature: MA Experiment 20000185 PARAMETER Experiment Name: At_Roots__P Parameter: Age (day) Value: 7 vs. 21
  misc_feature: MA Experiment 20000185 PARAMETER Experiment Name: At_Roots__P Parameter: Organism Value: A. thaliana
  misc_feature: MA Experiment 20000185 PARAMETER Experiment Name: At_Roots__P Parameter: Tissue Value: Roots vs. Whole Plant
  misc_feature: MA Experiment ID: 20000227 Result: Down-regulated in Transcription
  misc_feature: MA Experiment 20000227 PARAMETER Experiment Name: At_Root-Tips-vs-Tops_P Parameter: Tissue Value: Root Tips vs. Root Tops
  misc_feature: MA Experiment ID: 20000234 Result: Down-regulated in Transcription
  misc_feature: MA Experiment 20000234 PARAMETER Experiment Name: At_Siliques_P Parameter: Age (day) Value: 21
  misc_feature: MA Experiment 20000234 PARAMETER Experiment Name: At_Siliques_P Parameter: Organism Value: A. thaliana
  misc_feature: MA Experiment 20000234 PARAMETER Experiment Name: At_Siliques_P Parameter: Plant Line Value: WS
  misc_feature: MA Experiment 20000234 PARAMETER Experiment Name: At_Siliques_P Parameter: Tissue Value: Less Than 5mm Siliques vs. Whole Plant
  misc_feature: MA Experiment ID: 20000235 Result: Down-regulated in Transcription
  misc_feature: MA Experiment 20000235 PARAMETER Experiment Name: At_Siliques_P Parameter: Age (day) Value: 21
  misc_feature: MA Experiment 20000235 PARAMETER Experiment Name: At_Siliques_P Parameter: Organism Value: A. thaliana
  misc_feature: MA Experiment 20000235 PARAMETER Experiment Name: At_Siliques_P Parameter: Plant Line Value: WS
  misc_feature: MA Experiment 20000235 PARAMETER Experiment Name: At_Siliques_P Parameter: Tissue Value: 5-10mm Siliques vs. Whole Plant
  misc_feature: MA Experiment ID: 20000264 Result: Down-regulated in Transcription
  misc_feature: MA Experiment 20000264 PARAMETER Experiment Name: At_Open_Flower_P Parameter: Age (day) Value: 21
  misc_feature: MA Experiment 20000264 PARAMETER Experiment Name: At_Open_Flower_P Parameter: Plant Line Value: WS
  misc_feature: MA Experiment 20000264 PARAMETER Experiment Name: At_Open_Flower_P Parameter: Tissue Value: Open Flower vs. Whole Plant
  misc_feature: MA Experiment ID: 20000265 Result: Down-regulated in Transcription
  misc_feature: MA Experiment 20000265 PARAMETER Experiment Name: At_Open_Flower_P Parameter: Age (day) Value: 21
  misc_feature: MA Experiment 20000265 PARAMETER Experiment Name: At_Open_Flower_P Parameter: Plant Line Value: WS
  misc_feature: MA Experiment 20000265 PARAMETER Experiment Name: At_Open_Flower_P Parameter: Tissue Value: Closed Flower vs. Whole Plant
  misc_feature: MA Experiment ID: 20000286 Result: Down-regulated in Transcription
  misc_feature: MA Experiment 20000286 PARAMETER Experiment Name: At_Open_Flower_P Parameter: Age (day) Value: 21
  misc_feature: MA Experiment 20000286 PARAMETER Experiment Name: At_Open_Flower_P Parameter: Plant Line Value: WS
  misc_feature: MA Experiment 20000286 PARAMETER Experiment Name: At_Open_Flower_P Parameter: Tissue Value: Half Open vs. Whole Plant
  misc_feature: MA Experiment ID: 20000438 Result: Down-regulated in Transcription
  misc_feature: MA Experiment 20000438 PARAMETER Experiment Name: At_Shoots__P Parameter: Age (day) Value: 14
  misc_feature: MA Experiment 20000438 PARAMETER Experiment Name: At_Shoots__P Parameter: Tissue Value: Shoots vs. Whole Plant
  misc_feature: MA Experiment ID: 20000439 Result: Down-regulated in Transcription
  misc_feature: MA Experiment 20000439 PARAMETER Experiment Name: At_Roots__P Parameter: Age (day) Value: 14 vs. 21
  misc_feature: MA Experiment 20000439 PARAMETER Experiment Name: At_Roots__P Parameter: Organism Value: A. thaliana
  misc_feature: MA Experiment 20000439 PARAMETER Experiment Name: At_Roots__P Parameter: Tissue Value: Roots vs. Whole Plant
  misc_feature: MA Experiment ID: 20000441 Result: Up-regulated in Transcription
  misc_feature: MA Experiment 20000441 PARAMETER Experiment Name: At_1uM_BR-BRZ__P Parameter: Tissue Value: Shoot Apices
  misc_feature: MA Experiment 20000441 PARAMETER Experiment Name: At_1uM_BR-BRZ__P Parameter: Treatment Value: 1uM BR vs. No Treatment
  misc_feature: MA Experiment ID: 20000443 Result: Up-regulated in Transcription
  misc_feature: MA Experiment 20000443 PARAMETER Experiment Name: At_1uM_BR-BRZ__P Parameter: Tissue Value: Shoot Apices
  misc_feature: MA Experiment 20000443 PARAMETER Experiment Name: At_1uM_BR-BRZ__P Parameter: Treatment Value: 1uM BRZ vs. No Treatment
  misc_feature: MA Experiment ID: 20000495 Result: Down-regulated in Transcription
  misc_feature: MA Experiment 20000495 PARAMETER Experiment Name: At_Guard_Cells_P Parameter: Harvest Date Value: 8/2/2002
  misc_feature: MA Experiment 20000495 PARAMETER Experiment Name: At_Guard_Cells_P Parameter: Organism Value: A. thaliana
  misc_feature: MA Experiment 20000495 PARAMETER Experiment Name: At_Guard_Cells_P Parameter: Tissue Value: Guard Cells vs. Leaves
  misc_feature: MA Experiment ID: 20000573 Result: Down-regulated in Transcription
  misc_feature: MA Experiment 20000573 PARAMETER Experiment Name: At_100uM_ABA_Mutants__P Parameter: Organism Value: A. thaliana
  misc_feature: MA Experiment 20000573 PARAMETER Experiment Name: At_100uM_ABA_Mutants__P Parameter: Plant Line Value: CS22 vs. Ler wt
  misc_feature: MA Experiment 20000573 PARAMETER Experiment Name: At_100uM_ABA_Mutants__P Parameter: Timepoint (hr) Value: N/A
  misc_feature: MA Experiment 20000573 PARAMETER Experiment Name: At_100uM_ABA_Mutants__P Parameter: Tissue Value: Whole Plant
  misc_feature: MA Experiment 20000573 PARAMETER Experiment Name: At_100uM_ABA_Mutants__P Parameter: Treatment Value: None
  misc_feature: MA Experiment ID: 20000574 Result: Down-regulated in Transcription
  misc_feature: MA Experiment 20000574 PARAMETER Experiment Name: At_100uM_ABA_Mutants__P Parameter: Organism Value: A. thaliana
  misc_feature: MA Experiment 20000574 PARAMETER Experiment Name: At_100uM_ABA_Mutants__P Parameter: Plant Line Value: CS23 vs. Ler wt
  misc_feature: MA Experiment 20000574 PARAMETER Experiment Name: At_100uM_ABA_Mutants__P Parameter: Timepoint (hr) Value: N/A
  misc_feature: MA Experiment 20000574 PARAMETER Experiment Name: At_100uM_ABA_Mutants__P Parameter: Tissue Value: Whole Plant
  misc_feature: MA Experiment 20000574 PARAMETER Experiment Name: At_100uM_ABA_Mutants__P Parameter: Treatment Value: None
  misc_feature: MA Experiment ID: 20000794 Result: Down-regulated in Transcription
  misc_feature: MA Experiment 20000794 PARAMETER Experiment Name: At_Petals_P Parameter: Age (day) Value: 23-25 days
  misc_feature: MA Experiment 20000794 PARAMETER Experiment Name: At_Petals_P Parameter: Plant Line Value: WS
  misc_feature: MA Experiment 20000794 PARAMETER Experiment Name: At_Petals_P Parameter: Tissue Value: Petals vs. Whole plant
  misc_feature: MA Experiment ID: 20001556 Result: Down-regulated in Transcription
  misc_feature: MA Experiment 20001556 PARAMETER Experiment Name: At_Drought_Soil_Dry_P Parameter: Age (day) Value: 26
  misc_feature: MA Experiment 20001556 PARAMETER Experiment Name: At_Drought_Soil_Dry_P Parameter: Organism Value: A. thaliana
  misc_feature: MA Experiment 20001556 PARAMETER Experiment Name: At_Drought_Soil_Dry_P Parameter: Plant Line Value: WS
  misc_feature: MA Experiment 20001556 PARAMETER Experiment Name: At_Drought_Soil_Dry_P Parameter: Post Timepoint (hr) Value: None
  misc_feature: MA Experiment 20001556 PARAMETER Experiment Name: At_Drought_Soil_Dry_P Parameter: Post-Treatment Value: None
  misc_feature: MA Experiment 20001556 PARAMETER Experiment Name: At_Drought_Soil_Dry_P Parameter: Timepoint (day) Value: 12
  misc_feature: MA Experiment 20001556 PARAMETER Experiment Name: At_Drought_Soil_Dry_P Parameter: Treatment Value: Drought vs. No Drought
  misc_feature: MA Experiment ID: 20001557 Result: Down-regulated in Transcription
  misc_feature: MA Experiment 20001557 PARAMETER Experiment Name: At_Drought_Soil_Dry_P Parameter: Age (day) Value: 27
  misc_feature: MA Experiment 20001557 PARAMETER Experiment Name: At_Drought_Soil_Dry_P Parameter: Organism Value: A. thaliana
  misc_feature: MA Experiment 20001557 PARAMETER Experiment Name: At_Drought_Soil_Dry_P Parameter: Plant Line Value: WS
  misc_feature: MA Experiment 20001557 PARAMETER Experiment Name: At_Drought_Soil_Dry_P Parameter: Post Timepoint (hr) Value: 3
  misc_feature: MA Experiment 20001557 PARAMETER Experiment Name: At_Drought_Soil_Dry_P Parameter: Post-Treatment Value: Re-Water vs. No Drought
  misc_feature: MA Experiment 20001557 PARAMETER Experiment Name: At_Drought_Soil_Dry_P Parameter: Timepoint (day) Value: 13
  misc_feature: MA Experiment 20001557 PARAMETER Experiment Name: At_Drought_Soil_Dry_P Parameter: Treatment Value: Drought vs. No Drought
  misc_feature: MA Experiment ID: 20001558 Result: Down-regulated in Transcription
  misc_feature: MA Experiment 20001558 PARAMETER Experiment Name: At_Drought_Soil_Dry_P Parameter: Age (day) Value: 27
  misc_feature: MA Experiment 20001558 PARAMETER Experiment Name: At_Drought_Soil_Dry_P Parameter: Organism Value: A. thaliana
  misc_feature: MA Experiment 20001558 PARAMETER Experiment Name: At_Drought_Soil_Dry_P Parameter: Plant Line Value: WS
  misc_feature: MA Experiment 20001558 PARAMETER Experiment Name: At_Drought_Soil_Dry_P Parameter: Post Timepoint (hr) Value: 6
  misc_feature: MA Experiment 20001558 PARAMETER Experiment Name: At_Drought_Soil_Dry_P Parameter: Post-Treatment Value: Re-Water vs. No Drought
  misc_feature: MA Experiment 20001558 PARAMETER Experiment Name: At_Drought_Soil_Dry_P Parameter: Timepoint (day) Value: 13
  misc_feature: MA Experiment 20001558 PARAMETER Experiment Name: At_Drought_Soil_Dry_P Parameter: Treatment Value: Drought vs. No Drought
  misc_feature: MA Experiment ID: 20001559 Result: Down-regulated in Transcription
  misc_feature: MA Experiment 20001559 PARAMETER Experiment Name: At_Drought_Soil_Dry_P Parameter: Age (day) Value: 28
  misc_feature: MA Experiment 20001559 PARAMETER Experiment Name: At_Drought_Soil_Dry_P Parameter: Organism Value: A. thaliana
  misc_feature: MA Experiment 20001559 PARAMETER Experiment Name: At_Drought_Soil_Dry_P Parameter: Plant Line Value: WS
  misc_feature: MA Experiment 20001559 PARAMETER Experiment Name: At_Drought_Soil_Dry_P Parameter: Post Timepoint (hr) Value: 29
  misc_feature: MA Experiment 20001559 PARAMETER Experiment Name: At_Drought_Soil_Dry_P Parameter: Post-Treatment Value: Re-Water vs. No Drought
  misc_feature: MA Experiment 20001559 PARAMETER Experiment Name: At_Drought_Soil_Dry_P Parameter: Timepoint (day) Value: 14
  misc_feature: MA Experiment 20001559 PARAMETER Experiment Name: At_Drought_Soil_Dry_P Parameter: Treatment Value: Drought vs. No Drought
  misc_feature: MA Experiment ID: 20001560 Result: Down-regulated in Transcription
  misc_feature: MA Experiment 20001560 PARAMETER Experiment Name: At_Drought_Soil_Dry_P Parameter: Age (day) Value: 28
  misc_feature: MA Experiment 20001560 PARAMETER Experiment Name: At_Drought_Soil_Dry_P Parameter: Organism Value: A. thaliana
  misc_feature: MA Experiment 20001560 PARAMETER Experiment Name: At_Drought_Soil_Dry_P Parameter: Plant Line Value: WS
  misc_feature: MA Experiment 20001560 PARAMETER Experiment Name: At_Drought_Soil_Dry_P Parameter: Post Timepoint (hr) Value: None
  misc_feature: MA Experiment 20001560 PARAMETER Experiment Name: At_Drought_Soil_Dry_P Parameter: Post-Treatment Value: None
  misc_feature: MA Experiment 20001560 PARAMETER Experiment Name: At_Drought_Soil_Dry_P Parameter: Timepoint (day) Value: 14
  misc_feature: MA Experiment 20001560 PARAMETER Experiment Name: At_Drought_Soil_Dry_P Parameter: Treatment Value: Drought vs. No Drought
  misc_feature: MA Experiment ID: 20001904 Result: Down-regulated in Transcription
  misc_feature: MA Experiment 20001904 PARAMETER Experiment Name: At_Drought_Reproduction_P Parameter: Age (day) Value: 37
  misc_feature: MA Experiment 20001904 PARAMETER Experiment Name: At_Drought_Reproduction_P Parameter: Organism Value: A. thaliana
  misc_feature: MA Experiment 20001904 PARAMETER Experiment Name: At_Drought_Reproduction_P Parameter: Plant Line Value: WS
  misc_feature: MA Experiment 20001904 PARAMETER Experiment Name: At_Drought_Reproduction_P Parameter: Timepoint (day) Value: 7
  misc_feature: MA Experiment 20001904 PARAMETER Experiment Name: At_Drought_Reproduction_P Parameter: Tissue Value: Rosettes
  misc_feature: MA Experiment 20001904 PARAMETER Experiment Name: At_Drought_Reproduction_P Parameter: Treatment Value: Drought vs. No Drought
aacaaaaacagagcaaagtttttcaaaaaaaaaaaaaaaacagagccacgaagaaatttacagaaaattcaaaaccatcgataaagatgggagatgtgattttgttcattgatgatacgaaatcgaaagtgagaatcacgcgttgcagaatttgccatgaagaagaagaagaaagtttcttcgaagttccatgtgcttgttcaggcaccgttaagttcgcacatagaaactgcatacaacgttggtgtaatgaaaaaggaaacacaacttgtgaaatctgtcttcaggtgtataaagatggatatacagcagttttaaaacaatcgaaattgattgaacaagaagtcacaatcagagtaaatggacgaagaagaagaagaagtagaagattagtgtctatagctgaatccgatatttctcagtgtaattctgttgctgatagaggagcttcgttttgcagatcattaacttttactctttcagtatttttgctgatgaaacatacattcgatgtgatttacggaaccgaagaatatccattctctgtatttacggtactaacattaaaggccattgggatactattgccaatgttcattataattcgaacaatctcaactattcagaaaactcttcgtcgtcgtcatcaatatcctgaatctgaagaagaagataggttgagctctgacgacgacgatgacttggaagaagaagatgaagagcaacaacaacatttggcttaaaccttcaaattaacgaacttaacgaaattttttctttctttctttctaattctttctttttttaaacgaaaagcatctatttgatgctcatggtcatttttactcacaaagtc

SEQ ID NO: 99894 - protein, 246 aa, Arabidopsis thaliana
  peptide (1)..(246): Ceres Seq. ID no. 13603877
  misc_feature (48)..(93): Pfam Name: Zinc finger, C3HC4 type (RING finger) Pfam Description: Zinc finger, C3HC4 type (RING finger)
  misc_feature (29)..(246): Homolog of NCBI NO: 18411826 NR Description: zinc finger (C3HC4-type RING finger) protein [Arabidopsis thaliana] >gi|4741923|gb|AAD28757.1|AF130849_1 PIT1
  misc_feature (29)..(246): Homolog of NCBI NO: 25518349 NR Description: hypothetical protein T14P4.10 - Arabidopsis >gi|9972376|gb|AAG10626.1|AC022521_4 Unknown protein [Arabidopsis
  misc_feature (146)..(246): Homolog of NCBI NO: 15217818 NR Description: zinc finger (C3HC4-type RING finger) protein
  misc_feature (29)..(95): Homolog of NCBI NO: 15217818 NR Description: zinc finger (C3HC4-type RING finger) protein
  misc_feature (37)..(244): Homolog of NCBI NO: 34905532 NR Description: B1146F03.23 [Oryza sativa (japonica
  misc_feature (45)..(238): Homolog of NCBI NO: 22325409 NR Description: zinc finger (C3HC4-type RING finger) protein
  misc_feature (37)..(216): Homolog of NCBI NO: 15227065 NR Description: zinc finger (C3HC4-type RING finger) protein
  misc_feature (37)..(216): Homolog of NCBI NO: 15223693 NR Description: expressed protein [Arabidopsis thaliana]
  misc_feature (37)..(216): Homolog of NCBI NO: 18424590 NR Description: expressed protein [Arabidopsis thaliana] gene_id:K19B1.7~unknown protein [Arabidopsis thaliana]
  misc_feature (37)..(216): Homolog of NCBI NO: 26451292 NR Description: unknown protein [Arabidopsis thaliana]
QKQSKVFQKKKKNRATKKFTENSKPSIKMGDVILFIDDTKSKVRITRCRICHEEEEESFFEVPCACSGTVKFAHRNCIQRWCNEKGNTTCEICLQVYKDGYTAVLKQSKLIEQEVTIRVNGRRRRRSRRLVSIAESDISQCNSVADRGASFCRSLTFTLSVFLLMKHTFDVIYGTEEYPFSVFTVLTLKAIGILLPMFIIIRTISTIQKTLRRRHQYPESEEEDRLSSDDDDDLEEEDEEQQQHLA

SEQ ID NO: 99895 - protein, 218 aa, Arabidopsis thaliana; identical to SEQ ID NO: 42033
  peptide (1)..(218): Ceres Seq. ID no. 13603878
  misc_feature (20)..(65): Pfam Name: Zinc finger, C3HC4 type (RING finger) Pfam Description: Zinc finger, C3HC4 type (RING finger)
  misc_feature (1)..(218): Homolog of NCBI NO: 18411826 NR Description: zinc finger (C3HC4-type RING finger) protein [Arabidopsis thaliana] >gi|4741923|gb|AAD28757.1|AF130849_1 PIT1
  misc_feature (1)..(218): Homolog of NCBI NO: 25518349 NR Description: hypothetical protein T14P4.10 - Arabidopsis >gi|9972376|gb|AAG10626.1|AC022521_4 Unknown protein [Arabidopsis
  misc_feature (118)..(218): Homolog of NCBI NO: 15217818 NR Description: zinc finger (C3HC4-type RING finger) protein
  misc_feature (1)..(67): Homolog of NCBI NO: 15217818 NR Description: zinc finger (C3HC4-type RING finger) protein
  misc_feature (9)..(216): Homolog of NCBI NO: 34905532 NR Description: B1146F03.23 [Oryza sativa (japonica
  misc_feature (17)..(210): Homolog of NCBI NO: 22325409 NR Description: zinc finger (C3HC4-type RING finger) protein
  misc_feature (9)..(188): Homolog of NCBI NO: 15227065 NR Description: zinc finger (C3HC4-type RING finger) protein
  misc_feature (9)..(188): Homolog of NCBI NO: 15223693 NR Description: expressed protein [Arabidopsis thaliana]
  misc_feature (9)..(188): Homolog of NCBI NO: 18424590 NR Description: expressed protein [Arabidopsis thaliana] gene_id:K19B1.7~unknown protein [Arabidopsis thaliana]
  misc_feature (9)..(188): Homolog of NCBI NO: 26451292 NR Description: unknown protein [Arabidopsis thaliana]

SEQ ID NO: 99896 - DNA, 1682 bp, Arabidopsis thaliana
  misc_feature (1)..(1682): Ceres Seq. ID no. 13603883
  misc_feature: MA Experiment ID: 20000169 Result: Up-regulated in Transcription
  misc_feature: MA Experiment 20000169 PARAMETER Experiment Name: At_100uM_ABA_P Parameter: Age (day) Value: 14
  misc_feature: MA Experiment 20000169 PARAMETER Experiment Name: At_100uM_ABA_P Parameter: Organism Value: A. thaliana
  misc_feature: MA Experiment 20000169 PARAMETER Experiment Name: At_100uM_ABA_P Parameter: Plant Line Value: WS
  misc_feature: MA Experiment 20000169 PARAMETER Experiment Name: At_100uM_ABA_P Parameter: Timepoint (hr) Value: 6
  misc_feature: MA Experiment 20000169 PARAMETER Experiment Name: At_100uM_ABA_P Parameter: Tissue Value: Aerial
  misc_feature: MA Experiment 20000169 PARAMETER Experiment Name: At_100uM_ABA_P Parameter: Treatment Value: 100uM ABA vs. No Treatment
  misc_feature: MA Experiment ID: 20000171 Result: Down-regulated in Transcription
  misc_feature: MA Experiment 20000171 PARAMETER Experiment Name: At_42deg_Heat_P Parameter: Age (day) Value: 14
  misc_feature: MA Experiment 20000171 PARAMETER Experiment Name: At_42deg_Heat_P Parameter: Organism Value: A. thaliana
  misc_feature: MA Experiment 20000171 PARAMETER Experiment Name: At_42deg_Heat_P Parameter: Plant Line Value: WS
  misc_feature: MA Experiment 20000171 PARAMETER Experiment Name: At_42deg_Heat_P Parameter: Temperature (deg C) Value: 42 vs. 22
  misc_feature: MA Experiment 20000171 PARAMETER Experiment Name: At_42deg_Heat_P Parameter: Timepoint (hr) Value: 1
  misc_feature: MA Experiment 20000171 PARAMETER Experiment Name: At_42deg_Heat_P Parameter: Tissue Value: Aerial
  misc_feature: MA Experiment ID: 20000173 Result: Down-regulated in Transcription
  misc_feature: MA Experiment 20000173 PARAMETER Experiment Name: At_42deg_Heat_P Parameter: Age (day) Value: 14
  misc_feature: MA Experiment 20000173 PARAMETER Experiment Name: At_42deg_Heat_P Parameter: Organism Value: A. thaliana
  misc_feature: MA Experiment 20000173 PARAMETER Experiment Name: At_42deg_Heat_P Parameter: Plant Line Value: WS
  misc_feature: MA Experiment 20000173 PARAMETER Experiment Name: At_42deg_Heat_P Parameter: Temperature (deg C) Value: 42 vs. 22
  misc_feature: MA Experiment 20000173 PARAMETER Experiment Name: At_42deg_Heat_P Parameter: Timepoint (hr) Value: 6
  misc_feature: MA Experiment 20000173 PARAMETER Experiment Name: At_42deg_Heat_P Parameter: Tissue Value: Aerial
  misc_feature: MA Experiment ID: 20000179 Result: Up-regulated in Transcription
  misc_feature: MA Experiment 20000179 PARAMETER Experiment Name: At_Germinating_Seeds_P Parameter: Age (hr) Value: 6 vs. 0
  misc_feature: MA Experiment 20000179 PARAMETER Experiment Name: At_Germinating_Seeds_P Parameter: Tissue Value: Germinating Seeds
  misc_feature: MA Experiment ID: 20000180 Result: Up-regulated in Transcription
  misc_feature: MA Experiment 20000180 PARAMETER Experiment Name: At_Germinating_Seeds_P Parameter: Age (hr) Value: 24 vs. 0
  misc_feature: MA Experiment 20000180 PARAMETER Experiment Name: At_Germinating_Seeds_P Parameter: Tissue Value: Germinating Seeds
  misc_feature: MA Experiment ID: 20000185 Result: Down-regulated in Transcription
  misc_feature: MA Experiment 20000185 PARAMETER Experiment Name: At_Roots__P Parameter: Age (day) Value: 7 vs. 21
  misc_feature: MA Experiment 20000185 PARAMETER Experiment Name: At_Roots__P Parameter: Organism Value: A. thaliana
  misc_feature: MA Experiment 20000185 PARAMETER Experiment Name: At_Roots__P Parameter: Tissue Value: Roots vs. Whole Plant
  misc_feature: MA Experiment ID: 20000234 Result: Down-regulated in Transcription
  misc_feature: MA Experiment 20000234 PARAMETER Experiment Name: At_Siliques_P Parameter: Age (day) Value: 21
  misc_feature: MA Experiment 20000234 PARAMETER Experiment Name: At_Siliques_P Parameter: Organism Value: A. thaliana
  misc_feature: MA Experiment 20000234 PARAMETER Experiment Name: At_Siliques_P Parameter: Plant Line Value: WS
  misc_feature: MA Experiment 20000234 PARAMETER Experiment Name: At_Siliques_P Parameter: Tissue Value: Less Than 5mm Siliques vs. Whole Plant
  misc_feature: MA Experiment ID: 20000264 Result: Down-regulated in Transcription
  misc_feature: MA Experiment 20000264 PARAMETER Experiment Name: At_Open_Flower_P Parameter: Age (day) Value: 21
  misc_feature: MA Experiment 20000264 PARAMETER Experiment Name: At_Open_Flower_P Parameter: Plant Line Value: WS
  misc_feature: MA Experiment 20000264 PARAMETER Experiment Name: At_Open_Flower_P Parameter: Tissue Value: Open Flower vs. Whole Plant
  misc_feature: MA Experiment ID: 20000265 Result: Down-regulated in Transcription
  misc_feature: MA Experiment 20000265 PARAMETER Experiment Name: At_Open_Flower_P Parameter: Age (day) Value: 21
  misc_feature: MA Experiment 20000265 PARAMETER Experiment Name: At_Open_Flower_P Parameter: Plant Line Value: WS
  misc_feature: MA Experiment 20000265 PARAMETER Experiment Name: At_Open_Flower_P Parameter: Tissue Value: Closed Flower vs. Whole Plant
  misc_feature: MA Experiment ID: 20000286 Result: Down-regulated in Transcription
  misc_feature: MA Experiment 20000286 PARAMETER Experiment Name: At_Open_Flower_P Parameter: Age (day) Value: 21
  misc_feature: MA Experiment 20000286 PARAMETER Experiment Name: At_Open_Flower_P Parameter: Plant Line Value: WS
  misc_feature: MA Experiment 20000286 PARAMETER Experiment Name: At_Open_Flower_P Parameter: Tissue Value: Half Open vs. Whole Plant
  misc_feature: MA Experiment ID: 20000438 Result: Down-regulated in Transcription
  misc_feature: MA Experiment 20000438 PARAMETER Experiment Name: At_Shoots__P Parameter: Age (day) Value: 14
  misc_feature: MA Experiment 20000438 PARAMETER Experiment Name: At_Shoots__P Parameter: Tissue Value: Shoots vs. Whole Plant
  misc_feature: MA Experiment ID: 20000439 Result: Down-regulated in Transcription
  misc_feature: MA Experiment 20000439 PARAMETER Experiment Name: At_Roots__P Parameter: Age (day) Value: 14 vs. 21
  misc_feature: MA Experiment 20000439 PARAMETER Experiment Name: At_Roots__P Parameter: Organism Value: A. thaliana
  misc_feature: MA Experiment 20000439 PARAMETER Experiment Name: At_Roots__P Parameter: Tissue Value: Roots vs. Whole Plant
  misc_feature: MA Experiment ID: 20000453 Result: Up-regulated in Transcription
  misc_feature: MA Experiment 20000453 PARAMETER Experiment Name: At_100uM_ABA_P Parameter: Age (day) Value: 15
  misc_feature: MA Experiment 20000453 PARAMETER Experiment Name: At_100uM_ABA_P Parameter: Organism Value: A. thaliana
  misc_feature: MA Experiment 20000453 PARAMETER Experiment Name: At_100uM_ABA_P Parameter: Plant Line Value: WS
  misc_feature: MA Experiment 20000453 PARAMETER Experiment Name: At_100uM_ABA_P Parameter: Timepoint (hr) Value: 24
  misc_feature: MA Experiment 20000453 PARAMETER Experiment Name: At_100uM_ABA_P Parameter: Tissue Value: Aerial
  misc_feature: MA Experiment 20000453 PARAMETER Experiment Name: At_100uM_ABA_P Parameter: Treatment Value: 100uM ABA vs. No Treatment
  misc_feature: MA Experiment ID: 20000794 Result: Down-regulated in Transcription
  misc_feature: MA Experiment 20000794 PARAMETER Experiment Name: At_Petals_P Parameter: Age (day) Value: 23-25 days
  misc_feature: MA Experiment 20000794 PARAMETER Experiment Name: At_Petals_P Parameter: Plant Line Value: WS
  misc_feature: MA Experiment 20000794 PARAMETER Experiment Name: At_Petals_P Parameter: Tissue Value: Petals vs. Whole plant
  misc_feature: MA Experiment ID: 20001247 Result: Up-regulated in Transcription
  misc_feature: MA Experiment 20001247 PARAMETER Experiment Name: At_Far-red-induction_P Parameter: Age (day) Value: 7
  misc_feature: MA Experiment 20001247 PARAMETER Experiment Name: At_Far-red-induction_P Parameter: Light Value: Far-red vs. White
  misc_feature: MA Experiment 20001247 PARAMETER Experiment Name: At_Far-red-induction_P Parameter: Organism Value: A. thaliana
  misc_feature: MA Experiment 20001247 PARAMETER Experiment Name: At_Far-red-induction_P Parameter: Plant Line Value: Columbia
  misc_feature: MA Experiment 20001247 PARAMETER Experiment Name: At_Far-red-induction_P Parameter: Timepoint (hr) Value: 1
  misc_feature: MA Experiment 20001247 PARAMETER Experiment Name: At_Far-red-induction_P Parameter: Tissue Value: Whole Plant
  misc_feature: MA Experiment ID: 20001560 Result: Up-regulated in Transcription
  misc_feature: MA Experiment 20001560 PARAMETER Experiment Name: At_Drought_Soil_Dry_P Parameter: Age (day) Value: 28
  misc_feature: MA Experiment 20001560 PARAMETER Experiment Name: At_Drought_Soil_Dry_P Parameter: Organism Value: A. thaliana
  misc_feature: MA Experiment 20001560 PARAMETER Experiment Name: At_Drought_Soil_Dry_P Parameter: Plant Line Value: WS
  misc_feature: MA Experiment 20001560 PARAMETER Experiment Name: At_Drought_Soil_Dry_P Parameter: Post Timepoint (hr) Value: None
  misc_feature: MA Experiment 20001560 PARAMETER Experiment Name: At_Drought_Soil_Dry_P Parameter: Post-Treatment Value: None
  misc_feature: MA Experiment 20001560 PARAMETER Experiment Name: At_Drought_Soil_Dry_P Parameter: Timepoint (day) Value: 14
  misc_feature: MA Experiment 20001560 PARAMETER Experiment Name: At_Drought_Soil_Dry_P Parameter: Treatment Value: Drought vs. No Drought
  misc_feature: MA Experiment ID: 20001906 Result: Down-regulated in Transcription
  misc_feature: MA Experiment 20001906 PARAMETER Experiment Name: At_Drought_Reproduction_P Parameter: Age (day) Value: 35
  misc_feature: MA Experiment 20001906 PARAMETER Experiment Name: At_Drought_Reproduction_P Parameter: Organism Value: A. thaliana
  misc_feature: MA Experiment 20001906 PARAMETER Experiment Name: At_Drought_Reproduction_P Parameter: Plant Line Value: WS
  misc_feature: MA Experiment 20001906 PARAMETER Experiment Name: At_Drought_Reproduction_P Parameter: Timepoint (day) Value: 5
  misc_feature: MA Experiment 20001906 PARAMETER Experiment Name: At_Drought_Reproduction_P Parameter: Tissue Value: Siliques
  misc_feature: MA Experiment 20001906 PARAMETER Experiment Name: At_Drought_Reproduction_P Parameter: Treatment Value: Drought vs. No Drought
  misc_feature: MA Experiment ID: 20001911 Result: Down-regulated in Transcription
  misc_feature: MA Experiment 20001911 PARAMETER Experiment Name: At_Drought_Reproduction_P Parameter: Age (day) Value: 40
  misc_feature: MA Experiment 20001911 PARAMETER Experiment Name: At_Drought_Reproduction_P Parameter: Organism Value: A. thaliana
  misc_feature: MA Experiment 20001911 PARAMETER Experiment Name: At_Drought_Reproduction_P Parameter: Plant Line Value: WS
  misc_feature: MA Experiment 20001911 PARAMETER Experiment Name: At_Drought_Reproduction_P Parameter: Timepoint (day) Value: 10
  misc_feature: MA Experiment 20001911 PARAMETER Experiment Name: At_Drought_Reproduction_P Parameter: Tissue Value: Flowers
  misc_feature: MA Experiment 20001911 PARAMETER Experiment Name: At_Drought_Reproduction_P Parameter: Treatment Value: Drought vs. No Drought
tcttcttcttcttcttctttttttttcgtaaaaattcttcttcttcttcttcttctccgagctccgtccgagcagagaagaagagtaaggtaagttttagagtgcacttgtgtggcactctcatttcttatcctgcgcctcttacgatttcttatggtgcgcttctccgactagtttcggtgtctaatggactcttcctcttcttctctatctctccaagaaaaaatctcttctggttatttctagggtttcgttggttcttttttcgaaatgctttggataacgagatttgctggattattctccgccgcgatggcagtgatcgtgttatctccgtcgcttcagtcatttcctccggcggcggcaatccgttcttctccatcaccgatcttcagaaaagctccagcggtgttcaacaacggcgacgaatgtctctcctccggcggcgtctgcaatccgtcgttggtccacgtggcgatcacgttagacgtagagtacctgcgtggctcaatcgcagccgttaactcgatccttcagcactcggtgtgtccagagagcgtcttcttccacttcatcgccgtctccgaggaaacaaacctgttggagtcgctggtgagatcggttttcccgagactgaaattcaatatttacgattttgcccctgagacagttcgtggtttgatttcttcttccgtgagacaagctctcgagcagcctctgaactacgctagaagctacttagcggatctgctggagccttgtgttaaccgtgtcatatacttggattcggatcttgtcgtcgtcgatgacatcgctaagctttggaaaactagcctaggctcgaggataatcggagctccggagtattgtcacgcgaatttcacgaaatacttcaccggaggattctggtcggaggagagattctccggtacctttagagggaggaagccatgttacttcaacacaggtgtgatggtgatagatcttaagaaatggagaagaggtggttacacgaaacgtatcgagaaatggatggagattcagagaagagagaggatttacgaactaggctcgcttccaccgtttcttctagttttctccggtcacgtggctcccatctctcaccggtggaaccagcatggacttggtggtgacaatgttagaggtagctgtcgtgatttgcatcctggtcctgtgagtttgctgcattggtctggtagtggcaagccctggataagactcgattccaaacggccttgtcccttagacgcattatggacgccttacgacttgtatcgacattcgcattgacgtttcagcgaatggtggtgctatatgaggagagagtagaggaaggtttcattggtcttgaccggcccagtctgaaagaaaatcaaaggtagcttttgtagtagaagatgaaaaccctttgccgataaaatgggtttggtttagccaaaccggagacacaactgagatgtgggaattttattttcaaaccggcgggttggatcatatttttttttgttttgttgggggacaaaaaaaatcaatcagagttaggttattcatgtggatgagattctgtttttttttttatcattaatttgtgtttaaaaaacattctttcttattttgtgcagatacttattctctttgaaaaataataattagaattaccc

SEQ ID NO: 99897 - protein, 346 aa, Arabidopsis thaliana; identical to SEQ ID NO: 35235
  peptide (1)..(346): Ceres Seq. ID no. 13603884
  misc_feature (1)..(346): Homolog of NCBI NO: 15235247 NR Description: glycosyltransferase family 8 [Arabidopsis >gi|30679061|ref|NP_849285.1| glycosyltransferase family 8 thaliana] >gi|7484990|pir||T01514 glycosyl transferase predicted
  misc_feature (1)..(346): Homolog of NCBI NO: 21554300 NR Description: putative glycosyl transferase [Arabidopsis
  misc_feature (1)..(313): Homolog of NCBI NO: 20258800 NR Description: putative glycosyl transferase [Arabidopsis
  misc_feature (1)..(346): Homolog of NCBI NO: 15217851 NR Description: glycosyltransferase family 8 [Arabidopsis
  misc_feature (1)..(344): Homolog of NCBI NO: 22331906 NR Description: glycosyltransferase family 8 [Arabidopsis >gi|18175835|gb|AAL59936.1| unknown protein [Arabidopsis >gi|20465549|gb|AAM20257.1| unknown protein [Arabidopsis
  misc_feature (6)..(344): Homolog of NCBI NO: 11281926 NR Description: hypothetical protein F26K9.90 - Arabidopsis >gi|7362746|emb|CAB83116.1| putative protein [Arabidopsis
  misc_feature (41)..(344): Homolog of NCBI NO: 18409445 NR Description: glycosyltransferase family 8 [Arabidopsis
  misc_feature (41)..(344): Homolog of NCBI NO: 15221684 NR Description: glycosyltransferase family 8 [Arabidopsis
  misc_feature (39)..(345): Homolog of NCBI NO: 18391493 NR Description: glycosyltransferase family 8 [Arabidopsis
  misc_feature (39)..(345): Homolog of NCBI NO: 21536997 NR Description: putative glycosyl transferase [Arabidopsis

SEQ ID NO: 99898 - protein, 332 aa, Arabidopsis thaliana; identical to SEQ ID NO: 35236
  peptide (1)..(332): Ceres Seq. ID no. 13603885
  misc_feature (1)..(332): Homolog of NCBI NO: 15235247 NR Description: glycosyltransferase family 8 [Arabidopsis >gi|30679061|ref|NP_849285.1| glycosyltransferase family 8 thaliana] >gi|7484990|pir||T01514 glycosyl transferase predicted
  misc_feature (1)..(332): Homolog of NCBI NO: 21554300 NR Description: putative glycosyl transferase [Arabidopsis
  misc_feature (1)..(299): Homolog of NCBI NO: 20258800 NR Description: putative glycosyl transferase [Arabidopsis
  misc_feature (1)..(332): Homolog of NCBI NO: 15217851 NR Description: glycosyltransferase family 8 [Arabidopsis
  misc_feature (1)..(330): Homolog of NCBI NO: 22331906 NR Description: glycosyltransferase family 8 [Arabidopsis >gi|18175835|gb|AAL59936.1| unknown protein [Arabidopsis >gi|20465549|gb|AAM20257.1| unknown protein [Arabidopsis
  misc_feature (1)..(330): Homolog of NCBI NO: 11281926 NR Description: hypothetical protein F26K9.90 - Arabidopsis >gi|7362746|emb|CAB83116.1| putative protein [Arabidopsis
  misc_feature (27)..(330): Homolog of NCBI NO: 18409445 NR Description: glycosyltransferase family 8 [Arabidopsis
  misc_feature (27)..(330): Homolog of NCBI NO: 15221684 NR Description: glycosyltransferase family 8 [Arabidopsis
  misc_feature (25)..(331): Homolog of NCBI NO: 18391493 NR Description: glycosyltransferase family 8 [Arabidopsis
  misc_feature (25)..(331): Homolog of NCBI NO: 21536997 NR Description: putative glycosyl transferase [Arabidopsis

SEQ ID NO: 99899 - protein, 173 aa, Arabidopsis thaliana
  peptide (1)..(173): Ceres Seq. ID no. 13603886
FFFFFFFFRKNSSSSSSSPSSVRAEKKSKVSFRVHLCGTLISYPAPLTISYGALLRLVSVSNGLFLFFSISPRKNLFWLFLGFRWFFFRNALDNEICWIILRRDGSDRVISVASVISSGGGNPFFSITDLQKSSSGVQQRRRMSLLRRRLQSVVGPRGDHVRRRVPAWLNRSR

SEQ ID NO: 99900 - DNA, 2140 bp, Arabidopsis thaliana
  misc_feature (1)..(2140): Ceres Seq. ID no. 13603887
  misc_feature: MA Experiment ID: 108434 Result: Up-regulated in Transcription
  misc_feature: MA Experiment 108434 PARAMETER Experiment Name: At_Root_Tips_cDNA_P Parameter: Tissue Value: Root Tips
  misc_feature: MA Experiment ID: 20000286 Result: Up-regulated in Transcription
  misc_feature: MA Experiment 20000286 PARAMETER Experiment Name: At_Open_Flower_P Parameter: Age (day) Value: 21
  misc_feature: MA Experiment 20000286 PARAMETER Experiment Name: At_Open_Flower_P Parameter: Plant Line Value: WS
  misc_feature: MA Experiment 20000286 PARAMETER Experiment Name: At_Open_Flower_P Parameter: Tissue Value: Half Open vs. Whole Plant
atcactctctcattaatcgaacttggcgtgtttaaataatcttccgatcgttaattctcttccgatttcgattcgattttagcggcgatgtctctcagacctagcgcgaagacggaggtgcgacggaatcggtacaaagtagcggtcgatgcggaggaaggacggcggaggcgagaggataacttggttgagatcaggaagaacaagagagaggaaaatttgcagaagaagagatttacgtcttctatggcttttggctcagcaacgggacaaacggaacaggatctttcttcagcgaaccaattaaaagataatctacctgctatggttgctggaatctggtcagaggatagcaattcacaattggaggcaacaaatctcttgcggaaactgctttctattgaacaaaatcctcctatcaatgaagttgtacaatctggtgttgttcctcgtgttgtgaagtttctttccagggatgacttccccaaacttcagtttgaggcagcttgggcgctcaccaacattgcttcagggacatcagagaacacaaatgtcatcattgaaagtggagctgtcccgatattcatccaacttctcagctctgctagtgaagatgtccgcgaacaggctgtttgggcattgggaaatgttgctggagactcaccaaaatgccgggatttagtcctaagttacggtgccatgacacctcttctgtctcaattcaatgagaatacaaagctttcaatgctgagaaatgctacatggacattatcaaacttctgcagagggaagcccccacccgcatttgaacagacacaaccagctttaccagttcttgagcgccttgtgcaatcaatggatgaagaagttctcacagatgcatgctgggctctgtcatacctctcggataattcaaacgacaaaatacaagcagtcattgaagcaggagttgttcctcgcctcatccagctcttaggtcattcgtcgccatcagtgctgattcctgctcttcgtaccattggaaatattgtaaccggggatgatctacagactcagatggttctcgaccagcaagcgcttccttgtcttttgaaccttctaaaaaacaattacaagaagagtatcaagaaggaagcttgctggactatctccaacattacagctggaaatgcagatcagatacaagcagtgattgatgcaggtataatccagtctcttgtttgggtgcttcaaagtgcagagttcgaagtaaaaaaagaagctgcttggggaatatcaaatgctacttctggtggcactcatgatcaaatcaagtttatggtgagccaaggctgtatcaaacctctatgcgatctccttacttgcccagatctgaaagttgtaacggtttgcttagaagcactagagaacattctcgtggttggagaagcagagaagaacttaggtcacacaggagaagacaacctctacgctcaaatgattgacgaagcagaagggttagagaagattgagaatcttcagagtcacgacaacaatgatatctacgacaaagccgtgaagatcctcgaaacattttggactgaagacaatgaagaagaaggcaacgacgagaatcatgctccacaatctggtttccagttcggaagcaccaatgttcctcctggtcaattcaactttatttgaaagacaacaagaacaacaacatagccagatataatgctgtcttcaccagcttttgctgcagcacgttctactctcggtcgtcgtcttcatgcgaagagactatcttcttctactggtcgaaccgctgatccagagattcatgcccgtaacgatggagacgagcctagtctttttccatcagaccccgagggtttggatgatgtagcgaacccgaagactccagcggatgaggatgtaccggatattcgaccacccggttttgtaaaggaaccgctttctccgccaaaaaatcccagagatacttcacacaagcttgaatctactcccgttggtctacctgcagatctcaatttccaacagaaacgaaattaatagcagcaaacgccttagccgttatggccttctagatcattcagaaatgcttacttttgattagctttgagaataaaatttaatt

SEQ ID NO: 99901 - protein, 531 aa, Arabidopsis thaliana
  peptide (1)..(531): Ceres Seq. ID no. 13603888
  misc_feature (4)..(98): Pfam Name: Importin beta binding domain Pfam Description: Importin beta binding domain
  misc_feature (1)..(531): Homolog of NCBI NO: 15235257 NR Description: importin alpha-2 subunit [Arabidopsis thaliana]
  misc_feature (1)..(531): Homolog of NCBI NO: 2154717 NR Description: Kap alpha protein [Arabidopsis thaliana]
  misc_feature (1)..(531): Homolog of NCBI NO: 25314872 NR Description: probable nuclear transport factor importin alpha
  misc_feature (1)..(530): Homolog of NCBI NO: 15217828 NR Description: importin alpha subunit -related [Arabidopsis
  misc_feature (1)..(530): Homolog of NCBI NO: 15230778 NR Description: importin alpha subunit [Arabidopsis thaliana]
  misc_feature (1)..(530): Homolog of NCBI NO: 25314876 NR Description: probable nuclear transport factor importin
  misc_feature (1)..(530): Homolog of NCBI NO: 15809794 NR Description: AT3g06720/F3E22_14 [Arabidopsis thaliana]
  misc_feature (1)..(530): Homolog of NCBI NO: 13699777 NR Description: AtKAP alpha [Arabidopsis thaliana]
  misc_feature (1)..(530): Homolog of NCBI NO: 13605661 NR Description: AT3g06720/F3E22_14 [Arabidopsis thaliana]
  misc_feature (1)..(530): Homolog of NCBI NO: 3915737 NR Description: Importin alpha subunit (Karyopherin alpha
MSLRPSAKTEVRRNRYKVAVDAEEGRRRREDNLVEIRKNKREENLQKKRFTSSMAFGSATGQTEQDLSSANQLKDNLPAMVAGIWSEDSNSQLEATNLLRKLLSIEQNPPINEVVQSGVVPRVVKFLSRDDFPKLQFEAAWALTNIASGTSENTNVIIESGAVPIFIQLLSSASEDVREQAVWALGNVAGDSPKCRDLVLSYGAMTPLLSQFNENTKLSMLRNATWTLSNFCRGKPPPAFEQTQPALPVLERLVQSMDEEVLTDACWALSYLSDNSNDKIQAVIEAGVVPRLIQLLGHSSPSVLIPALRTIGNIVTGDDLQTQMVLDQQALPCLLNLLKNNYKKSIKKEACWTISNITAGNADQIQAVIDAGIIQSLVWVLQSAEFEVKKEAAWGISNATSGGTHDQIKFMVSQGCIKPLCDLLTCPDLKVVTVCLEALENILVVGEAEKNLGHTGEDNLYAQMIDEAEGLEKIENLQSHDNNDIYDKAVKILETFWTEDNEEEGNDENHAPQSGFQFGSTNVPPGQFNFI

SEQ ID NO: 99902 - protein, 478 aa, Arabidopsis thaliana
  peptide (1)..(478): Ceres Seq. ID no. 13603889
  misc_feature (139)..(180): Pfam Name: Armadillo/beta-catenin-like repeat Pfam Description: Armadillo/beta-catenin-like repeat
  misc_feature (1)..(478): Homolog of NCBI NO: 15235257 NR Description: importin alpha-2 subunit [Arabidopsis thaliana]
  misc_feature (1)..(478): Homolog of NCBI NO: 2154717 NR Description: Kap alpha protein [Arabidopsis thaliana]
  misc_feature (1)..(478): Homolog of NCBI NO: 25314872 NR Description: probable nuclear transport factor importin alpha
  misc_feature (1)..(477): Homolog of NCBI NO: 15217828 NR Description: importin alpha subunit -related [Arabidopsis
  misc_feature (1)..(477): Homolog of NCBI NO: 15230778 NR Description: importin alpha subunit [Arabidopsis thaliana]
  misc_feature (1)..(477): Homolog of NCBI NO: 25314876 NR Description: probable nuclear transport factor importin
  misc_feature (1)..(477): Homolog of NCBI NO: 15809794 NR Description: AT3g06720/F3E22_14 [Arabidopsis thaliana]
  misc_feature (1)..(477): Homolog of NCBI NO: 13699777 NR Description: AtKAP alpha [Arabidopsis thaliana]
  misc_feature (1)..(477): Homolog of NCBI NO: 13605661 NR Description: AT3g06720/F3E22_14 [Arabidopsis thaliana]
  misc_feature (1)..(477): Homolog of NCBI NO: 3915737 NR Description: Importin alpha subunit (Karyopherin alpha
MAFGSATGQTEQDLSSANQLKDNLPAMVAGIWSEDSNSQLEATNLLRKLLSIEQNPPINEVVQSGVVPRVVKFLSRDDFPKLQFEAAWALTNIASGTSENTNVIIESGAVPIFIQLLSSASEDVREQAVWALGNVAGDSPKCRDLVLSYGAMTPLLSQFNENTKLSMLRNATWTLSNFCRGKPPPAFEQTQPALPVLERLVQSMDEEVLTDACWALSYLSDNSNDKIQAVIEAGVVPRLIQLLGHSSPSVLIPALRTIGNIVTGDDLQTQMVLDQQALPCLLNLLKNNYKKSIKKEACWTISNITAGNADQIQAVIDAGIIQSLVWVLQSAEFEVKKEAAWGISNATSGGTHDQIKFMVSQGCIKPLCDLLTCPDLKVVTVCLEALENILVVGEAEKNLGHTGEDNLYAQMIDEAEGLEKIENLQSHDNNDIYDKAVKILETFWTEDNEEEGNDENHAPQSGFQFGSTNVPPGQFNFI

SEQ ID NO: 99903 - protein, 452 aa, Arabidopsis thaliana
  peptide (1)..(452): Ceres Seq. ID no. 13603890
  misc_feature (113)..(154): Pfam Name: Armadillo/beta-catenin-like repeat Pfam Description: Armadillo/beta-catenin-like repeat
  misc_feature (1)..(452): Homolog of NCBI NO: 15235257 NR Description: importin alpha-2 subunit [Arabidopsis thaliana]
  misc_feature (1)..(452): Homolog of NCBI NO: 2154717 NR Description: Kap alpha protein [Arabidopsis thaliana]
  misc_feature (1)..(452): Homolog of NCBI NO: 25314872 NR Description: probable nuclear transport factor importin alpha
  misc_feature (1)..(451): Homolog of NCBI NO: 15217828 NR Description: importin alpha subunit -related [Arabidopsis
  misc_feature (1)..(451): Homolog of NCBI NO: 15230778 NR Description: importin alpha subunit [Arabidopsis thaliana]
  misc_feature (1)..(451): Homolog of NCBI NO: 25314876 NR Description: probable nuclear transport factor importin
  misc_feature (1)..(451): Homolog of NCBI NO: 15809794 NR Description: AT3g06720/F3E22_14 [Arabidopsis thaliana]
  misc_feature (1)..(451): Homolog of NCBI NO: 13699777 NR Description: AtKAP alpha [Arabidopsis thaliana]
  misc_feature (1)..(451): Homolog of NCBI NO: 13605661 NR Description: AT3g06720/F3E22_14 [Arabidopsis thaliana]
  misc_feature (1)..(451): Homolog of NCBI NO: 3915737 NR Description: Importin alpha subunit (Karyopherin alpha
MVAGIWSEDSNSQLEATNLLRKLLSIEQNPPINEVVQSGVVPRVVKFLSRDDFPKLQFEAAWALTNIASGTSENTNVIIESGAVPIFIQLLSSASEDVREQAVWALGNVAGDSPKCRDLVLSYGAMTPLLSQFNENTKLSMLRNATWTLSNFCRGKPPPAFEQTQPALPVLERLVQSMDEEVLTDACWALSYLSDNSNDKIQAVIEAGVVPRLIQLLGHSSPSVLIPALRTIGNIVTGDDLQTQMVLDQQALPCLLNLLKNNYKKSIKKEACWTISNITAGNADQIQAVIDAGIIQSLVWVLQSAEFEVKKEAAWGISNATSGGTHDQIKFMVSQGCIKPLCDLLTCPDLKVVTVCLEALENILVVGEAEKNLGHTGEDNLYAQMIDEAEGLEKIENLQSHDNNDIYDKAVKILETFWTEDNEEEGNDENHAPQSGFQFGSTNVPPGQFNFI

SEQ ID NO: 99904 - DNA, 1834 bp, Arabidopsis thaliana
  misc_feature (1)..(1834): Ceres Seq. ID no. 13603891
  misc_feature: MA Experiment ID: 108434 Result: Up-regulated in Transcription
  misc_feature: MA Experiment 108434 PARAMETER Experiment Name: At_Root_Tips_cDNA_P Parameter: Tissue Value: Root Tips
  misc_feature: MA Experiment ID: 108435 Result: Up-regulated in Transcription
  misc_feature: MA Experiment 108435 PARAMETER Experiment Name: At_stm_Mutants_cDNA_P Parameter: Plant Line Value: wt Landsburg vs stm
  misc_feature: MA Experiment 108435 PARAMETER Experiment Name: At_stm_Mutants_cDNA_P Parameter: Tissue Value: Shoot Apical Meristem Region
  misc_feature: MA Experiment ID: 108462 Result: Up-regulated in Transcription
  misc_feature: MA Experiment 108462 PARAMETER Experiment Name: At_Germinating_Seeds_cDNA_P Parameter: Age (day) Value: 2 vs. 0
  misc_feature: MA Experiment 108462 PARAMETER Experiment Name: At_Germinating_Seeds_cDNA_P Parameter: Tissue Value: Germinating Seeds
  misc_feature: MA Experiment ID: 108595 Result: Up-regulated in Transcription
  misc_feature: MA Experiment 108595 PARAMETER Experiment Name: At_Ler-pi_Ovule_cDNA_P Parameter: Plant Line Value: null
  misc_feature: MA Experiment ID: 108668 Result: Down-regulated in Transcription
  misc_feature: MA Experiment 108668 PARAMETER Experiment Name: At_2mM_SA_cDNA_P Parameter: Plant Line Value: WS
  misc_feature: MA Experiment 108668 PARAMETER Experiment Name: At_2mM_SA_cDNA_P Parameter: Timepoint (hr) Value: 6
  misc_feature: MA Experiment 108668 PARAMETER Experiment Name: At_2mM_SA_cDNA_P Parameter: Treatment Value: 2mM SA vs. No Treatment
  misc_feature: MA Experiment ID: 20000069 Result: Down-regulated in Transcription
  misc_feature: MA Experiment 20000069 PARAMETER Experiment Name: At_100uM_ABA_Mutants_cDNA_P Parameter: Plant Line Value: CS23
  misc_feature: MA Experiment 20000069 PARAMETER Experiment Name: At_100uM_ABA_Mutants_cDNA_P Parameter: Timepoint (hr) Value: 6
  misc_feature: MA Experiment 20000069 PARAMETER Experiment Name: At_100uM_ABA_Mutants_cDNA_P Parameter: Tissue Value: Aerial
  misc_feature: MA Experiment 20000069 PARAMETER Experiment Name: At_100uM_ABA_Mutants_cDNA_P Parameter: Treatment Value: 100uM ABA vs. No Treatment
  misc_feature: MA Experiment ID: 20000072 Result: Down-regulated in Transcription
  misc_feature: MA Experiment 20000072 PARAMETER Experiment Name: At_100uM_ABA_Mutants_cDNA_P Parameter: Plant Line Value: CS8105
  misc_feature: MA Experiment 20000072 PARAMETER Experiment Name: At_100uM_ABA_Mutants_cDNA_P Parameter: Timepoint (hr) Value: 6
  misc_feature: MA Experiment 20000072 PARAMETER Experiment Name: At_100uM_ABA_Mutants_cDNA_P Parameter: Tissue Value: Aerial
  misc_feature: MA Experiment 20000072 PARAMETER Experiment Name: At_100uM_ABA_Mutants_cDNA_P Parameter: Treatment Value: 100uM ABA vs. No Treatment
  misc_feature: MA Experiment ID: 20000182 Result: Down-regulated in Transcription
  misc_feature: MA Experiment 20000182 PARAMETER Experiment Name: At_2mM_SA_P Parameter: Age (day) Value: 14
  misc_feature: MA Experiment 20000182 PARAMETER Experiment Name: At_2mM_SA_P Parameter: Organism Value: A. thaliana
  misc_feature: MA Experiment 20000182 PARAMETER Experiment Name: At_2mM_SA_P Parameter: Plant Line Value: WS
  misc_feature: MA Experiment 20000182 PARAMETER Experiment Name: At_2mM_SA_P Parameter: Timepoint (hr) Value: 6
  misc_feature: MA Experiment 20000182 PARAMETER Experiment Name: At_2mM_SA_P Parameter: Tissue Value: Aerial
  misc_feature: MA Experiment 20000182 PARAMETER Experiment Name: At_2mM_SA_P Parameter: Treatment Value: 2mM SA vs. No Treatment
  misc_feature: MA Experiment ID: 20000264 Result: Up-regulated in Transcription
  misc_feature: MA Experiment 20000264 PARAMETER Experiment Name: At_Open_Flower_P Parameter: Age (day) Value: 21
  misc_feature: MA Experiment 20000264 PARAMETER Experiment Name: At_Open_Flower_P Parameter: Plant Line Value: WS
  misc_feature: MA Experiment 20000264 PARAMETER Experiment Name: At_Open_Flower_P Parameter: Tissue Value: Open Flower vs. Whole Plant
  misc_feature: MA Experiment ID: 20000265 Result: Up-regulated in Transcription
  misc_feature: MA Experiment 20000265 PARAMETER Experiment Name: At_Open_Flower_P Parameter: Age (day) Value: 21
  misc_feature: MA Experiment 20000265 PARAMETER Experiment Name: At_Open_Flower_P Parameter: Plant Line Value: WS
  misc_feature: MA Experiment 20000265 PARAMETER Experiment Name: At_Open_Flower_P Parameter: Tissue Value: Closed Flower vs. Whole Plant
  misc_feature: MA Experiment ID: 20000286 Result: Up-regulated in Transcription
  misc_feature: MA Experiment 20000286 PARAMETER Experiment Name: At_Open_Flower_P Parameter: Age (day) Value: 21
  misc_feature: MA Experiment 20000286 PARAMETER Experiment Name: At_Open_Flower_P Parameter: Plant Line Value: WS
  misc_feature: MA Experiment 20000286 PARAMETER Experiment Name: At_Open_Flower_P Parameter: Tissue Value: Half Open vs. Whole Plant
  misc_feature: MA Experiment ID: 20000495 Result: Up-regulated in Transcription
  misc_feature: MA Experiment 20000495 PARAMETER Experiment Name: At_Guard_Cells_P Parameter: Harvest Date Value: 8/2/2002
  misc_feature: MA Experiment 20000495 PARAMETER Experiment Name: At_Guard_Cells_P Parameter: Organism Value: A. thaliana
  misc_feature: MA Experiment 20000495 PARAMETER Experiment Name: At_Guard_Cells_P Parameter: Tissue Value: Guard Cells vs. Leaves
  misc_feature: MA Experiment ID: 20001911 Result: Down-regulated in Transcription
  misc_feature: MA Experiment 20001911 PARAMETER Experiment Name: At_Drought_Reproduction_P Parameter: Age (day) Value: 40
  misc_feature: MA Experiment 20001911 PARAMETER Experiment Name: At_Drought_Reproduction_P Parameter: Organism Value: A. thaliana
  misc_feature: MA Experiment 20001911 PARAMETER Experiment Name: At_Drought_Reproduction_P Parameter: Plant Line Value: WS
  misc_feature: MA Experiment 20001911 PARAMETER Experiment Name: At_Drought_Reproduction_P Parameter: Timepoint (day) Value: 10
  misc_feature: MA Experiment 20001911 PARAMETER Experiment Name: At_Drought_Reproduction_P Parameter: Tissue Value: Flowers
  misc_feature: MA Experiment 20001911 PARAMETER Experiment Name: At_Drought_Reproduction_P Parameter: Treatment Value: Drought vs. No Drought
aaagcagcttctgcaacctattcgttggttggttaatagaagctctctttctctgtctgtctttctctctcagagaaatggctcttcttctagtttcttcttcctcctcctatgccctcagagtcaccattttcttgtctttcttcttctttctctgcaatggcttctcttaccctactacttcttctcttttcaacacccatcaccatcgtcaccacttggccaagcacaactacaaagatgctctcactaaatcaatcctcttctttgaaggccaaaggtcagggaaacttccttctaaccagagaatgagttggagaagagactctggtctctctgatggctctgctcttcatgtggatttggttggagggtactatgatgcaggagacaatatcaaatttggtttcccaatggcattcacaaccacaatgctttcatggagtgtaattgaattcggtggactcatgaaatctgaattacaaaacgctaaaatagcgattcgttgggctactgattatctcctcaaagccacttcacaacctgacacaatctatgttcaagttggtgatgctaataaagaccattcttgttgggaaagacctgaagacatggatactgtaagaagtgtgtttaaagttgacaagaacattcctggttctgatgtcgccgctgaaaccgccgctgctctagccgccgccgccattgtattcagaaaatctgatccttcttactccaaagtcctcctcaaacgagccatcagtgtttttgcatttgcggacaaatacagaggaacttatagtgcaggattaaaacctgatgtttgtccattttattgctcttactctggttatcaggatgaattgttgtggggagctgcttggttacaaaaagcgacaaagaatataaaatatttgaattacataaaaatcaatggacaaatccttggagctgctgaatatgataacacttttggttgggataacaagcacgctggtgccagaatccttcttactaaggcatttttggttcagaatgtgaagacacttcatgaatacaaaggtcatgctgataatttcatctgctctgttattcctggagctcctttctcttctactcagtatacaccaggtggattattgtttaaaatggcagacgccaacatgcaatacgtgacgtcaacatcgttcttgctcttaacctatgccaaatacttaacctccgccaaaaccgtcgtccattgcggtggctccgtctacactcccggtcgtcttcgctccatcgccaaaagacaggtggattatcttcttggagacaacccattaagaatgtcttacatggttggttacggtccaaaattcccacggagaatccaccaccgtggctcctcattaccttgtgttgcaagccacccggccaagatccaatgccaccaaggatttgcaatcatgaactctcaatctccaaaccctaacttccttgttggtgcagtcgttggtggtccggaccagcatgatcgcttcccagacgaacggtctgattacgagcagtccgagccggctacttacatcaattcaccactcgttggagctcttgcctacttcgcccacgcctatggtcaactctagtttagtaacgagtgtgttagtttaagtaaaaataaaaatgaaggaagttttatctttgtttttacttttatttgttagtaatgtagtggaccgaaaatcggatcacaagtggacattggtccgagggatggtttatttggttcgttataatataacgtcaagtgtaatcttattgtggttattaatgttatcatcctattaattac

SEQ ID NO: 99905 - protein, 541 aa, Arabidopsis thaliana
  peptide (1)..(541): Ceres Seq. ID no. 13603892
  misc_feature (77)..(534): Pfam Name: Glycosyl hydrolase family 9 Pfam Description: Glycosyl hydrolase family 9
  misc_feature (26)..(541): Homolog of NCBI NO: 15235301 NR Description: glycosyl hydrolase family 9 [Arabidopsis thaliana]
  misc_feature (42)..(541): Homolog of NCBI NO: 11358947 NR Description: endo-1,3(4)-beta-glucanase (EC 3.2.1.6) - garden
  misc_feature (42)..(541): Homolog of NCBI NO: 6009979 NR Description: endo-1,4-beta-glucanase [Pisum sativum]
  misc_feature (26)..(537): Homolog of NCBI NO: 25350173 NR Description: cellulase (EC 3.2.1.4) [imported] - Arabidopsis
  misc_feature (26)..(537): Homolog of NCBI NO: 15218612 NR Description: glycosyl hydrolase family 9
  misc_feature (32)..(541): Homolog of NCBI NO: 1362091 NR Description: cellulase (EC 3.2.1.4) precursor - tomato
  misc_feature (45)..(537): Homolog of NCBI NO: 7484476 NR Description: cellulase (EC 3.2.1.4) 1 precursor - Monterey pine
  misc_feature (18)..(538): Homolog of NCBI NO: 11357128 NR Description: cellulase (EC 3.2.1.4) 2 precursor - Monterey pine
  misc_feature (66)..(535): Homolog of NCBI NO: 1655545 NR Description: endo-beta-1,4-glucanase [Capsicum annuum]
  misc_feature (39)..(538): Homolog of NCBI NO: 33943180 NR Description: endo-1,4-beta-glucanase [Malus x domestica]
SSFCNLFVGWLIEALFLCLSFSLREMALLLVSSSSSYALRVTIFLSFFFFLCNGFSYPTTSSLFNTHHHRHHLAKHNYKDALTKSILFFEGQRSGKLPSNQRMSWRRDSGLSDGSALHVDLVGGYYDAGDNIKFGFPMAFTTTMLSWSVIEFGGLMKSELQNAKIAIRWATDYLLKATSQPDTIYVQVGDANKDHSCWERPEDMDTVRSVFKVDKNIPGSDVAAETAAALAAAAIVFRKSDPSYSKVLLKRAISVFAFADKYRGTYSAGLKPDVCPFYCSYSGYQDELLWGAAWLQKATKNIKYLNYIKINGQILGAAEYDNTFGWDNKHAGARILLTKAFLVQNVKTLHEYKGHADNFICSVIPGAPFSSTQYTPGGLLFKMADANMQYVTSTSFLLLTYAKYLTSAKTVVHCGGSVYTPGRLRSIAKRQVDYLLGDNPLRMSYMVGYGPKFPRRIHHRGSSLPCVASHPAKIQCHQGFAIMNSQSPNPNFLVGAVVGGPDQHDRFPDERSDYEQSEPATYINSPLVGALAYFAHAYGQL

SEQ ID NO: 99906 - protein, 516 aa, Arabidopsis thaliana; identical to SEQ ID NO: 42712
  peptide (1)..(516): Ceres Seq. ID no. 13603893
  misc_feature (52)..(509): Pfam Name: Glycosyl hydrolase family 9 Pfam Description: Glycosyl hydrolase family 9
  misc_feature (1)..(516): Homolog of NCBI NO: 15235301 NR Description: glycosyl hydrolase family 9 [Arabidopsis thaliana]
  misc_feature (17)..(516): Homolog of NCBI NO: 11358947 NR Description: endo-1,3(4)-beta-glucanase (EC 3.2.1.6) - garden
  misc_feature (17)..(516): Homolog of NCBI NO: 6009979 NR Description: endo-1,4-beta-glucanase [Pisum sativum]
  misc_feature (1)..(512): Homolog of NCBI NO: 25350173 NR Description: cellulase (EC 3.2.1.4) [imported] - Arabidopsis
  misc_feature (1)..(512): Homolog of NCBI NO: 15218612 NR Description: glycosyl hydrolase family 9
  misc_feature (7)..(516): Homolog of NCBI NO: 1362091 NR Description: cellulase (EC 3.2.1.4) precursor - tomato
  misc_feature (20)..(512): Homolog of NCBI NO: 7484476 NR Description: cellulase (EC 3.2.1.4) 1 precursor - Monterey pine
  misc_feature (1)..(513): Homolog of NCBI NO: 11357128 NR Description: cellulase (EC 3.2.1.4) 2 precursor - Monterey pine
  misc_feature (41)..(510): Homolog of NCBI NO: 1655545 NR Description: endo-beta-1,4-glucanase [Capsicum annuum]
  misc_feature (14)..(513): Homolog of NCBI NO: 33943180 NR Description: endo-1,4-beta-glucanase [Malus x domestica]

SEQ ID NO: 99907 - protein, 439 aa, Arabidopsis thaliana; identical to SEQ ID NO: 42713
  peptide (1)..(439): Ceres Seq. ID no. 13603894
  misc_feature (1)..(432): Pfam Name: Glycosyl hydrolase family 9 Pfam Description: Glycosyl hydrolase family 9
  misc_feature (1)..(439): Homolog of NCBI NO: 15235301 NR Description: glycosyl hydrolase family 9 [Arabidopsis thaliana]
  misc_feature (1)..(439): Homolog of NCBI NO: 11358947 NR Description: endo-1,3(4)-beta-glucanase (EC 3.2.1.6) - garden
  misc_feature (1)..(439): Homolog of NCBI NO: 6009979 NR Description: endo-1,4-beta-glucanase [Pisum sativum]
  misc_feature (1)..(435): Homolog of NCBI NO: 25350173 NR Description: cellulase (EC 3.2.1.4) [imported] - Arabidopsis
  misc_feature (1)..(435): Homolog of NCBI NO: 15218612 NR Description: glycosyl hydrolase family 9
  misc_feature (1)..(439): Homolog of NCBI NO: 1362091 NR Description: cellulase (EC 3.2.1.4) precursor - tomato
  misc_feature (1)..(435): Homolog of NCBI NO: 7484476 NR Description: cellulase (EC 3.2.1.4) 1 precursor - Monterey pine
  misc_feature (1)..(436): Homolog of NCBI NO: 11357128 NR Description: cellulase (EC 3.2.1.4) 2 precursor - Monterey pine
  misc_feature (1)..(433): Homolog of NCBI NO: 1655545 NR Description: endo-beta-1,4-glucanase [Capsicum annuum]
  misc_feature (1)..(436): Homolog of NCBI NO: 33943180 NR Description: endo-1,4-beta-glucanase [Malus x domestica]

SEQ ID NO: 99908 - DNA, 1176 bp, Arabidopsis thaliana
  misc_feature (1)..(1176): Ceres Seq. ID no. 13603895
  misc_feature: MA Experiment ID: 108488 Result: Down-regulated in Transcription
  misc_feature: MA Experiment ID: 108573 Result: Up-regulated in Transcription
  misc_feature: MA Experiment 108573 PARAMETER Experiment Name: At_Drought_cDNA_P Parameter: Timepoint (hr) Value: 6
  misc_feature: MA Experiment 108573 PARAMETER Experiment Name: At_Drought_cDNA_P Parameter: Tissue Value: Aerial
  misc_feature: MA Experiment 108573 PARAMETER Experiment Name: At_Drought_cDNA_P Parameter: Treatment Value: Drought vs. No Drought
  misc_feature: MA Experiment ID: 108577 Result: Down-regulated in Transcription
  misc_feature: MA Experiment 108577 PARAMETER Experiment Name: At_42deg_Heat_cDNA_P Parameter: Temperature (deg C) Value: 42 vs. 22
  misc_feature: MA Experiment 108577 PARAMETER Experiment Name: At_42deg_Heat_cDNA_P Parameter: Timepoint (hr) Value: 6
  misc_feature: MA Experiment 108577 PARAMETER Experiment Name: At_42deg_Heat_cDNA_P Parameter: Tissue Value: Aerial
  misc_feature: MA Experiment ID: 20000069 Result: Up-regulated in Transcription
  misc_feature: MA Experiment 20000069 PARAMETER Experiment Name: At_100uM_ABA_Mutants_cDNA_P Parameter: Plant Line Value: CS23
  misc_feature: MA Experiment 20000069 PARAMETER Experiment Name: At_100uM_ABA_Mutants_cDNA_P Parameter: Timepoint (hr) Value: 6
  misc_feature: MA Experiment 20000069 PARAMETER Experiment Name: At_100uM_ABA_Mutants_cDNA_P Parameter: Tissue Value: Aerial
  misc_feature: MA Experiment 20000069 PARAMETER Experiment Name: At_100uM_ABA_Mutants_cDNA_P Parameter: Treatment Value: 100uM ABA vs. No Treatment
  misc_feature: MA Experiment ID: 20000087 Result: Up-regulated in Transcription
  misc_feature: MA Experiment 20000087 PARAMETER Experiment Name: At_100uM_ABA_Mutants_cDNA_P Parameter: Plant Line Value: WS
  misc_feature: MA Experiment 20000087 PARAMETER Experiment Name: At_100uM_ABA_Mutants_cDNA_P Parameter: Timepoint (hr) Value: 6
  misc_feature: MA Experiment 20000087 PARAMETER Experiment Name: At_100uM_ABA_Mutants_cDNA_P Parameter: Tissue Value: Aerial
  misc_feature: MA Experiment 20000087 PARAMETER Experiment Name: At_100uM_ABA_Mutants_cDNA_P Parameter: Treatment Value: 100uM ABA vs. No Treatment
  misc_feature: MA Experiment ID: 20000117 Result: Up-regulated in Transcription
  misc_feature: MA Experiment 20000117 PARAMETER Experiment Name: At_100uM_ABA_Mutants_cDNA_P Parameter: Plant Line Value: Columbia
  misc_feature: MA Experiment 20000117 PARAMETER Experiment Name: At_100uM_ABA_Mutants_cDNA_P Parameter: Timepoint (hr) Value: 6
  misc_feature: MA Experiment 20000117 PARAMETER Experiment Name: At_100uM_ABA_Mutants_cDNA_P Parameter: Tissue Value: Aerial
  misc_feature: MA Experiment 20000117 PARAMETER Experiment Name: At_100uM_ABA_Mutants_cDNA_P Parameter: Treatment Value: 100uM ABA vs. No Treatment
  misc_feature: MA Experiment ID: 20000173 Result: Down-regulated in Transcription
  misc_feature: MA Experiment 20000173 PARAMETER Experiment Name: At_42deg_Heat_P Parameter: Age (day) Value: 14
  misc_feature: MA Experiment 20000173 PARAMETER Experiment Name: At_42deg_Heat_P Parameter: Organism Value: A. thaliana
  misc_feature: MA Experiment 20000173 PARAMETER Experiment Name: At_42deg_Heat_P Parameter: Plant Line Value: WS
  misc_feature: MA Experiment 20000173 PARAMETER Experiment Name: At_42deg_Heat_P Parameter: Temperature (deg C) Value: 42 vs. 22
  misc_feature: MA Experiment 20000173 PARAMETER Experiment Name: At_42deg_Heat_P Parameter: Timepoint (hr) Value: 6
  misc_feature: MA Experiment 20000173 PARAMETER Experiment Name: At_42deg_Heat_P Parameter: Tissue Value: Aerial
  misc_feature: MA Experiment ID: 20001451 Result: Down-regulated in Transcription
  misc_feature: MA Experiment 20001451 PARAMETER Experiment Name: At_Far-red-induction_P Parameter: Age (day) Value: 7
  misc_feature: MA Experiment 20001451 PARAMETER Experiment Name: At_Far-red-induction_P Parameter: Light Value: Far-red vs. White
  misc_feature: MA Experiment 20001451 PARAMETER Experiment Name: At_Far-red-induction_P Parameter: Organism Value: A. thaliana
  misc_feature: MA Experiment 20001451 PARAMETER Experiment Name: At_Far-red-induction_P Parameter: Plant Line Value: Columbia
  misc_feature: MA Experiment 20001451 PARAMETER Experiment Name: At_Far-red-induction_P Parameter: Timepoint (hr) Value: 24
  misc_feature: MA Experiment 20001451 PARAMETER Experiment Name: At_Far-red-induction_P Parameter: Tissue Value: Whole Plant
acctgagagtaaagaagtgagaaggagaagaaagaagcaatggagaagatagagcacacgacgatatctaccaatggtattaacatgcatgtggcttcgattggttcaggtccagtgatcctattcgtccatggctttcccgatctctggtactcatggcgtcaccagcttgtctctttcgctgccttaggttaccgcgcaatcgctccagatcttcgaggatacggcgattccgatgcgccgccgtctcgtgaatcttacaccatccttcatatcgtcggagacctcgtcggattactggattcgctcggtgttgatcgggttttcctcgtcggtcacgattggggagcaattgttgcgtggtggctttgtatgatcaggcctgatcgagtcaacgcgttggtcaacactagcgttgtgtttaatccgaggaatccttctgtgaaacctgttgatgcgtttagggctttgttcggcgatgattactacatttgcaggtttcaggagcctggagagatcgaagaggactttgctcaagttgatacaaaaaagttaataaccagatttttcacttcgcgtaacccacgtccaccttgcattccaaagtcagttggtttcagaggtttacctgatccaccttctttgcccgcttggctcaccgaacaagatgtcaggttctacggagacaagtttagccaaaaaggcttcaccggtgggctaaactactatcgcgccctgaacctaagctgggaactaacagctccatggaccggtctacaaatcaaagtccctgtgaaattcatagtgggtgatctagacataacatacaatatccccggaacaaaggaatacatacatgaaggtggtttgaagaagcacgtaccttttctacaagaagtggtggtaatggaaggtgtaggtcacttcctccatcaagagaagcctgacgaggtcactgaccatatctatggcttcttcaagaaattcagaacccgcgaaaccgcatccttgtagtagttctccgtctgcacaatgtcaaattcaaggttgattaagcttgatcagggttacttactgtcttagagccctactatgtaatgttttcaaggatgctatctgtgtattgtgcttgtttaataatttagcaaaatataataatagaacaaataatttctc

SEQ ID NO: 99909 - protein, 324 aa, Arabidopsis thaliana; identical to SEQ ID NO: 29756
  peptide (1)..(324): Ceres Seq. ID no. 13603896
  misc_feature (52)..(311): Pfam Name: alpha/beta hydrolase fold Pfam Description: alpha/beta hydrolase fold
  misc_feature (1)..(324): Homolog of NCBI NO: 18411917 NR Description: epoxide hydrolase, putative [Arabidopsis thaliana]
  misc_feature (1)..(316): Homolog of NCBI NO: 27960680 NR Description: soluble epoxide hydrolase [Euphorbia lagascae]
  misc_feature (1)..(316): Homolog of NCBI NO: 25044843 NR Description: epoxide hydrolase [Ananas comosus]

SEQ ID NO: 99910 - protein, 309 aa, Arabidopsis thaliana; identical to SEQ ID NO: 29757
  peptide (1)..(309): Ceres Seq. ID no. 13603897
  misc_feature (37)..(296): Pfam Name: alpha/beta hydrolase fold Pfam Description: alpha/beta hydrolase fold
  misc_feature (1)..(309): Homolog of NCBI NO: 18411917 NR Description: epoxide hydrolase, putative [Arabidopsis thaliana]
  misc_feature (1)..(301): Homolog of NCBI NO: 27960680 NR Description: soluble epoxide hydrolase [Euphorbia lagascae]
  misc_feature (1)..(301): Homolog of NCBI NO: 25044843 NR Description: epoxide hydrolase [Ananas comosus]

SEQ ID NO: 99911 - protein, 213 aa, Arabidopsis thaliana; identical to SEQ ID NO: 29758
  peptide (1)..(213): Ceres Seq. ID no. 13603898
  misc_feature (1)..(200): Pfam Name: alpha/beta hydrolase fold Pfam Description: alpha/beta hydrolase fold
  misc_feature (1)..(213): Homolog of NCBI NO: 18411917 NR Description: epoxide hydrolase, putative [Arabidopsis thaliana]
  misc_feature (1)..(205): Homolog of NCBI NO: 27960680 NR Description: soluble epoxide hydrolase [Euphorbia lagascae]
  misc_feature (1)..(205): Homolog of NCBI NO: 25044843 NR Description: epoxide hydrolase [Ananas comosus]

SEQ ID NO: 99912 - DNA, 869 bp, Arabidopsis thaliana
  misc_feature (1)..(869): Ceres Seq. ID no. 13603920
  misc_feature: MA Experiment ID: 20000171 Result: Up-regulated in Transcription
  misc_feature: MA Experiment 20000171 PARAMETER Experiment Name: At_42deg_Heat_P Parameter: Age (day) Value: 14
  misc_feature: MA Experiment 20000171 PARAMETER Experiment Name: At_42deg_Heat_P Parameter: Organism Value: A. thaliana
  misc_feature: MA Experiment 20000171 PARAMETER Experiment Name: At_42deg_Heat_P Parameter: Plant Line Value: WS
  misc_feature: MA Experiment 20000171 PARAMETER Experiment Name: At_42deg_Heat_P Parameter: Temperature (deg C) Value: 42 vs. 22
  misc_feature: MA Experiment 20000171 PARAMETER Experiment Name: At_42deg_Heat_P Parameter: Timepoint (hr) Value: 1
  misc_feature: MA Experiment 20000171 PARAMETER Experiment Name: At_42deg_Heat_P Parameter: Tissue Value: Aerial
  misc_feature: MA Experiment ID: 20000173 Result: Up-regulated in Transcription
  misc_feature: MA Experiment 20000173 PARAMETER Experiment Name: At_42deg_Heat_P Parameter: Age (day) Value: 14
  misc_feature: MA Experiment 20000173 PARAMETER Experiment Name: At_42deg_Heat_P Parameter: Organism Value: A. thaliana
  misc_feature: MA Experiment 20000173 PARAMETER Experiment Name: At_42deg_Heat_P Parameter: Plant Line Value: WS
  misc_feature: MA Experiment 20000173 PARAMETER Experiment Name: At_42deg_Heat_P Parameter: Temperature (deg C) Value: 42 vs. 22
  misc_feature: MA Experiment 20000173 PARAMETER Experiment Name: At_42deg_Heat_P Parameter: Timepoint (hr) Value: 6
  misc_feature: MA Experiment 20000173 PARAMETER Experiment Name: At_42deg_Heat_P Parameter: Tissue Value: Aerial
  misc_feature: MA Experiment ID: 20000234 Result: Up-regulated in Transcription
  misc_feature: MA Experiment 20000234 PARAMETER Experiment Name: At_Siliques_P Parameter: Age (day) Value: 21
  misc_feature: MA Experiment 20000234 PARAMETER Experiment Name: At_Siliques_P Parameter: Organism Value: A. thaliana
  misc_feature: MA Experiment 20000234 PARAMETER Experiment Name: At_Siliques_P Parameter: Plant Line Value: WS
  misc_feature: MA Experiment 20000234 PARAMETER Experiment Name: At_Siliques_P Parameter: Tissue Value: Less Than 5mm Siliques vs. Whole Plant
aaaattagttcgtcgaagcatcgagaaaatgatcgtactttctgttggttccgcttcttcatctccgatcgtcgtcgtcttttccgtcgcgcttcttctgttctacttctctgaaacttctctaggagctccttgtcccatcaatggcttgccaatcgtgaggaatattagtgaccttcctcaggataactatggaagaccaggtctttcccacatgactgttgctggctccgtattgcatggaatgaaagaggttgaaatatggcttcagacatttgctccaggttcagagacaccaattcacaggcactcctgtgaagaggtttttgttgtcctaaagggcagtggtactctgtatctcgctgaaacacatggaaatttccctgggaaaccaatcgaatttccaatctttgccaacagtacaattcatattccgatcaatgatgctcatcaggtcaaaaacaccggtcatgaggacctgcaggtgttggttatcatatctcggccgcctattaaaatcttcatctacgaagactggtttatgccacacactgctgcaaggctgaagttcccttactattgggatgagcaatgcattcaagaatcacaaaaagacgagctttaaagcaaagtccgaggctaaaagcaagcacaacctttagatagtaaaatcatagttgaggttttgtgacactacgtagatactggtaaattggcaaggattttacatgaatgttgttgttaccagaaagtaaataaatgttcaatctttgatgttcttaagtaagtgagtcctattggtcatgaaaatatgtaagtgtgcacatcttgattgcatttgcgataaatttatagagtttcactcactt

SEQ ID NO: 99913 - protein, 207 aa, Arabidopsis thaliana
  peptide (1)..(207): Ceres Seq. ID no. 13603921
  misc_feature (42)..(207): Pfam Name: Auxin binding protein Pfam Description: Auxin binding protein
  misc_feature (10)..(207): Homolog of NCBI NO: 15236229 NR Description: auxin-binding protein 1 precursor [Arabidopsis
  misc_feature (10)..(207): Homolog of NCBI NO: 21592915 NR Description: auxin-binding protein 1 precursor [Arabidopsis
  misc_feature (10)..(207): Homolog of NCBI NO: 22122218 NR Description: resistant endoplasmic reticulum auxin-binding
  misc_feature (10)..(207): Homolog of NCBI NO: 22122222 NR Description: susceptible endoplasmic reticulum auxin-binding
  misc_feature (10)..(207): Homolog of NCBI NO: 22122220 NR Description: susceptible endoplasmic reticulum auxin-binding
  misc_feature (10)..(207): Homolog of NCBI NO: 22122216 NR Description: resistant endoplasmic reticulum auxin-binding
  misc_feature (10)..(207): Homolog of NCBI NO: 22122224 NR Description: susceptible endoplasmic reticulum auxin-binding
  misc_feature (10)..(207): Homolog of NCBI NO: 7442015 NR Description: auxin-binding protein precursor - radish
  misc_feature (21)..(207): Homolog of NCBI NO: 1843533 NR Description: auxin binding protein [Malus x domestica]
  misc_feature (25)..(207): Homolog of NCBI NO: 461449 NR Description: AUXIN-BINDING PROTEIN T85 PRECURSOR (ABP)
KLVRRSIEKMIVLSVGSASSSPIVVVFSVALLLFYFSETSLGAPCPINGLPIVRNISDLPQDNYGRPGLSHMTVAGSVLHGMKEVEIWLQTFAPGSETPIHRHSCEEVFVVLKGSGTLYLAETHGNFPGKPIEFPIFANSTIHIPINDAHQVKNTGHEDLQVLVIISRPPIKIFIYEDWFMPHTAARLKFPYYWDEQCIQESQKDEL

SEQ ID NO: 99914 - protein, 198 aa, Arabidopsis thaliana; identical to SEQ ID NO: 22651
  peptide (1)..(198): Ceres Seq. ID no. 13603922
  misc_feature (33)..(198): Pfam Name: Auxin binding protein Pfam Description: Auxin binding protein
  misc_feature (1)..(198): Homolog of NCBI NO: 15236229 NR Description: auxin-binding protein 1 precursor [Arabidopsis
  misc_feature (1)..(198): Homolog of NCBI NO: 21592915 NR Description: auxin-binding protein 1 precursor [Arabidopsis
  misc_feature (1)..(198): Homolog of NCBI NO: 22122218 NR Description: resistant endoplasmic reticulum auxin-binding
  misc_feature (1)..(198): Homolog of NCBI NO: 22122222 NR Description: susceptible endoplasmic reticulum auxin-binding
  misc_feature (1)..(198): Homolog of NCBI NO: 22122220 NR Description: susceptible endoplasmic reticulum auxin-binding
  misc_feature (1)..(198): Homolog of NCBI NO: 22122216 NR Description: resistant endoplasmic reticulum auxin-binding
  misc_feature (1)..(198): Homolog of NCBI NO: 22122224 NR Description: susceptible endoplasmic reticulum auxin-binding
  misc_feature (1)..(198): Homolog of NCBI NO: 7442015 NR Description: auxin-binding protein precursor - radish
  misc_feature (12)..(198): Homolog of NCBI NO: 1843533 NR Description: auxin binding protein [Malus x domestica]
  misc_feature (16)..(198): Homolog of NCBI NO: 461449 NR Description: AUXIN-BINDING PROTEIN T85 PRECURSOR (ABP)

SEQ ID NO: 99915 - protein, 136 aa, Arabidopsis thaliana; identical to SEQ ID NO: 22652
  peptide (1)..(136): Ceres Seq. ID no. 13603923
  misc_feature (1)..(136): Pfam Name: Auxin binding protein Pfam Description: Auxin binding protein
  misc_feature (1)..(136): Homolog of NCBI NO: 15236229 NR Description: auxin-binding protein 1 precursor [Arabidopsis
  misc_feature (1)..(136): Homolog of NCBI NO: 21592915 NR Description: auxin-binding protein 1 precursor [Arabidopsis
  misc_feature (1)..(136): Homolog of NCBI NO: 22122218 NR Description: resistant endoplasmic reticulum auxin-binding
  misc_feature (1)..(136): Homolog of NCBI NO: 22122222 NR Description: susceptible endoplasmic reticulum auxin-binding
  misc_feature (1)..(136): Homolog of NCBI NO: 22122220 NR Description: susceptible endoplasmic reticulum auxin-binding
  misc_feature (1)..(136): Homolog of NCBI NO: 22122216 NR Description: resistant endoplasmic reticulum auxin-binding
  misc_feature (1)..(136): Homolog of NCBI NO: 22122224 NR Description: susceptible endoplasmic reticulum auxin-binding
  misc_feature (1)..(136): Homolog of NCBI NO: 7442015 NR Description: auxin-binding protein precursor - radish
  misc_feature (1)..(136): Homolog of NCBI NO: 1843533 NR Description: auxin binding protein [Malus x domestica]
  misc_feature (1)..(136): Homolog of NCBI NO: 461449 NR Description: AUXIN-BINDING PROTEIN T85 PRECURSOR (ABP)

SEQ ID NO: 99916 - DNA, 902 bp, Arabidopsis thaliana
  misc_feature (1)..(902): Ceres Seq. ID no. 13603924
  misc_feature: MA Experiment ID: 108462 Result: Down-regulated in Transcription
  misc_feature: MA Experiment 108462 PARAMETER Experiment Name: At_Germinating_Seeds_cDNA_P Parameter: Age (day) Value: 2 vs. 0
  misc_feature: MA Experiment 108462 PARAMETER Experiment Name: At_Germinating_Seeds_cDNA_P Parameter: Tissue Value: Germinating Seeds
  misc_feature: MA Experiment ID: 20000072 Result: Down-regulated in Transcription
  misc_feature: MA Experiment 20000072 PARAMETER Experiment Name: At_100uM_ABA_Mutants_cDNA_P Parameter: Plant Line Value: CS8105
  misc_feature: MA Experiment 20000072 PARAMETER Experiment Name: At_100uM_ABA_Mutants_cDNA_P Parameter: Timepoint (hr) Value: 6
  misc_feature: MA Experiment 20000072 PARAMETER Experiment Name: At_100uM_ABA_Mutants_cDNA_P Parameter: Tissue Value: Aerial
  misc_feature: MA Experiment 20000072 PARAMETER Experiment Name: At_100uM_ABA_Mutants_cDNA_P Parameter: Treatment Value: 100uM ABA vs. No Treatment
  misc_feature: MA Experiment ID: 20000093 Result: Up-regulated in Transcription
  misc_feature: MA Experiment 20000093 PARAMETER Experiment Name: At_42deg_Heat_cDNA_P Parameter: Temperature (deg C) Value: 42 vs. 22
  misc_feature: MA Experiment 20000093 PARAMETER Experiment Name: At_42deg_Heat_cDNA_P Parameter: Timepoint (hr) Value: 0.5
  misc_feature: MA Experiment 20000093 PARAMETER Experiment Name: At_42deg_Heat_cDNA_P Parameter: Tissue Value: Aerial
  misc_feature: MA Experiment ID: 20000111 Result: Up-regulated in Transcription
  misc_feature: MA Experiment 20000111 PARAMETER Experiment Name: At_42deg_Heat_cDNA_P Parameter: Temperature (deg C) Value: 42 vs. 22
  misc_feature: MA Experiment 20000111 PARAMETER Experiment Name: At_42deg_Heat_cDNA_P Parameter: Timepoint (hr) Value: 6
  misc_feature: MA Experiment 20000111 PARAMETER Experiment Name: At_42deg_Heat_cDNA_P Parameter: Tissue Value: Aerial
  misc_feature: MA Experiment ID: 20000113 Result: Up-regulated in Transcription
  misc_feature: MA Experiment 20000113 PARAMETER Experiment Name: At_42deg_Heat_cDNA_P Parameter: Temperature (deg C) Value: 42 vs. 22
  misc_feature: MA Experiment 20000113 PARAMETER Experiment Name: At_42deg_Heat_cDNA_P Parameter: Timepoint (hr) Value: 8
  misc_feature: MA Experiment 20000113 PARAMETER Experiment Name: At_42deg_Heat_cDNA_P Parameter: Tissue Value: Aerial
  misc_feature: MA Experiment ID: 20000171 Result: Up-regulated in Transcription
  misc_feature: MA Experiment 20000171 PARAMETER Experiment Name: At_42deg_Heat_P Parameter: Age (day) Value: 14
  misc_feature: MA Experiment 20000171 PARAMETER Experiment Name: At_42deg_Heat_P Parameter: Organism Value: A. thaliana
  misc_feature: MA Experiment 20000171 PARAMETER Experiment Name: At_42deg_Heat_P Parameter: Plant Line Value: WS
  misc_feature: MA Experiment 20000171 PARAMETER Experiment Name: At_42deg_Heat_P Parameter: Temperature (deg C) Value: 42 vs. 22
  misc_feature: MA Experiment 20000171 PARAMETER Experiment Name: At_42deg_Heat_P Parameter: Timepoint (hr) Value: 1
  misc_feature: MA Experiment 20000171 PARAMETER Experiment Name: At_42deg_Heat_P Parameter: Tissue Value: Aerial
  misc_feature: MA Experiment ID: 20000173 Result: Up-regulated in Transcription
  misc_feature: MA Experiment 20000173 PARAMETER Experiment Name: At_42deg_Heat_P Parameter: Age (day) Value: 14
  misc_feature: MA Experiment 20000173 PARAMETER Experiment Name: At_42deg_Heat_P Parameter: Organism Value: A. thaliana
  misc_feature: MA Experiment 20000173 PARAMETER Experiment Name: At_42deg_Heat_P Parameter: Plant Line Value: WS
  misc_feature: MA Experiment 20000173 PARAMETER Experiment Name: At_42deg_Heat_P Parameter: Temperature (deg C) Value: 42 vs. 22
  misc_feature: MA Experiment 20000173 PARAMETER Experiment Name: At_42deg_Heat_P Parameter: Timepoint (hr) Value: 6
  misc_feature: MA Experiment 20000173 PARAMETER Experiment Name: At_42deg_Heat_P Parameter: Tissue Value: Aerial
ccctctttgcactttcttcttcccgtcgctaccgaaagcttctgtctctctcactcgcagggttctctggaactttctgaacgatgccgaggtattactgtgattattgcgatacttatctcactcacgattccccatcagtaaggaagcagcacaatgctggttacaaacacaaggcgaatgtgagaatatactatcagcaatttgaggaacaacaaacccaaagtttgattgatcagagaattaaggaacatcttggccaaactggagggtatcaacaggttggtgctgtgtttaatcagcatatgcttgcaagacctcgccctcccatgatgctaccacctggaagtatgcctatgggtatgcgacctcctgttctgcctagacccatgatgcctcctcaaggttatatgcctcctccaggagtaccacagatgatggcaccgcctggtgctcctctacctccacctccacaaaatggtattctgaggccaccaggaatggctcccataccaggtcaaggtggcggaccaccaggaatggctcccataccaggtcaaggtggcggaccacctcccaattataatggactacctcctcctcctccttatcatacaaatccagctgctccaccaagtggtaatttcaacaatccaaacctcaacaatccgaatcccagtgctgaatctcctgaaagcaatgagtagagttagtaggtctgaatgaatcatttttctcctgccaaaaaattctcagagctcttgtttaacacaatatcctaccttttctactccaatttttatgaagaggtttagaactaacgtatgtgaaatgagttttatgtgttagatgattgtatccattagagtcatgaaaaggaaaatctgaggtttcttatctct

SEQ ID NO: 99917 - protein, 207 aa, Arabidopsis thaliana
  peptide (1)..(207): Ceres Seq. ID no. 13603925
  misc_feature (79)..(203): Pfam Name: Extensin-like region Pfam Description: Extensin-like region
  misc_feature (1)..(207): Homolog of NCBI NO: 18412147 NR Description: proline-rich protein family [Arabidopsis thaliana]
  misc_feature (1)..(207): Homolog of NCBI NO: 28466929 NR Description: At4g03120 [Arabidopsis thaliana]
  misc_feature (1)..(108): Homolog of NCBI NO: 25295939 NR Description: probable C-type U1 snRNP [imported] - Arabidopsis
  misc_feature (1)..(203): Homolog of NCBI NO: 32412708 NR Description: hypothetical protein [Neurospora crassa] related to U1 SMALL NUCLEAR RIBONUCLEOPROTEIN C [Neurospora >gi|28922972|gb|EAA32191.1| hypothetical protein [Neurospora
  misc_feature (1)..(205): Homolog of NCBI NO: 38111701 NR Description: hypothetical protein MG08209.4 [Magnaporthe
  misc_feature (1)..(159): Homolog of NCBI NO: 31242193 NR Description: ENSANGP00000018169 [Anopheles gambiae]
  misc_feature (1)..(143): Homolog of NCBI NO: 39580999 NR Description: Hypothetical protein CBG19656 [Caenorhabditis
  misc_feature (1)..(155): Homolog of NCBI NO: 34852241 NR Description: similar to U1 snRNP-specific protein C [Rattus
  misc_feature (1)..(154): Homolog of NCBI NO: 548881 NR Description: U1 small nuclear ribonucleoprotein C (U1-C)
  misc_feature (1)..(137): Homolog of NCBI NO: 17539712 NR Description: Small nuclear ribonucleoprotein polypeptide C
MPRYYCDYCDTYLTHDSPSVRKQHNAGYKHKANVRIYYQQFEEQQTQSLIDQRIKEHLGQTGGYQQVGAVFNQHMLARPRPPMMLPPGSMPMGMRPPVLPRPMMPPQGYMPPPGVPQMMAPPGAPLPPPPQNGILRPPGMAPIPGQGGGPPGMAPIPGQGGGPPPNYNGLPPPPPYHTNPAAPPSGNFNNPNLNNPNPSAESPESNE

SEQ ID NO: 99918 - protein, 133 aa, Arabidopsis thaliana; identical to SEQ ID NO: 34753
  peptide (1)..(133): Ceres Seq. ID no. 13603926
  misc_feature (5)..(129): Pfam Name: Extensin-like region Pfam Description: Extensin-like region
  misc_feature (1)..(133): Homolog of NCBI NO: 18412147 NR Description: proline-rich protein family [Arabidopsis thaliana]
  misc_feature (1)..(133): Homolog of NCBI NO: 28466929 NR Description: At4g03120 [Arabidopsis thaliana]
  misc_feature (1)..(34): Homolog of NCBI NO: 25295939 NR Description: probable C-type U1 snRNP [imported] - Arabidopsis
  misc_feature (1)..(129): Homolog of NCBI NO: 32412708 NR Description: hypothetical protein [Neurospora crassa] related to U1 SMALL NUCLEAR RIBONUCLEOPROTEIN C [Neurospora >gi|28922972|gb|EAA32191.1| hypothetical protein [Neurospora
  misc_feature (1)..(131): Homolog of NCBI NO: 38111701 NR Description: hypothetical protein MG08209.4 [Magnaporthe
  misc_feature (1)..(85): Homolog of NCBI NO: 31242193 NR Description: ENSANGP00000018169 [Anopheles gambiae]
  misc_feature (1)..(69): Homolog of NCBI NO: 39580999 NR Description: Hypothetical protein CBG19656 [Caenorhabditis
  misc_feature (1)..(81): Homolog of NCBI NO: 34852241 NR Description: similar to U1 snRNP-specific protein C [Rattus
  misc_feature (1)..(80): Homolog of NCBI NO: 548881 NR Description: U1 small nuclear ribonucleoprotein C (U1-C)
  misc_feature (1)..(63): Homolog of NCBI NO: 17539712 NR Description: Small nuclear ribonucleoprotein polypeptide C

SEQ ID NO: 99919 - protein, 125 aa, Arabidopsis thaliana; identical to SEQ ID NO: 34754
  peptide (1)..(125): Ceres Seq. ID no. 13603927
  misc_feature (1)..(121): Pfam Name: Extensin-like region Pfam Description: Extensin-like region
  misc_feature (1)..(125): Homolog of NCBI NO: 18412147 NR Description: proline-rich protein family [Arabidopsis thaliana]
  misc_feature (1)..(125): Homolog of NCBI NO: 28466929 NR Description: At4g03120 [Arabidopsis thaliana]
  misc_feature (1)..(26): Homolog of NCBI NO: 25295939 NR Description: probable C-type U1 snRNP [imported] - Arabidopsis
  misc_feature (1)..(121): Homolog of NCBI NO: 32412708 NR Description: hypothetical protein [Neurospora crassa] related to U1 SMALL NUCLEAR RIBONUCLEOPROTEIN C [Neurospora >gi|28922972|gb|EAA32191.1| hypothetical protein [Neurospora
  misc_feature (1)..(123): Homolog of NCBI NO: 38111701 NR Description: hypothetical protein MG08209.4 [Magnaporthe
  misc_feature (1)..(77): Homolog of NCBI NO: 31242193 NR Description: ENSANGP00000018169 [Anopheles gambiae]
  misc_feature (1)..(61): Homolog of NCBI NO: 39580999 NR Description: Hypothetical protein CBG19656 [Caenorhabditis
  misc_feature (1)..(73): Homolog of NCBI NO: 34852241 NR Description: similar to U1 snRNP-specific protein C [Rattus
  misc_feature (1)..(72): Homolog of NCBI NO: 548881 NR Description: U1 small nuclear ribonucleoprotein C (U1-C)
  misc_feature (1)..(55): Homolog of NCBI NO: 17539712 NR Description: Small nuclear ribonucleoprotein polypeptide C

SEQ ID NO: 99920 - DNA, 2332 bp, Arabidopsis thaliana
  misc_feature (1)..(2332): Ceres Seq. ID no. 13603928
  misc_feature: MA Experiment ID: 108434 Result: Down-regulated in Transcription
  misc_feature: MA Experiment 108434 PARAMETER Experiment Name: At_Root_Tips_cDNA_P Parameter: Tissue Value: Root Tips
  misc_feature: MA Experiment ID: 108462 Result: Up-regulated in Transcription
  misc_feature: MA Experiment 108462 PARAMETER Experiment Name: At_Germinating_Seeds_cDNA_P Parameter: Age (day) Value: 2 vs. 0
  misc_feature: MA Experiment 108462 PARAMETER Experiment Name: At_Germinating_Seeds_cDNA_P Parameter: Tissue Value: Germinating Seeds
  misc_feature: MA Experiment ID: 108489 Result: Down-regulated in Transcription
  misc_feature: MA Experiment ID: 108585 Result: Up-regulated in Transcription
  misc_feature: MA Experiment 108585 PARAMETER Experiment Name: At_5mM_NaNP_cDNA_P Parameter: Timepoint (hr) Value: 6
  misc_feature: MA Experiment 108585 PARAMETER Experiment Name: At_5mM_NaNP_cDNA_P Parameter: Tissue Value: Aerial
  misc_feature: MA Experiment 108585 PARAMETER Experiment Name: At_5mM_NaNP_cDNA_P Parameter: Treatment Value: null
  misc_feature: MA Experiment ID: 108594 Result: Up-regulated in Transcription
  misc_feature: MA Experiment 108594 PARAMETER Experiment Name: At_Ler-rhl_Root_cDNA_P Parameter: Plant Line Value: null
  misc_feature: MA Experiment ID: 108607 Result: Down-regulated in Transcription
  misc_feature: MA Experiment 108607 PARAMETER Experiment Name: At_100uM_ABA_cDNA_P Parameter: Timepoint (hr) Value: 4
  misc_feature: MA Experiment 108607 PARAMETER Experiment Name: At_100uM_ABA_cDNA_P Parameter: Tissue Value: Aerial
  misc_feature: MA Experiment 108607 PARAMETER Experiment Name: At_100uM_ABA_cDNA_P Parameter: Treatment Value: 100uM ABA vs. No Treatment
  misc_feature: MA Experiment ID: 20000086 Result: Down-regulated in Transcription
  misc_feature: MA Experiment 20000086 PARAMETER Experiment Name: At_100uM_ABA_Mutants_cDNA_P Parameter: Plant Line Value: CS22
  misc_feature: MA Experiment 20000086 PARAMETER Experiment Name: At_100uM_ABA_Mutants_cDNA_P Parameter: Timepoint (hr) Value: 6
  misc_feature: MA Experiment 20000086 PARAMETER Experiment Name: At_100uM_ABA_Mutants_cDNA_P Parameter: Tissue Value: Aerial
  misc_feature: MA Experiment 20000086 PARAMETER Experiment Name: At_100uM_ABA_Mutants_cDNA_P Parameter: Treatment Value: 100uM ABA vs. No Treatment
  misc_feature: MA Experiment ID: 20000113 Result: Up-regulated in Transcription
  misc_feature: MA Experiment 20000113 PARAMETER Experiment Name: At_42deg_Heat_cDNA_P Parameter: Temperature (deg C) Value: 42 vs. 22
  misc_feature: MA Experiment 20000113 PARAMETER Experiment Name: At_42deg_Heat_cDNA_P Parameter: Timepoint (hr) Value: 8
  misc_feature: MA Experiment 20000113 PARAMETER Experiment Name: At_42deg_Heat_cDNA_P Parameter: Tissue Value: Aerial
  misc_feature: MA Experiment ID: 20000227 Result: Up-regulated in Transcription
  misc_feature: MA Experiment 20000227 PARAMETER Experiment Name: At_Root-Tips-vs-Tops_P Parameter: Tissue Value: Root Tips vs. Root Tops
  misc_feature: MA Experiment ID: 20000495 Result: Up-regulated in Transcription
  misc_feature: MA Experiment 20000495 PARAMETER Experiment Name: At_Guard_Cells_P Parameter: Harvest Date Value: 8/2/2002
  misc_feature: MA Experiment 20000495 PARAMETER Experiment Name: At_Guard_Cells_P Parameter: Organism Value: A. thaliana
  misc_feature: MA Experiment 20000495 PARAMETER Experiment Name: At_Guard_Cells_P Parameter: Tissue Value: Guard Cells vs. Leaves
  misc_feature: MA Experiment ID: 20001247 Result: Up-regulated in Transcription
  misc_feature: MA Experiment 20001247 PARAMETER Experiment Name: At_Far-red-induction_P Parameter: Age (day) Value: 7
  misc_feature: MA Experiment 20001247 PARAMETER Experiment Name: At_Far-red-induction_P Parameter: Light Value: Far-red vs. White
  misc_feature: MA Experiment 20001247 PARAMETER Experiment Name: At_Far-red-induction_P Parameter: Organism Value: A. thaliana
  misc_feature: MA Experiment 20001247 PARAMETER Experiment Name: At_Far-red-induction_P Parameter: Plant Line Value: Columbia
  misc_feature: MA Experiment 20001247 PARAMETER Experiment Name: At_Far-red-induction_P Parameter: Timepoint (hr) Value: 1
  misc_feature: MA Experiment 20001247 PARAMETER Experiment Name: At_Far-red-induction_P Parameter: Tissue Value: Whole Plant
  misc_feature: MA Experiment ID: 20001451 Result: Up-regulated in Transcription
  misc_feature: MA Experiment 20001451 PARAMETER Experiment Name: At_Far-red-induction_P Parameter: Age (day) Value: 7
  misc_feature: MA Experiment 20001451 PARAMETER Experiment Name: At_Far-red-induction_P Parameter: Light Value: Far-red vs. White
  misc_feature: MA Experiment 20001451 PARAMETER Experiment Name: At_Far-red-induction_P Parameter: Organism Value: A. thaliana
  misc_feature: MA Experiment 20001451 PARAMETER Experiment Name: At_Far-red-induction_P Parameter: Plant Line Value: Columbia
  misc_feature: MA Experiment 20001451 PARAMETER Experiment Name: At_Far-red-induction_P Parameter: Timepoint (hr) Value: 24
  misc_feature: MA Experiment 20001451 PARAMETER Experiment Name: At_Far-red-induction_P Parameter: Tissue Value: Whole Plant
  misc_feature: MA Experiment ID: 20001555 Result: Down-regulated in Transcription
  misc_feature: MA Experiment 20001555 PARAMETER Experiment Name: At_Drought_Soil_Dry_P Parameter: Age (day) Value: 24
  misc_feature: MA Experiment 20001555 PARAMETER Experiment Name: At_Drought_Soil_Dry_P Parameter: Organism Value: A. thaliana
  misc_feature: MA Experiment 20001555 PARAMETER Experiment Name: At_Drought_Soil_Dry_P Parameter: Plant Line Value: WS
  misc_feature: MA Experiment 20001555 PARAMETER Experiment Name: At_Drought_Soil_Dry_P Parameter: Post Timepoint (hr) Value: None
  misc_feature: MA Experiment 20001555 PARAMETER Experiment Name: At_Drought_Soil_Dry_P Parameter: Post-Treatment Value: None
  misc_feature: MA Experiment 20001555 PARAMETER Experiment Name: At_Drought_Soil_Dry_P Parameter: Timepoint (day) Value: 10
  misc_feature: MA Experiment 20001555 PARAMETER Experiment Name: At_Drought_Soil_Dry_P Parameter: Treatment Value: Drought vs. No Drought
  misc_feature: MA Experiment ID: 20001556 Result: Down-regulated in Transcription
  misc_feature: MA Experiment 20001556 PARAMETER Experiment Name: At_Drought_Soil_Dry_P Parameter: Age (day) Value: 26
  misc_feature: MA Experiment 20001556 PARAMETER Experiment Name: At_Drought_Soil_Dry_P Parameter: Organism Value: A. thaliana
  misc_feature: MA Experiment 20001556 PARAMETER Experiment Name: At_Drought_Soil_Dry_P Parameter: Plant Line Value: WS
  misc_feature: MA Experiment 20001556 PARAMETER Experiment Name: At_Drought_Soil_Dry_P Parameter: Post Timepoint (hr) Value: None
  misc_feature: MA Experiment 20001556 PARAMETER Experiment Name: At_Drought_Soil_Dry_P Parameter: Post-Treatment Value: None
  misc_feature: MA Experiment 20001556 PARAMETER Experiment Name: At_Drought_Soil_Dry_P Parameter: Timepoint (day) Value: 12
  misc_feature: MA Experiment 20001556 PARAMETER Experiment Name: At_Drought_Soil_Dry_P Parameter: Treatment Value: Drought vs. No Drought
  misc_feature: MA Experiment ID: 20001559 Result: Down-regulated in Transcription
  misc_feature: MA Experiment 20001559 PARAMETER Experiment Name: At_Drought_Soil_Dry_P Parameter: Age (day) Value: 28
  misc_feature: MA Experiment 20001559 PARAMETER Experiment Name: At_Drought_Soil_Dry_P Parameter: Organism Value: A. thaliana
  misc_feature: MA Experiment 20001559 PARAMETER Experiment Name: At_Drought_Soil_Dry_P Parameter: Plant Line Value: WS
  misc_feature: MA Experiment 20001559 PARAMETER Experiment Name: At_Drought_Soil_Dry_P Parameter: Post Timepoint (hr) Value: 29
  misc_feature: MA Experiment 20001559 PARAMETER Experiment Name: At_Drought_Soil_Dry_P Parameter: Post-Treatment Value: Re-Water vs. No Drought
  misc_feature: MA Experiment 20001559 PARAMETER Experiment Name: At_Drought_Soil_Dry_P Parameter: Timepoint (day) Value: 14
  misc_feature: MA Experiment 20001559 PARAMETER Experiment Name: At_Drought_Soil_Dry_P Parameter: Treatment Value: Drought vs. No Drought
  misc_feature: MA Experiment ID: 20001905 Result: Down-regulated in Transcription
  misc_feature: MA Experiment 20001905 PARAMETER Experiment Name: At_Drought_Reproduction_P Parameter: Age (day) Value: 40
  misc_feature: MA Experiment 20001905 PARAMETER Experiment Name: At_Drought_Reproduction_P Parameter: Organism Value: A. thaliana
  misc_feature: MA Experiment 20001905 PARAMETER Experiment Name: At_Drought_Reproduction_P Parameter: Plant Line Value: WS
  misc_feature: MA Experiment 20001905 PARAMETER Experiment Name: At_Drought_Reproduction_P Parameter: Timepoint (day) Value: 10
  misc_feature: MA Experiment 20001905 PARAMETER Experiment Name: At_Drought_Reproduction_P Parameter: Tissue Value: Rosettes
  misc_feature: MA Experiment 20001905 PARAMETER Experiment Name: At_Drought_Reproduction_P Parameter: Treatment Value: Drought vs. No Drought
  misc_feature: MA Experiment ID: 20001911 Result: Down-regulated in Transcription
  misc_feature: MA Experiment 20001911 PARAMETER Experiment Name: At_Drought_Reproduction_P Parameter: Age (day) Value: 40
  misc_feature: MA Experiment 20001911 PARAMETER Experiment Name: At_Drought_Reproduction_P Parameter: Organism Value: A. thaliana
  misc_feature: MA Experiment 20001911 PARAMETER Experiment Name: At_Drought_Reproduction_P Parameter: Plant Line Value: WS
  misc_feature: MA Experiment 20001911 PARAMETER Experiment Name: At_Drought_Reproduction_P Parameter: Timepoint (day) Value: 10
  misc_feature: MA Experiment 20001911 PARAMETER Experiment Name: At_Drought_Reproduction_P Parameter: Tissue Value: Flowers
  misc_feature: MA Experiment 20001911 PARAMETER Experiment Name: At_Drought_Reproduction_P Parameter: Treatment Value: Drought vs. No Drought
acataaagattcctagtcttatactctgtctctctctctctctctctttttcacactcacacacaaactaaaccggaatggccaccgccgacgaattctccgacgaagatacatcaccgattgaagaagtccgtttaacggtaacaaacaccgacgatccaacactaccggtttggacattcaggatgtggttcttgggtctaatctcatgttctctcctctctttccttaaccaattcttctcgtaccgaaccgaaccgctcgtaatcactcaaatcacggttcaggtggctacactacctatcggtcatttcttggccaaggtgcttcccaaaacccggtttgggttacccggttgtggatcggcccggttctcgctgaacccgggtccgtttaacatgaaagagcatgttttgatatcgatatttgcgaatgcgggtagtgctttcggatccgggtcggcttatgcggttggtatcatcacaattattaaagctttttatggccggagtatctcttttattgccggctggctcctcatcatcactacacaggtattgggatatggctgggccggtttactgaggaaatatgtggtcgaaccggctcatatgtggtggcctagcactctggttcaagtgtcactgtttagggcattgcatgagaaggacgaccaaaggatgacgagagcaaaattctttgtgatagcattagtctgtagttttggatggtacatagtccctggctatctcttcacaacactcacaagcatctcatgggtttgttgggcatttccaagatcagtcactgctcaacagattggttctggaatgagaggtcttggtcttggagcctttacactagactggaccgcggttgcctctttcttgtttagtccacttatcagccccttcttcgccatcgctaatgttttcatcggttatgttcttttgatctacttcgtcttgcctttagcctattggggatttgattcttataacgctacgaggtttcctatattttcgtcgcatcttttcacatcggttggtaatacatatgatattcctgcgatcgtgaatgataactttgagctcgatttagctaagtatgagcaacaaggaaggattaacttgagcatgttctttgctcttacctatgggcttggtttcgccaccattgcttctacgctcactcatgtagctctcttctatggcaaggaaatttctgagaggtttcgagtttcatacaaaggcaaggaagatatacacactaggttaatgaagagatataaagacataccttcatggtggttttactcaatgttggctgcgacactacttatctctcttgcattatgtgttttcttgaacgatgaggttcaaatgccttggtggggacttgtgttcgcaagcgcgatggctttcgtcttcacactcccgataagcatcataaccgcaacaactaaccaaacaccgggattgaatataataacagagtacgcaatgggactcatttacccgggacgacctatcgcaaacgtatgcttcaaagtctatggatacatgagtatggcacaagcagtctctttcttaaatgacttcaaacttggtcattacatgaagatcccacctagatccatgttcttggttcaattcatcggtacaattcttgccggaacaatcaacataacggtcgcatggtggcagttaaactctatcaaaaacatatgtcaagaggaacttctacctcccaacagtccatggacatgtccgggtgaccgtgttttcttcgatgcatcggtcatttggggattggtcggaccaaaacggatttttggttctcagggaaactatgcggccatgaactggtttttcctcggaggtgcattaggaccagtcatagtgtggtcattgcacaaagcgttcccaaaacgttcttggattccacttgtaaatctccctgttcttctaggagcaaccgcaatgatgccacctgcgaccgcggtgaactacaactcgtggatattggtggggacgatattcaacttgtttgtgttccggtacaggaaaagttggtggcagaggtataactacgttctctcagccgctatggatgccggtgtagctttcatggcggttttgttgtacttctcggtggggatggaggaaaagagtttggactggtggggaacaagaggtgaacattgtgatctagctaaatgtccaaccgctagaggagtaattgttgatggttgtccggttaaataatcttaaaggatccattggtgtgtttcaacaatgtatgatacacaaagtaactaattaagaatttc

SEQ ID NO: 99921 - protein, 729 aa, Arabidopsis thaliana; identical to SEQ ID NO: 26588
  peptide (1)..(729): Ceres Seq. ID no. 13603929
  misc_feature (9)..(728): Homolog of NCBI NO: 34912940 NR Description: putative sexual differentiation process protein
  misc_feature (4)..(728): Homolog of NCBI NO: 15218331 NR Description: hypothetical protein [Arabidopsis thaliana]
  misc_feature (197)..(724): Homolog of NCBI NO: 25345764 NR Description: hypothetical protein [imported] - Arabidopsis >gi|2160185|gb|AAB60748.1| Similar to S. pombe ISP4 (gb|D83992).
  misc_feature (4)..(159): Homolog of NCBI NO: 25345764 NR Description: hypothetical protein [imported] - Arabidopsis >gi|2160185|gb|AAB60748.1| Similar to S. pombe ISP4 (gb|D83992).
  misc_feature (5)..(728): Homolog of NCBI NO: 15236912 NR Description: oligopeptide transporter -related [Arabidopsis
  misc_feature (8)..(728): Homolog of NCBI NO: 25553564 NR Description: putative isp4 protein [Oryza sativa (japonica
  misc_feature (1)..(728): Homolog of NCBI NO: 15236800 NR Description: isp4 like protein [Arabidopsis thaliana]
  misc_feature (5)..(704): Homolog of NCBI NO: 32420327 NR Description: hypothetical protein [Neurospora crassa]
  misc_feature (1)..(704): Homolog of NCBI NO: 2367386 NR Description: Opt1p [Candida albicans]
  misc_feature (10)..(704): Homolog of NCBI NO: 19115899 NR Description: putative pheromone response and mating-type protein [Schizosaccharomyces pombe] >gi|7491035|pir||T38497

SEQ ID NO: 99922 - protein, 693 aa, Arabidopsis thaliana; identical to SEQ ID NO: 26589
  peptide (1)..(693): Ceres Seq. ID no. 13603930
  misc_feature (1)..(692): Homolog of NCBI NO: 34912940 NR Description: putative sexual differentiation process protein
  misc_feature (1)..(692): Homolog of NCBI NO: 15218331 NR Description: hypothetical protein [Arabidopsis thaliana]
  misc_feature (161)..(688): Homolog of NCBI NO: 25345764 NR Description: hypothetical protein [imported] - Arabidopsis >gi|2160185|gb|AAB60748.1| Similar to S. pombe ISP4 (gb|D83992).
  misc_feature (1)..(123): Homolog of NCBI NO: 25345764 NR Description: hypothetical protein [imported] - Arabidopsis >gi|2160185|gb|AAB60748.1| Similar to S. pombe ISP4 (gb|D83992).
  misc_feature (1)..(692): Homolog of NCBI NO: 15236912 NR Description: oligopeptide transporter -related [Arabidopsis
  misc_feature (1)..(692): Homolog of NCBI NO: 25553564 NR Description: putative isp4 protein [Oryza sativa (japonica
  misc_feature (1)..(692): Homolog of NCBI NO: 15236800 NR Description: isp4 like protein [Arabidopsis thaliana]
  misc_feature (1)..(668): Homolog of NCBI NO: 32420327 NR Description: hypothetical protein [Neurospora crassa]
  misc_feature (1)..(668): Homolog of NCBI NO: 2367386 NR Description: Opt1p [Candida albicans]
  misc_feature (1)..(668): Homolog of NCBI NO: 19115899 NR Description: putative pheromone response and mating-type protein [Schizosaccharomyces pombe] >gi|7491035|pir||T38497

SEQ ID NO: 99923 - protein, 622 aa, Arabidopsis thaliana; identical to SEQ ID NO: 26590
  peptide (1)..(622): Ceres Seq. ID no. 13603931
  misc_feature (1)..(621): Homolog of NCBI NO: 34912940 NR Description: putative sexual differentiation process protein
  misc_feature (1)..(621): Homolog of NCBI NO: 15218331 NR Description: hypothetical protein [Arabidopsis thaliana]
  misc_feature (90)..(617): Homolog of NCBI NO: 25345764 NR Description: hypothetical protein [imported] - Arabidopsis >gi|2160185|gb|AAB60748.1| Similar to S. pombe ISP4 (gb|D83992).
  misc_feature (1)..(52): Homolog of NCBI NO: 25345764 NR Description: hypothetical protein [imported] - Arabidopsis >gi|2160185|gb|AAB60748.1| Similar to S. pombe ISP4 (gb|D83992).
  misc_feature (1)..(621): Homolog of NCBI NO: 15236912 NR Description: oligopeptide transporter -related [Arabidopsis
  misc_feature (1)..(621): Homolog of NCBI NO: 25553564 NR Description: putative isp4 protein [Oryza sativa (japonica
  misc_feature (1)..(621): Homolog of NCBI NO: 15236800 NR Description: isp4 like protein [Arabidopsis thaliana]
  misc_feature (1)..(597): Homolog of NCBI NO: 32420327 NR Description: hypothetical protein [Neurospora crassa]
  misc_feature (1)..(597): Homolog of NCBI NO: 2367386 NR Description: Opt1p [Candida albicans]
  misc_feature (1)..(597): Homolog of NCBI NO: 19115899 NR Description: putative pheromone response and mating-type protein [Schizosaccharomyces pombe] >gi|7491035|pir||T38497

SEQ ID NO: 99924 - DNA, 1215 bp, Arabidopsis thaliana
  misc_feature (1)..(1215): Ceres Seq. ID no. 13603936
  misc_feature: MA Experiment ID: 108434 Result: Down-regulated in Transcription
  misc_feature: MA Experiment 108434 PARAMETER Experiment Name: At_Root_Tips_cDNA_P Parameter: Tissue Value: Root Tips
  misc_feature: MA Experiment ID: 108573 Result: Up-regulated in Transcription
  misc_feature: MA Experiment 108573 PARAMETER Experiment Name: At_Drought_cDNA_P Parameter: Timepoint (hr) Value: 6
  misc_feature: MA Experiment 108573 PARAMETER Experiment Name: At_Drought_cDNA_P Parameter: Tissue Value: Aerial
  misc_feature: MA Experiment 108573 PARAMETER Experiment Name: At_Drought_cDNA_P Parameter: Treatment Value: Drought vs. No Drought
  misc_feature: MA Experiment ID: 108585 Result: Up-regulated in Transcription
  misc_feature: MA Experiment 108585 PARAMETER Experiment Name: At_5mM_NaNP_cDNA_P Parameter: Timepoint (hr) Value: 6
  misc_feature: MA Experiment 108585 PARAMETER Experiment Name: At_5mM_NaNP_cDNA_P Parameter: Tissue Value: Aerial
  misc_feature: MA Experiment 108585 PARAMETER Experiment Name: At_5mM_NaNP_cDNA_P Parameter: Treatment Value: null
  misc_feature: MA Experiment ID: 108668 Result: Up-regulated in Transcription
  misc_feature: MA Experiment 108668 PARAMETER Experiment Name: At_2mM_SA_cDNA_P Parameter: Plant Line Value: WS
  misc_feature: MA Experiment 108668 PARAMETER Experiment Name: At_2mM_SA_cDNA_P Parameter: Timepoint (hr) Value: 6
  misc_feature: MA Experiment 108668 PARAMETER Experiment Name: At_2mM_SA_cDNA_P Parameter: Treatment Value: 2mM SA vs. No Treatment
  misc_feature: MA Experiment ID: 20000112 Result: Up-regulated in Transcription
  misc_feature: MA Experiment 20000112 PARAMETER Experiment Name: At_42deg_Heat_cDNA_P Parameter: Temperature (deg C) Value: 42 vs. 22
  misc_feature: MA Experiment 20000112 PARAMETER Experiment Name: At_42deg_Heat_cDNA_P Parameter: Timepoint (hr) Value: 2
  misc_feature: MA Experiment 20000112 PARAMETER Experiment Name: At_42deg_Heat_cDNA_P Parameter: Tissue Value: Aerial
  misc_feature: MA Experiment ID: 20000182 Result: Up-regulated in Transcription
  misc_feature: MA Experiment 20000182 PARAMETER Experiment Name: At_2mM_SA_P Parameter: Age (day) Value: 14
  misc_feature: MA Experiment 20000182 PARAMETER Experiment Name: At_2mM_SA_P Parameter: Organism Value: A. thaliana
  misc_feature: MA Experiment 20000182 PARAMETER Experiment Name: At_2mM_SA_P Parameter: Plant Line Value: WS
  misc_feature: MA Experiment 20000182 PARAMETER Experiment Name: At_2mM_SA_P Parameter: Timepoint (hr) Value: 6
  misc_feature: MA Experiment 20000182 PARAMETER Experiment Name: At_2mM_SA_P Parameter: Tissue Value: Aerial
  misc_feature: MA Experiment 20000182 PARAMETER Experiment Name: At_2mM_SA_P Parameter: Treatment Value: 2mM SA vs. No Treatment
  misc_feature: MA Experiment ID: 20000224 Result: Down-regulated in Transcription
  misc_feature: MA Experiment ID: 20001911 Result: Up-regulated in Transcription
  misc_feature: MA Experiment 20001911 PARAMETER Experiment Name: At_Drought_Reproduction_P Parameter: Age (day) Value: 40
  misc_feature: MA Experiment 20001911 PARAMETER Experiment Name: At_Drought_Reproduction_P Parameter: Organism Value: A. thaliana
  misc_feature: MA Experiment 20001911 PARAMETER Experiment Name: At_Drought_Reproduction_P Parameter: Plant Line Value: WS
  misc_feature: MA Experiment 20001911 PARAMETER Experiment Name: At_Drought_Reproduction_P Parameter: Timepoint (day) Value: 10
  misc_feature: MA Experiment 20001911 PARAMETER Experiment Name: At_Drought_Reproduction_P Parameter: Tissue Value: Flowers
  misc_feature: MA Experiment 20001911 PARAMETER Experiment Name: At_Drought_Reproduction_P Parameter: Treatment Value: Drought vs. No Drought
gtataaaaaagttgtttctttcttctctgtttttttgctttcgtcttcaagagagagagagagagagatacaaagagagaaatttggttgtttgttgacggaagcttcttcggtctctcttctccgtcttacgattgtcaacgcgtggttccatcttcaattttgtttctattttagcagaagtttctcgagcttcaaatactgtttcagatcaatcaatcagtcaatcatggctagctctggaaacaagaacatcaacgccaaattggtattactaggagatgttggagctggaaaatcaagtcttgtgctacggtttgtgaaagatcagtttgttgaatttcaggaatcaaccattggtgcagcttttttctctcaaacattggctgtgaatgatgcgactgtgaagtttgagatatgggatacagctggtcaggaacgataccacagtttggctccaatgtactacaggggtgcagctgctgctattattgtctttgacattactaatcaagcctcatttgagagggcgaagaaatgggttcaggaactgcaggcacaaggtaaccctaatatggtgatggctcttgctggaaacaaagctgatttattagacgcaaggaaggtgtctgcagaggaggcagagatatatgctcaagagaacagccttttctttatggaaacctcagcgaagaccgcaacaaatgtcaaagacatattctacgaaatagcgaaaaggctaccacgtgtacagccagctgaaaacccgacaggaatggttctcccaaacgggccaggggctacggcagtgagttcatcgtgttgtgcttagattcgtacctgaagagagatctcatttggttagtcacatagtagagaacatctggactttcatgtgtttgcttcttcttcgtctttgttactttactttgcttgcattgacaacaacaacagtgtatatcatgatgatacttattctgcctttgtgaaatctgaagatatttgtatttggagagatttatatatatatatctcttttgtaattagaaaacaaaacttagtccgaaaaaaatgtgcttatctttcgtttatgttttaagtgaatgctcagatttataggcttattatcttttgtattacttaaatctccaaaatgttttttccattgttggaatgctgtaatatgaatgtatatatcaataaaagaaacacctt

SEQ ID NO: 99925 - protein, 276 aa, Arabidopsis thaliana
  peptide (1)..(276): Ceres Seq. ID no. 13603937
  misc_feature (88)..(249): Pfam Name: Ras family Pfam Description: Ras family
  misc_feature (77)..(276): Homolog of NCBI NO: 15242309 NR Description: ras-related GTP-binding protein RHA1 [Arabidopsis
  misc_feature (77)..(276): Homolog of NCBI NO: 15235113 NR Description: GTP-binding protein, putative [Arabidopsis
  misc_feature (77)..(276): Homolog of NCBI NO: 421941 NR Description: GTP-binding protein, ras-related - common tobacco
  misc_feature (77)..(276): Homolog of NCBI NO: 1370178 NR Description: RAB5A [Lotus japonicus]
  misc_feature (77)..(276): Homolog of NCBI NO: 12311684 NR Description: GTP binding protein [Cichorium intybus x
  misc_feature (77)..(276): Homolog of NCBI NO: 12311682 NR Description: GTP binding protein [Cichorium intybus x
  misc_feature (77)..(276): Homolog of NCBI NO: 1076545 NR Description: guanine nucleotide regulatory protein - fava bean
  misc_feature (77)..(276): Homolog of NCBI NO: 6010033 NR Description: GTP binding protein [Cichorium intybus x
  misc_feature (77)..(276): Homolog of NCBI NO: 6010031 NR Description: GTP binding protein [Cichorium intybus x
  misc_feature (77)..(275): Homolog of NCBI NO: 266879 NR Description: RAS-RELATED PROTEIN RAB5 >gi|100333|pir||S23524
YKKVVSFFSVFLLSSSREREREIQREKFGCLLTEASSVSLLRLTIVNAWFHLQFCFYFSRSFSSFKYCFRSINQSIMASSGNKNINAKLVLLGDVGAGKSSLVLRFVKDQFVEFQESTIGAAFFSQTLAVNDATVKFEIWDTAGQERYHSLAPMYYRGAAAAIIVFDITNQASFERAKKWVQELQAQGNPNMVMALAGNKADLLDARKVSAEEAEIYAQENSLFFMETSAKTATNVKDIFYEIAKRLPRVQPAENPTGMVLPNGPGATAVSSSCCA

SEQ ID NO: 99926 - protein, 200 aa, Arabidopsis thaliana; identical to SEQ ID NO: 24213
  peptide (1)..(200): Ceres Seq. ID no. 13603938
  misc_feature (12)..(173): Pfam Name: Ras family Pfam Description: Ras family
  misc_feature (1)..(200): Homolog of NCBI NO: 15242309 NR Description: ras-related GTP-binding protein RHA1 [Arabidopsis
  misc_feature (1)..(200): Homolog of NCBI NO: 15235113 NR Description: GTP-binding protein, putative [Arabidopsis
  misc_feature (1)..(200): Homolog of NCBI NO: 421941 NR Description: GTP-binding protein, ras-related - common tobacco
  misc_feature (1)..(200): Homolog of NCBI NO: 1370178 NR Description: RAB5A [Lotus japonicus]
  misc_feature (1)..(200): Homolog of NCBI NO: 12311684 NR Description: GTP binding protein [Cichorium intybus x
  misc_feature (1)..(200): Homolog of NCBI NO: 12311682 NR Description: GTP binding protein [Cichorium intybus x
  misc_feature (1)..(200): Homolog of NCBI NO: 1076545 NR Description: guanine nucleotide regulatory protein - fava bean
  misc_feature (1)..(200): Homolog of NCBI NO: 6010033 NR Description: GTP binding protein [Cichorium intybus x
  misc_feature (1)..(200): Homolog of NCBI NO: 6010031 NR Description: GTP binding protein [Cichorium intybus x
  misc_feature (1)..(199): Homolog of NCBI NO: 266879 NR Description: RAS-RELATED PROTEIN RAB5 >gi|100333|pir||S23524

SEQ ID NO: 99927 - DNA, 1408 bp, Arabidopsis thaliana
  misc_feature (1)..(1408): Ceres Seq. ID no. 13603939
  misc_feature: MA Experiment ID: 108435 Result: Up-regulated in Transcription
  misc_feature: MA Experiment 108435 PARAMETER Experiment Name: At_stm_Mutants_cDNA_P Parameter: Plant Line Value: wt Landsburg vs stm
  misc_feature: MA Experiment 108435 PARAMETER Experiment Name: At_stm_Mutants_cDNA_P Parameter: Tissue Value: Shoot Apical Meristem Region
  misc_feature: MA Experiment ID: 108461 Result: Up-regulated in Transcription
  misc_feature: MA Experiment 108461 PARAMETER Experiment Name: At_Germinating_Seeds_cDNA_P Parameter: Age (day) Value: 1 vs. 0
  misc_feature: MA Experiment 108461 PARAMETER Experiment Name: At_Germinating_Seeds_cDNA_P Parameter: Tissue Value: Germinating Seeds
  misc_feature: MA Experiment ID: 108462 Result: Up-regulated in Transcription
  misc_feature: MA Experiment 108462 PARAMETER Experiment Name: At_Germinating_Seeds_cDNA_P Parameter: Age (day) Value: 2 vs. 0
  misc_feature: MA Experiment 108462 PARAMETER Experiment Name: At_Germinating_Seeds_cDNA_P Parameter: Tissue Value: Germinating Seeds
  misc_feature: MA Experiment ID: 108464 Result: Up-regulated in Transcription
  misc_feature: MA Experiment 108464 PARAMETER Experiment Name: At_Germinating_Seeds_cDNA_P Parameter: Age (day) Value: 4 vs. 0
  misc_feature: MA Experiment 108464 PARAMETER Experiment Name: At_Germinating_Seeds_cDNA_P Parameter: Tissue Value: Germinating Seeds
  misc_feature: MA Experiment ID: 108573 Result: Up-regulated in Transcription
  misc_feature: MA Experiment 108573 PARAMETER Experiment Name: At_Drought_cDNA_P Parameter: Timepoint (hr) Value: 6
  misc_feature: MA Experiment 108573 PARAMETER Experiment Name: At_Drought_cDNA_P Parameter: Tissue Value: Aerial
  misc_feature: MA Experiment 108573 PARAMETER Experiment Name: At_Drought_cDNA_P Parameter: Treatment Value: Drought vs. No Drought
  misc_feature: MA Experiment ID: 108577 Result: Down-regulated in Transcription
  misc_feature: MA Experiment 108577 PARAMETER Experiment Name: At_42deg_Heat_cDNA_P Parameter: Temperature (deg C) Value: 42 vs. 22
  misc_feature: MA Experiment 108577 PARAMETER Experiment Name: At_42deg_Heat_cDNA_P Parameter: Timepoint (hr) Value: 6
  misc_feature: MA Experiment 108577 PARAMETER Experiment Name: At_42deg_Heat_cDNA_P Parameter: Tissue Value: Aerial
  misc_feature: MA Experiment ID: 108579 Result: Up-regulated in Transcription
  misc_feature: MA Experiment 108579 PARAMETER Experiment Name: At_4deg_Cold_cDNA_P Parameter: Temperature (deg C) Value: 4 vs. 22
  misc_feature: MA Experiment 108579 PARAMETER Experiment Name: At_4deg_Cold_cDNA_P Parameter: Timepoint (hr) Value: 6
  misc_feature: MA Experiment 108579 PARAMETER Experiment Name: At_4deg_Cold_cDNA_P Parameter: Tissue Value: Aerial
  misc_feature: MA Experiment ID: 108585 Result: Up-regulated in Transcription
  misc_feature: MA Experiment 108585 PARAMETER Experiment Name: At_5mM_NaNP_cDNA_P Parameter: Timepoint (hr) Value: 6
  misc_feature: MA Experiment 108585 PARAMETER Experiment Name: At_5mM_NaNP_cDNA_P Parameter: Tissue Value: Aerial
  misc_feature: MA Experiment 108585 PARAMETER Experiment Name: At_5mM_NaNP_cDNA_P Parameter: Treatment Value: null
  misc_feature: MA Experiment ID: 108595 Result: Down-regulated in Transcription
  misc_feature: MA Experiment 108595 PARAMETER Experiment Name: At_Ler-pi_Ovule_cDNA_P Parameter: Plant Line Value: null
  misc_feature: MA Experiment ID: 108605 Result: Up-regulated in Transcription
  misc_feature: MA Experiment 108605 PARAMETER Experiment Name: At_100uM_ABA_cDNA_P Parameter: Timepoint (hr) Value: 6
  misc_feature: MA Experiment 108605 PARAMETER Experiment Name: At_100uM_ABA_cDNA_P Parameter: Tissue Value: Aerial
  misc_feature: MA Experiment 108605 PARAMETER Experiment Name: At_100uM_ABA_cDNA_P Parameter: Treatment Value: 100uM ABA vs. No Treatment
  misc_feature: MA Experiment ID: 108607 Result: Up-regulated in Transcription
  misc_feature: MA Experiment 108607 PARAMETER Experiment Name: At_100uM_ABA_cDNA_P Parameter: Timepoint (hr) Value: 4
  misc_feature: MA Experiment 108607 PARAMETER Experiment Name: At_100uM_ABA_cDNA_P Parameter: Tissue Value: Aerial
  misc_feature: MA Experiment 108607 PARAMETER Experiment Name: At_100uM_ABA_cDNA_P Parameter: Treatment Value: 100uM ABA vs. No Treatment
  misc_feature: MA Experiment ID: 20000030 Result: Down-regulated in Transcription
  misc_feature: MA Experiment 20000030 PARAMETER Experiment Name: At_CS6630_Roots_cDNA_P Parameter: Plant Line Value: CS6630 vs. WS
  misc_feature: MA Experiment 20000030 PARAMETER Experiment Name: At_CS6630_Roots_cDNA_P Parameter: Tissue Value: Roots
  misc_feature: MA Experiment ID: 20000068 Result: Up-regulated in Transcription
  misc_feature: MA Experiment ID: 20000111 Result: Down-regulated in Transcription
  misc_feature: MA Experiment 20000111 PARAMETER Experiment Name: At_42deg_Heat_cDNA_P Parameter: Temperature (deg C) Value: 42 vs. 22
  misc_feature: MA Experiment 20000111 PARAMETER Experiment Name: At_42deg_Heat_cDNA_P Parameter: Timepoint (hr) Value: 6
  misc_feature: MA Experiment 20000111 PARAMETER Experiment Name: At_42deg_Heat_cDNA_P Parameter: Tissue Value: Aerial
  misc_feature: MA Experiment ID: 20000112 Result: Down-regulated in Transcription
  misc_feature: MA Experiment 20000112 PARAMETER Experiment Name: At_42deg_Heat_cDNA_P Parameter: Temperature (deg C) Value: 42 vs. 22
  misc_feature: MA Experiment 20000112 PARAMETER Experiment Name: At_42deg_Heat_cDNA_P Parameter: Timepoint (hr) Value: 2
  misc_feature: MA Experiment 20000112 PARAMETER Experiment Name: At_42deg_Heat_cDNA_P Parameter: Tissue Value: Aerial
  misc_feature: MA Experiment ID: 20000113 Result: Down-regulated in Transcription
  misc_feature: MA Experiment 20000113 PARAMETER Experiment Name: At_42deg_Heat_cDNA_P Parameter: Temperature (deg C) Value: 42 vs. 22
  misc_feature: MA Experiment 20000113 PARAMETER Experiment Name: At_42deg_Heat_cDNA_P Parameter: Timepoint (hr) Value: 8
  misc_feature: MA Experiment 20000113 PARAMETER Experiment Name: At_42deg_Heat_cDNA_P Parameter: Tissue Value: Aerial
  misc_feature: MA Experiment ID: 20000144 Result: Down-regulated in Transcription
  misc_feature: MA Experiment 20000144 PARAMETER Experiment Name: At_42deg_Heat_cDNA_P Parameter: Temperature (deg C) Value: 42 vs. 22
  misc_feature: MA Experiment 20000144 PARAMETER Experiment Name: At_42deg_Heat_cDNA_P Parameter: Timepoint (hr) Value: 1
  misc_feature: MA Experiment 20000144 PARAMETER Experiment Name: At_42deg_Heat_cDNA_P Parameter: Tissue Value: Aerial
  misc_feature: MA Experiment ID: 20000169 Result: Up-regulated in Transcription
  misc_feature: MA Experiment 20000169 PARAMETER Experiment Name: At_100uM_ABA_P Parameter: Age (day) Value: 14
  misc_feature: MA Experiment 20000169 PARAMETER Experiment Name: At_100uM_ABA_P Parameter: Organism Value: A. thaliana
  misc_feature: MA Experiment 20000169 PARAMETER Experiment Name: At_100uM_ABA_P Parameter: Plant Line Value: WS
  misc_feature: MA Experiment 20000169 PARAMETER Experiment Name: At_100uM_ABA_P Parameter: Timepoint (hr) Value: 6
  misc_feature: MA Experiment 20000169 PARAMETER Experiment Name: At_100uM_ABA_P Parameter: Tissue Value: Aerial
  misc_feature: MA Experiment 20000169 PARAMETER Experiment Name: At_100uM_ABA_P Parameter: Treatment Value: 100uM ABA vs. No Treatment
  misc_feature: MA Experiment ID: 20000171 Result: Down-regulated in Transcription
  misc_feature: MA Experiment 20000171 PARAMETER Experiment Name: At_42deg_Heat_P Parameter: Age (day) Value: 14
  misc_feature: MA Experiment 20000171 PARAMETER Experiment Name: At_42deg_Heat_P Parameter: Organism Value: A. thaliana
  misc_feature: MA Experiment 20000171 PARAMETER Experiment Name: At_42deg_Heat_P Parameter: Plant Line Value: WS
  misc_feature: MA Experiment 20000171 PARAMETER Experiment Name: At_42deg_Heat_P Parameter: Temperature (deg C) Value: 42 vs. 22
  misc_feature: MA Experiment 20000171 PARAMETER Experiment Name: At_42deg_Heat_P Parameter: Timepoint (hr) Value: 1
  misc_feature: MA Experiment 20000171 PARAMETER Experiment Name: At_42deg_Heat_P Parameter: Tissue Value: Aerial
  misc_feature: MA Experiment ID: 20000173 Result: Down-regulated in Transcription
  misc_feature: MA Experiment 20000173 PARAMETER Experiment Name: At_42deg_Heat_P Parameter: Age (day) Value: 14
  misc_feature: MA Experiment 20000173 PARAMETER Experiment Name: At_42deg_Heat_P Parameter: Organism Value: A. thaliana
  misc_feature: MA Experiment 20000173 PARAMETER Experiment Name: At_42deg_Heat_P Parameter: Plant Line Value: WS
  misc_feature: MA Experiment 20000173 PARAMETER Experiment Name: At_42deg_Heat_P Parameter: Temperature (deg C) Value: 42 vs. 22
  misc_feature: MA Experiment 20000173 PARAMETER Experiment Name: At_42deg_Heat_P Parameter: Timepoint (hr) Value: 6
  misc_feature: MA Experiment 20000173 PARAMETER Experiment Name: At_42deg_Heat_P Parameter: Tissue Value: Aerial
  misc_feature: MA Experiment ID: 20000213 Result: Up-regulated in Transcription
  misc_feature: MA Experiment 20000213 PARAMETER Experiment Name: At_4deg_Cold_P Parameter: Timepoint (hr) Value: 2
  misc_feature: MA Experiment ID: 20000224 Result: Down-regulated in Transcription
  misc_feature: MA Experiment ID: 20000227 Result: Up-regulated in Transcription
  misc_feature: MA Experiment 20000227 PARAMETER Experiment Name: At_Root-Tips-vs-Tops_P Parameter: Tissue Value: Root Tips vs. Root Tops
  misc_feature: MA Experiment ID: 20000234 Result: Down-regulated in Transcription
  misc_feature: MA Experiment 20000234 PARAMETER Experiment Name: At_Siliques_P Parameter: Age (day) Value: 21
  misc_feature: MA Experiment 20000234 PARAMETER Experiment Name: At_Siliques_P Parameter: Organism Value: A. thaliana
  misc_feature: MA Experiment 20000234 PARAMETER Experiment Name: At_Siliques_P Parameter: Plant Line Value: WS
  misc_feature: MA Experiment 20000234 PARAMETER Experiment Name: At_Siliques_P Parameter: Tissue Value: Less Than 5mm Siliques vs. Whole Plant
  misc_feature: MA Experiment ID: 20000235 Result: Down-regulated in Transcription
  misc_feature: MA Experiment 20000235 PARAMETER Experiment Name: At_Siliques_P Parameter: Age (day) Value: 21
  misc_feature: MA Experiment 20000235 PARAMETER Experiment Name: At_Siliques_P Parameter: Organism Value: A. thaliana
  misc_feature: MA Experiment 20000235 PARAMETER Experiment Name: At_Siliques_P Parameter: Plant Line Value: WS
  misc_feature: MA Experiment 20000235 PARAMETER Experiment Name: At_Siliques_P Parameter: Tissue Value: 5-10mm Siliques vs. Whole Plant
  misc_feature: MA Experiment ID: 20001247 Result: Up-regulated in Transcription
  misc_feature: MA Experiment 20001247 PARAMETER Experiment Name: At_Far-red-induction_P Parameter: Age (day) Value: 7
  misc_feature: MA Experiment 20001247 PARAMETER Experiment Name: At_Far-red-induction_P Parameter: Light Value: Far-red vs. White
  misc_feature: MA Experiment 20001247 PARAMETER Experiment Name: At_Far-red-induction_P Parameter: Organism Value: A. thaliana
  misc_feature: MA Experiment 20001247 PARAMETER Experiment Name: At_Far-red-induction_P Parameter: Plant Line Value: Columbia
  misc_feature: MA Experiment 20001247 PARAMETER Experiment Name: At_Far-red-induction_P Parameter: Timepoint (hr) Value: 1
  misc_feature: MA Experiment 20001247 PARAMETER Experiment Name: At_Far-red-induction_P Parameter: Tissue Value: Whole Plant
  misc_feature: MA Experiment ID: 20001906 Result: Down-regulated in Transcription
  misc_feature: MA Experiment 20001906 PARAMETER Experiment Name: At_Drought_Reproduction_P Parameter: Age (day) Value: 35
  misc_feature: MA Experiment 20001906 PARAMETER Experiment Name: At_Drought_Reproduction_P Parameter: Organism Value: A. thaliana
  misc_feature: MA Experiment 20001906 PARAMETER Experiment Name: At_Drought_Reproduction_P Parameter: Plant Line Value: WS
  misc_feature: MA Experiment 20001906 PARAMETER Experiment Name: At_Drought_Reproduction_P Parameter: Timepoint (day) Value: 5
  misc_feature: MA Experiment 20001906 PARAMETER Experiment Name: At_Drought_Reproduction_P Parameter: Tissue Value: Siliques
  misc_feature: MA Experiment 20001906 PARAMETER Experiment Name: At_Drought_Reproduction_P Parameter: Treatment Value: Drought vs. No Drought
  misc_feature: MA Experiment ID: 20001907 Result: Down-regulated in Transcription
  misc_feature: MA Experiment 20001907 PARAMETER Experiment Name: At_Drought_Reproduction_P Parameter: Age (day) Value: 37
  misc_feature: MA Experiment 20001907 PARAMETER Experiment Name: At_Drought_Reproduction_P Parameter: Organism Value: A. thaliana
  misc_feature: MA Experiment 20001907 PARAMETER Experiment Name: At_Drought_Reproduction_P Parameter: Plant Line Value: WS
  misc_feature: MA Experiment 20001907 PARAMETER Experiment Name: At_Drought_Reproduction_P Parameter: Timepoint (day) Value: 7
  misc_feature: MA Experiment 20001907 PARAMETER Experiment Name: At_Drought_Reproduction_P Parameter: Tissue Value: Siliques
  misc_feature: MA Experiment 20001907 PARAMETER Experiment Name: At_Drought_Reproduction_P Parameter: Treatment Value: Drought vs. No Drought
  misc_feature: MA Experiment ID: 20001908 Result: Down-regulated in Transcription
  misc_feature: MA Experiment 20001908 PARAMETER Experiment Name: At_Drought_Reproduction_P Parameter: Age (day) Value: 40
  misc_feature: MA Experiment 20001908 PARAMETER Experiment Name: At_Drought_Reproduction_P Parameter: Organism Value: A. thaliana
  misc_feature: MA Experiment 20001908 PARAMETER Experiment Name: At_Drought_Reproduction_P Parameter: Plant Line Value: WS
  misc_feature: MA Experiment 20001908 PARAMETER Experiment Name: At_Drought_Reproduction_P Parameter: Timepoint (day) Value: 10
  misc_feature: MA Experiment 20001908 PARAMETER Experiment Name: At_Drought_Reproduction_P Parameter: Tissue Value: Siliques
  misc_feature: MA Experiment 20001908 PARAMETER Experiment Name: At_Drought_Reproduction_P Parameter: Treatment Value: Drought vs. No Drought
  misc_feature: MA Experiment ID: 20001911 Result: Down-regulated in Transcription
  misc_feature: MA Experiment 20001911 PARAMETER Experiment Name: At_Drought_Reproduction_P Parameter: Age (day) Value: 40
  misc_feature: MA Experiment 20001911 PARAMETER Experiment Name: At_Drought_Reproduction_P Parameter: Organism Value: A. thaliana
  misc_feature: MA Experiment 20001911 PARAMETER Experiment Name: At_Drought_Reproduction_P Parameter: Plant Line Value: WS
  misc_feature: MA Experiment 20001911 PARAMETER Experiment Name: At_Drought_Reproduction_P Parameter: Timepoint (day) Value: 10
  misc_feature: MA Experiment 20001911 PARAMETER Experiment Name: At_Drought_Reproduction_P Parameter: Tissue Value: Flowers
  misc_feature: MA Experiment 20001911 PARAMETER Experiment Name: At_Drought_Reproduction_P Parameter: Treatment Value: Drought vs. No Drought
gaacttgtaaaccttactctcgaagagtcctctgttactcatttttacattgtaaaaaaaaacttcttttcttctctacgtgaataagaatctgaagagtcattttctcaagaatgacgtggctaaaacaaatgtggtcaagcattttagtgctagccgtggtggtgatcggagccagagctgtgcccatcacgtatcttgaatctgcagtggctaaaggagctgtgtgtttggatggtagcgcgccagcataccatttcgataagggatcgggctcaggagtgaacaattggatcgttcatatggaaggaggaggatggtgcactgatatagctacatgcgttcaacgtaaaagtacaatgaagggttcttctaagcttatgaacaaagactttggtttctccggtatcttgggtggcaagcaaagcaccaatccagacttttacaattggaatagaatcaaagttcggtattgcgatggttcatctttcaccggtgatatagaagctgttgatccgacgcacaagctgttctttcgcggtgctagggtttggcgtgcggtgatcgatgatcttatggctaagggaatgagcaacgctcaaaacgctatactctccggttgttcagctggagcattggctgcgattctacattgcgaccagttcaagtccactctccctaaaacggctaaggtcaaatgtgtttctgacgctggttacttcatccacggtaaggatatcactggaggatcttacatccaatcctactacgccaaagtcgtagcgacccacggatctgcaaagagtctacctgcttcttgcacctcaagtatgaagcctgatttgtgtttcttccctcaatacgttgctaagaccttacaaacaccgcttttcgtcatcaatgccgccttcgattcttggcagatcaagaatgtattggcaccaacctctgttgataaaagcaaagcatggaagacttgtaagcttgatcttaagaagtgtacggccgctcagcttcaaaccgttcaaggatatagagaccaagtgttggctgcgttggcgcctgttcgatccgcgacgacgaacggattgttcttggactcgtgccatgctcattgccaaggtggaagcgctgccacttggtccggcgacaaaggtcccacagtcgcgaatacgaaaatggctaaggcggttggagattggttctttgagaggagtacgtttcagaacgtagattgttcatcgcttaattgcaaccctacttgccctgcagtatctactgaagactaaaatttattcattgatgtcttaaaatttattcatctttggaatattgttcttgaaatttaaaagtaaaataatataattgatacaatttcattcgaataaataaaatcctttgcccttct

SEQ ID NO: 99928 - protein, 391 aa, Arabidopsis thaliana; identical to SEQ ID NO: 24787
  peptide (1)..(391): Ceres Seq. ID no. 13603940
  misc_feature (10)..(373): Pfam Name: Pectinacetylesterase Pfam Description: Pectinacetylesterase
  misc_feature (1)..(391): Homolog of NCBI NO: 15242357 NR Description: pectinacetylesterase, putative [Arabidopsis >gi|10176999|dbj|BAB10249.1| pectin acetylesterase [Arabidopsis >gi|16323123|gb|AAL15296.1| AT5g45280/K9E15_6 [Arabidopsis
  misc_feature (1)..(391): Homolog of NCBI NO: 21593445 NR Description: pectin acetylesterase [Arabidopsis thaliana]
  misc_feature (1)..(305): Homolog of NCBI NO: 30694729 NR Description: pectinacetylesterase, putative [Arabidopsis >gi|15810319|gb|AAL07047.1| putative pectin acetylesterase thaliana] >gi|23297554|gb|AAN12894.1| putative pectin
  misc_feature (4)..(391): Homolog of NCBI NO: 18415308 NR Description: pectinacetylesterase, putative [Arabidopsis >gi|15450902|gb|AAK96722.1| putative pectinacetylesterase protein thaliana] >gi|17978691|gb|AAL47339.1| putative
  misc_feature (5)..(384): Homolog of NCBI NO: 7488883 NR Description: pectin acetylesterase (EC 3.1.1.-) precursor - bean >gi|1431629|emb|CAA67728.1| pectinacetylesterase precursor
  misc_feature (3)..(384): Homolog of NCBI NO: 38344147 NR Description: OSJNBa0041A02.14 [Oryza sativa (japonica
  misc_feature (4)..(384): Homolog of NCBI NO: 22328797 NR Description: pectinacetylesterase family [Arabidopsis thaliana]
  misc_feature (126)..(391): Homolog of NCBI NO: 7488140 NR Description: probable pectin acetylesterase (EC 3.1.1.-) - thaliana >gi|3080371|emb|CAA18628.1| putative protein [Arabidopsis thaliana] >gi|7268736|emb|CAB78943.1|
  misc_feature (24)..(384): Homolog of NCBI NO: 25347293 NR Description: probable pectinacetylesterase precursor T8L23.6 - Arabidopsis thaliana >gi|12321351|gb|AAG50747.1|AC079733_15
  misc_feature (24)..(384): Homolog of NCBI NO: 30696158 NR Description: pectinacetylesterase, putative [Arabidopsis

SEQ ID NO: 99929 - protein, 385 aa, Arabidopsis thaliana; identical to SEQ ID NO: 24788
  peptide (1)..(385): Ceres Seq. ID no. 13603941
  misc_feature (4)..(367): Pfam Name: Pectinacetylesterase Pfam Description: Pectinacetylesterase
  misc_feature (1)..(385): Homolog of NCBI NO: 15242357 NR Description: pectinacetylesterase, putative [Arabidopsis >gi|10176999|dbj|BAB10249.1| pectin acetylesterase [Arabidopsis >gi|16323123|gb|AAL15296.1| AT5g45280/K9E15_6 [Arabidopsis
  misc_feature (1)..(385): Homolog of NCBI NO: 21593445 NR Description: pectin acetylesterase [Arabidopsis thaliana]
  misc_feature (1)..(299): Homolog of NCBI NO: 30694729 NR Description: pectinacetylesterase, putative [Arabidopsis >gi|15810319|gb|AAL07047.1| putative pectin acetylesterase thaliana] >gi|23297554|gb|AAN12894.1| putative pectin
  misc_feature (1)..(385): Homolog of NCBI NO: 18415308 NR Description: pectinacetylesterase, putative [Arabidopsis >gi|15450902|gb|AAK96722.1| putative pectinacetylesterase protein thaliana] >gi|17978691|gb|AAL47339.1| putative
  misc_feature (1)..(378): Homolog of NCBI NO: 7488883 NR Description: pectin acetylesterase (EC 3.1.1.-) precursor - bean >gi|1431629|emb|CAA67728.1| pectinacetylesterase precursor
  misc_feature (1)..(378): Homolog of NCBI NO: 38344147 NR Description: OSJNBa0041A02.14 [Oryza sativa (japonica
  misc_feature (1)..(378): Homolog of NCBI NO: 22328797 NR Description: pectinacetylesterase family [Arabidopsis thaliana]
  misc_feature (120)..(385): Homolog of NCBI NO: 7488140 NR Description: probable pectin acetylesterase (EC 3.1.1.-) - thaliana >gi|3080371|emb|CAA18628.1| putative protein [Arabidopsis thaliana] >gi|7268736|emb|CAB78943.1|
  misc_feature (18)..(378): Homolog of NCBI NO: 25347293 NR Description: probable pectinacetylesterase precursor T8L23.6 - Arabidopsis thaliana >gi|12321351|gb|AAG50747.1|AC079733_15
  misc_feature (18)..(378): Homolog of NCBI NO: 30696158 NR Description: pectinacetylesterase, putative [Arabidopsis

SEQ ID NO: 99930 - protein, 328 aa, Arabidopsis thaliana; identical to SEQ ID NO: 24789
  peptide (1)..(328): Ceres Seq. ID no. 13603942
  misc_feature (1)..(310): Pfam Name: Pectinacetylesterase Pfam Description: Pectinacetylesterase
  misc_feature (1)..(328): Homolog of NCBI NO: 15242357 NR Description: pectinacetylesterase, putative [Arabidopsis >gi|10176999|dbj|BAB10249.1| pectin acetylesterase [Arabidopsis >gi|16323123|gb|AAL15296.1| AT5g45280/K9E15_6 [Arabidopsis
  misc_feature (1)..(328): Homolog of NCBI NO: 21593445 NR Description: pectin acetylesterase [Arabidopsis thaliana]
  misc_feature (1)..(242): Homolog of NCBI NO: 30694729 NR Description: pectinacetylesterase, putative [Arabidopsis >gi|15810319|gb|AAL07047.1| putative pectin acetylesterase thaliana] >gi|23297554|gb|AAN12894.1| putative pectin
  misc_feature (1)..(328): Homolog of NCBI NO: 18415308 NR Description: pectinacetylesterase, putative [Arabidopsis >gi|15450902|gb|AAK96722.1| putative pectinacetylesterase protein thaliana] >gi|17978691|gb|AAL47339.1| putative
  misc_feature (1)..(321): Homolog of NCBI NO: 7488883 NR Description: pectin acetylesterase (EC 3.1.1.-) precursor - bean >gi|1431629|emb|CAA67728.1| pectinacetylesterase precursor
  misc_feature (1)..(321): Homolog of NCBI NO: 38344147 NR Description: OSJNBa0041A02.14 [Oryza sativa (japonica
  misc_feature (1)..(321): Homolog of NCBI NO: 22328797 NR Description: pectinacetylesterase family [Arabidopsis thaliana]
  misc_feature (63)..(328): Homolog of NCBI NO: 7488140 NR Description: probable pectin acetylesterase (EC 3.1.1.-) - thaliana >gi|3080371|emb|CAA18628.1| putative protein [Arabidopsis thaliana] >gi|7268736|emb|CAB78943.1|
  misc_feature (1)..(321): Homolog of NCBI NO: 25347293 NR Description: probable pectinacetylesterase precursor T8L23.6 - Arabidopsis thaliana >gi|12321351|gb|AAG50747.1|AC079733_15
  misc_feature (1)..(321): Homolog of NCBI NO: 30696158 NR Description: pectinacetylesterase, putative [Arabidopsis

SEQ ID NO: 99931 - DNA, 772 bp, Arabidopsis thaliana
  misc_feature (1)..(772): Ceres Seq. ID no. 13603962
  misc_feature: MA Experiment ID: 20000180 Result: Up-regulated in Transcription
  misc_feature: MA Experiment 20000180 PARAMETER Experiment Name: At_Germinating_Seeds_P Parameter: Age (hr) Value: 24 vs. 0
  misc_feature: MA Experiment 20000180 PARAMETER Experiment Name: At_Germinating_Seeds_P Parameter: Tissue Value: Germinating Seeds
  misc_feature: MA Experiment ID: 20000184 Result: Up-regulated in Transcription
  misc_feature: MA Experiment 20000184 PARAMETER Experiment Name: At_Shoots__P Parameter: Age (day) Value: 7
  misc_feature: MA Experiment 20000184 PARAMETER Experiment Name: At_Shoots__P Parameter: Tissue Value: Shoots vs. Whole Plant
  misc_feature: MA Experiment ID: 20000185 Result: Down-regulated in Transcription
  misc_feature: MA Experiment 20000185 PARAMETER Experiment Name: At_Roots__P Parameter: Age (day) Value: 7 vs. 21
  misc_feature: MA Experiment 20000185 PARAMETER Experiment Name: At_Roots__P Parameter: Organism Value: A. thaliana
  misc_feature: MA Experiment 20000185 PARAMETER Experiment Name: At_Roots__P Parameter: Tissue Value: Roots vs. Whole Plant
  misc_feature: MA Experiment ID: 20000436 Result: Down-regulated in Transcription
  misc_feature: MA Experiment 20000436 PARAMETER Experiment Name: At_Drought_P Parameter: Age (day) Value: 7
  misc_feature: MA Experiment 20000436 PARAMETER Experiment Name: At_Drought_P Parameter: Organism Value: A. thaliana
  misc_feature: MA Experiment 20000436 PARAMETER Experiment Name: At_Drought_P Parameter: Plant Line Value: WS
  misc_feature: MA Experiment 20000436 PARAMETER Experiment Name: At_Drought_P Parameter: Timepoint (hr) Value: 12
  misc_feature: MA Experiment 20000436 PARAMETER Experiment Name: At_Drought_P Parameter: Tissue Value: Whole Plant
  misc_feature: MA Experiment 20000436 PARAMETER Experiment Name: At_Drought_P Parameter: Treatment Value: Drought vs. No Drought
  misc_feature: MA Experiment ID: 20000437 Result: Down-regulated in Transcription
  misc_feature: MA Experiment 20000437 PARAMETER Experiment Name: At_Drought_P Parameter: Age (day) Value: 8
  misc_feature: MA Experiment 20000437 PARAMETER Experiment Name: At_Drought_P Parameter: Organism Value: A. thaliana
  misc_feature: MA Experiment 20000437 PARAMETER Experiment Name: At_Drought_P Parameter: Plant Line Value: WS
  misc_feature: MA Experiment 20000437 PARAMETER Experiment Name: At_Drought_P Parameter: Timepoint (hr) Value: 24
  misc_feature: MA Experiment 20000437 PARAMETER Experiment Name: At_Drought_P Parameter: Tissue Value: Whole Plant
  misc_feature: MA Experiment 20000437 PARAMETER Experiment Name: At_Drought_P Parameter: Treatment Value: Drought vs. No Drought
  misc_feature: MA Experiment ID: 20000438 Result: Up-regulated in Transcription
  misc_feature: MA Experiment 20000438 PARAMETER Experiment Name: At_Shoots__P Parameter: Age (day) Value: 14
  misc_feature: MA Experiment 20000438 PARAMETER Experiment Name: At_Shoots__P Parameter: Tissue Value: Shoots vs. Whole Plant
  misc_feature: MA Experiment ID: 20000439 Result: Down-regulated in Transcription
  misc_feature: MA Experiment 20000439 PARAMETER Experiment Name: At_Roots__P Parameter: Age (day) Value: 14 vs. 21
  misc_feature: MA Experiment 20000439 PARAMETER Experiment Name: At_Roots__P Parameter: Organism Value: A. thaliana
  misc_feature: MA Experiment 20000439 PARAMETER Experiment Name: At_Roots__P Parameter: Tissue Value: Roots vs. Whole Plant
  misc_feature: MA Experiment ID: 20000496 Result: Down-regulated in Transcription
  misc_feature: MA Experiment 20000496 PARAMETER Experiment Name: At_Guard_Cells_P Parameter: Harvest Date Value: 7/19/2002
  misc_feature: MA Experiment 20000496 PARAMETER Experiment Name: At_Guard_Cells_P Parameter: Organism Value: Canola
  misc_feature: MA Experiment 20000496 PARAMETER Experiment Name: At_Guard_Cells_P Parameter: Tissue Value: Guard Cells vs. Leaves
  misc_feature: MA Experiment ID: 20000527 Result: Up-regulated in Transcription
  misc_feature: MA Experiment 20000527 PARAMETER Experiment Name: At_10percent_PEG_P Parameter: Age (day) Value: 20
  misc_feature: MA Experiment 20000527 PARAMETER Experiment Name: At_10percent_PEG_P Parameter: Organism Value: A. thaliana
  misc_feature: MA Experiment 20000527 PARAMETER Experiment Name: At_10percent_PEG_P Parameter: Plant Line Value: WS
  misc_feature: MA Experiment 20000527 PARAMETER Experiment Name: At_10percent_PEG_P Parameter: Timepoint (day) Value: 20
  misc_feature: MA Experiment 20000527 PARAMETER Experiment Name: At_10percent_PEG_P Parameter: Tissue Value: Whole Plant
  misc_feature: MA Experiment 20000527 PARAMETER Experiment Name: At_10percent_PEG_P Parameter: Treatment Value: 10percent PEG vs. No Treatment
  misc_feature: MA Experiment ID: 20000794 Result: Down-regulated in Transcription
  misc_feature: MA Experiment 20000794 PARAMETER Experiment Name: At_Petals_P Parameter: Age (day) Value: 23-25 days
  misc_feature: MA Experiment 20000794 PARAMETER Experiment Name: At_Petals_P Parameter: Plant Line Value: WS
  misc_feature: MA Experiment 20000794 PARAMETER Experiment Name: At_Petals_P Parameter: Tissue Value: Petals vs. Whole plant
  misc_feature: MA Experiment ID: 20001757 Result: Up-regulated in Transcription
  misc_feature: MA Experiment 20001757 PARAMETER Experiment Name: At_50mM_NH4NO3_L-to-H_P Parameter: Timepoint (hr) Value: 6
  misc_feature: MA Experiment 20001757 PARAMETER Experiment Name: At_50mM_NH4NO3_L-to-H_P Parameter: Tissue Value: Leaf
  misc_feature: MA Experiment 20001757 PARAMETER Experiment Name: At_50mM_NH4NO3_L-to-H_P Parameter: Treatment Value: 50mM NH4NO3 vs 100mM Mannitol
  misc_feature: MA Experiment ID: 20001905 Result: Down-regulated in Transcription
  misc_feature: MA Experiment 20001905 PARAMETER Experiment Name: At_Drought_Reproduction_P Parameter: Age (day) Value: 40
  misc_feature: MA Experiment 20001905 PARAMETER Experiment Name: At_Drought_Reproduction_P Parameter: Organism Value: A. thaliana
  misc_feature: MA Experiment 20001905 PARAMETER Experiment Name: At_Drought_Reproduction_P Parameter: Plant Line Value: WS
  misc_feature: MA Experiment 20001905 PARAMETER Experiment Name: At_Drought_Reproduction_P Parameter: Timepoint (day) Value: 10
  misc_feature: MA Experiment 20001905 PARAMETER Experiment Name: At_Drought_Reproduction_P Parameter: Tissue Value: Rosettes
  misc_feature: MA Experiment 20001905 PARAMETER Experiment Name: At_Drought_Reproduction_P Parameter: Treatment Value: Drought vs. No Drought
  misc_feature: MA Experiment ID: 20001906 Result: Down-regulated in Transcription
  misc_feature: MA Experiment 20001906 PARAMETER Experiment Name: At_Drought_Reproduction_P Parameter: Age (day) Value: 35
  misc_feature: MA Experiment 20001906 PARAMETER Experiment Name: At_Drought_Reproduction_P Parameter: Organism Value: A. thaliana
  misc_feature: MA Experiment 20001906 PARAMETER Experiment Name: At_Drought_Reproduction_P Parameter: Plant Line Value: WS
  misc_feature: MA Experiment 20001906 PARAMETER Experiment Name: At_Drought_Reproduction_P Parameter: Timepoint (day) Value: 5
  misc_feature: MA Experiment 20001906 PARAMETER Experiment Name: At_Drought_Reproduction_P Parameter: Tissue Value: Siliques
  misc_feature: MA Experiment 20001906 PARAMETER Experiment Name: At_Drought_Reproduction_P Parameter: Treatment Value: Drought vs. No Drought
  misc_feature: MA Experiment ID: 20001911 Result: Down-regulated in Transcription
  misc_feature: MA Experiment 20001911 PARAMETER Experiment Name: At_Drought_Reproduction_P Parameter: Age (day) Value: 40
  misc_feature: MA Experiment 20001911 PARAMETER Experiment Name: At_Drought_Reproduction_P Parameter: Organism Value: A. thaliana
  misc_feature: MA Experiment 20001911 PARAMETER Experiment Name: At_Drought_Reproduction_P Parameter: Plant Line Value: WS
  misc_feature: MA Experiment 20001911 PARAMETER Experiment Name: At_Drought_Reproduction_P Parameter: Timepoint (day) Value: 10
  misc_feature: MA Experiment 20001911 PARAMETER Experiment Name: At_Drought_Reproduction_P Parameter: Tissue Value: Flowers
  misc_feature: MA Experiment 20001911 PARAMETER Experiment Name: At_Drought_Reproduction_P Parameter: Treatment Value: Drought vs. No Drought
ggatagagaagataatgagctccttggggttttcagttggaacttgttctcctccaagtgagaaaagaaaatgcagatttcttgtgaataatagcttaaacaaagcagaggctattaacttgagaaacaagcaaaaagtttcttctgatcctgagttaagttttgcccaattatcctcatgtggtagaagagaagcaattattggttttggtttctctattggcttgcttgataatgtttctgcattagccgaaacaacttcttgtgaattctctgtgtctccttctggtcttgctttttgtgataaagttgttggttatggtcctgaagctgttaaagggcaactaatcaaggcacattatgtagggaagttggagaatgggaaagtctttgatagtagctataatcgagggaaacctcttactttccgaattggtgttggtgaggtgataaaaggttgggatcaaggaatccttggctctgatggaattcctcctatgcttactggtgggaaacgaacattgaggattcctccagaactcgcgtatggtgatcgaggcgcaggttgcaaaggaggctcatgccttattcctccagcttcggttcttctctttgacattgagtacataggtaaagcttgagagagcttttttgcttttgctttgccttttctgagccatatcatactcttgtttgaatcatccttatagaagaaaaaaatatgtctattattttttctactatgtaatcaagtgaatatctcagctttttc

SEQ ID NO: 99932 - protein, 212 aa, Arabidopsis thaliana
  peptide (1)..(212): Ceres Seq. ID no. 13603963
  misc_feature (105)..(209): Pfam Name: FKBP-type peptidyl-prolyl cis-trans isomerase Pfam Description: FKBP-type peptidyl-prolyl cis-trans isomerase
  misc_feature (5)..(212): Homolog of NCBI NO: 15242472 NR Description: immunophilin / FKBP-type peptidyl-prolyl
  misc_feature (5)..(212): Homolog of NCBI NO: 21535744 NR Description: FK506 binding protein 1 [Arabidopsis thaliana]
  misc_feature (105)..(180): Homolog of NCBI NO: 6686802 NR Description: FKBP like protein [Arabidopsis thaliana]
  misc_feature (88)..(209): Homolog of NCBI NO: 18420509 NR Description: immunophilin / FKBP-type peptidyl-prolyl isomerase, putative [Arabidopsis thaliana]
  misc_feature (80)..(210): Homolog of NCBI NO: 16329650 NR Description: FKBP-type peptidyl-prolyl cis-trans isomerase
  misc_feature (92)..(209): Homolog of NCBI NO: 33866159 NR Description: FKBP-type peptidyl-prolyl cis-trans isomerase
  misc_feature (78)..(210): Homolog of NCBI NO: 33862614 NR Description: FKBP-type peptidyl-prolyl cis-trans isomerase
  misc_feature (90)..(210): Homolog of NCBI NO: 37520410 NR Description: FKBP-type peptidyl-prolyl cis-trans isomerase
  misc_feature (81)..(212): Homolog of NCBI NO: 23053670 NR Description: hypothetical protein [Geobacter metallireducens]
  misc_feature (93)..(210): Homolog of NCBI NO: 22298646 NR Description: FKBP-type peptidyl-prolyl cis-trans isomerase
IEKIMSSLGFSVGTCSPPSEKRKCRFLVNNSLNKAEAINLRNKQKVSSDPELSFAQLSSCGRREAIIGFGFSIGLLDNVSALAETTSCEFSVSPSGLAFCDKVVGYGPEAVKGQLIKAHYVGKLENGKVFDSSYNRGKPLTFRIGVGEVIKGWDQGILGSDGIPPMLTGGKRTLRIPPELAYGDRGAGCKGGSCLIPPASVLLFDIEYIGKA

SEQ ID NO: 99933 - protein, 208 aa, Arabidopsis thaliana
  peptide (1)..(208): Ceres Seq. ID no. 13603964
  misc_feature (101)..(205): Pfam Name: FKBP-type peptidyl-prolyl cis-trans isomerase Pfam Description: FKBP-type peptidyl-prolyl cis-trans isomerase
  misc_feature (1)..(208): Homolog of NCBI NO: 15242472 NR Description: immunophilin / FKBP-type peptidyl-prolyl
  misc_feature (1)..(208): Homolog of NCBI NO: 21535744 NR Description: FK506 binding protein 1 [Arabidopsis thaliana]
  misc_feature (101)..(176): Homolog of NCBI NO: 6686802 NR Description: FKBP like protein [Arabidopsis thaliana]
  misc_feature (84)..(205): Homolog of NCBI NO: 18420509 NR Description: immunophilin / FKBP-type peptidyl-prolyl isomerase, putative [Arabidopsis thaliana]
  misc_feature (76)..(206): Homolog of NCBI NO: 16329650 NR Description: FKBP-type peptidyl-prolyl cis-trans isomerase
  misc_feature (88)..(205): Homolog of NCBI NO: 33866159 NR Description: FKBP-type peptidyl-prolyl cis-trans isomerase
  misc_feature (74)..(206): Homolog of NCBI NO: 33862614 NR Description: FKBP-type peptidyl-prolyl cis-trans isomerase
  misc_feature (86)..(206): Homolog of NCBI NO: 37520410 NR Description: FKBP-type peptidyl-prolyl cis-trans isomerase
  misc_feature (77)..(208): Homolog of NCBI NO: 23053670 NR Description: hypothetical protein [Geobacter metallireducens]
  misc_feature (89)..(206): Homolog of NCBI NO: 22298646 NR Description: FKBP-type peptidyl-prolyl cis-trans isomerase
MSSLGFSVGTCSPPSEKRKCRFLVNNSLNKAEAINLRNKQKVSSDPELSFAQLSSCGRREAIIGFGFSIGLLDNVSALAETTSCEFSVSPSGLAFCDKVVGYGPEAVKGQLIKAHYVGKLENGKVFDSSYNRGKPLTFRIGVGEVIKGWDQGILGSDGIPPMLTGGKRTLRIPPELAYGDRGAGCKGGSCLIPPASVLLFDIEYIGKA

SEQ ID NO: 99934 - DNA, 1056 bp, Arabidopsis thaliana
  misc_feature (1)..(1056): Ceres Seq. ID no. 13603965
  misc_feature: MA Experiment ID: 108577 Result: Down-regulated in Transcription
  misc_feature: MA Experiment 108577 PARAMETER Experiment Name: At_42deg_Heat_cDNA_P Parameter: Temperature (deg C) Value: 42 vs. 22
  misc_feature: MA Experiment 108577 PARAMETER Experiment Name: At_42deg_Heat_cDNA_P Parameter: Timepoint (hr) Value: 6
  misc_feature: MA Experiment 108577 PARAMETER Experiment Name: At_42deg_Heat_cDNA_P Parameter: Tissue Value: Aerial
  misc_feature: MA Experiment ID: 108579 Result: Up-regulated in Transcription
  misc_feature: MA Experiment 108579 PARAMETER Experiment Name: At_4deg_Cold_cDNA_P Parameter: Temperature (deg C) Value: 4 vs. 22
  misc_feature: MA Experiment 108579 PARAMETER Experiment Name: At_4deg_Cold_cDNA_P Parameter: Timepoint (hr) Value: 6
  misc_feature: MA Experiment 108579 PARAMETER Experiment Name: At_4deg_Cold_cDNA_P Parameter: Tissue Value: Aerial
  misc_feature: MA Experiment ID: 20000090 Result: Up-regulated in Transcription
  misc_feature: MA Experiment ID: 20000111 Result: Down-regulated in Transcription
  misc_feature: MA Experiment 20000111 PARAMETER Experiment Name: At_42deg_Heat_cDNA_P Parameter: Temperature (deg C) Value: 42 vs. 22
  misc_feature: MA Experiment 20000111 PARAMETER Experiment Name: At_42deg_Heat_cDNA_P Parameter: Timepoint (hr) Value: 6
  misc_feature: MA Experiment 20000111 PARAMETER Experiment Name: At_42deg_Heat_cDNA_P Parameter: Tissue Value: Aerial
  misc_feature: MA Experiment ID: 20000117 Result: Up-regulated in Transcription
  misc_feature: MA Experiment 20000117 PARAMETER Experiment Name: At_100uM_ABA_Mutants_cDNA_P Parameter: Plant Line Value: Columbia
  misc_feature: MA Experiment 20000117 PARAMETER Experiment Name: At_100uM_ABA_Mutants_cDNA_P Parameter: Timepoint (hr) Value: 6
  misc_feature: MA Experiment 20000117 PARAMETER Experiment Name: At_100uM_ABA_Mutants_cDNA_P Parameter: Tissue Value: Aerial
  misc_feature: MA Experiment 20000117 PARAMETER Experiment Name: At_100uM_ABA_Mutants_cDNA_P Parameter: Treatment Value: 100uM ABA vs. No Treatment
  misc_feature: MA Experiment ID: 20000173 Result: Down-regulated in Transcription
  misc_feature: MA Experiment 20000173 PARAMETER Experiment Name: At_42deg_Heat_P Parameter: Age (day) Value: 14
  misc_feature: MA Experiment 20000173 PARAMETER Experiment Name: At_42deg_Heat_P Parameter: Organism Value: A. thaliana
  misc_feature: MA Experiment 20000173 PARAMETER Experiment Name: At_42deg_Heat_P Parameter: Plant Line Value: WS
  misc_feature: MA Experiment 20000173 PARAMETER Experiment Name: At_42deg_Heat_P Parameter: Temperature (deg C) Value: 42 vs. 22
  misc_feature: MA Experiment 20000173 PARAMETER Experiment Name: At_42deg_Heat_P Parameter: Timepoint (hr) Value: 6
  misc_feature: MA Experiment 20000173 PARAMETER Experiment Name: At_42deg_Heat_P Parameter: Tissue Value: Aerial
  misc_feature: MA Experiment ID: 20000184 Result: Down-regulated in Transcription
  misc_feature: MA Experiment 20000184 PARAMETER Experiment Name: At_Shoots__P Parameter: Age (day) Value: 7
  misc_feature: MA Experiment 20000184 PARAMETER Experiment Name: At_Shoots__P Parameter: Tissue Value: Shoots vs. Whole Plant
  misc_feature: MA Experiment ID: 20000213 Result: Up-regulated in Transcription
  misc_feature: MA Experiment 20000213 PARAMETER Experiment Name: At_4deg_Cold_P Parameter: Timepoint (hr) Value: 2
  misc_feature: MA Experiment ID: 20000224 Result: Down-regulated in Transcription
  misc_feature: MA Experiment ID: 20000227 Result: Up-regulated in Transcription
  misc_feature: MA Experiment 20000227 PARAMETER Experiment Name: At_Root-Tips-vs-Tops_P Parameter: Tissue Value: Root Tips vs. Root Tops
  misc_feature: MA Experiment ID: 20000438 Result: Down-regulated in Transcription
  misc_feature: MA Experiment 20000438 PARAMETER Experiment Name: At_Shoots__P Parameter: Age (day) Value: 14
  misc_feature: MA Experiment 20000438 PARAMETER Experiment Name: At_Shoots__P Parameter: Tissue Value: Shoots vs. Whole Plant
  misc_feature: MA Experiment ID: 20000460 Result: Up-regulated in Transcription
  misc_feature: MA Experiment 20000460 PARAMETER Experiment Name: At_10percent_PEG_P Parameter: Age (day) Value: 12
  misc_feature: MA Experiment 20000460 PARAMETER Experiment Name: At_10percent_PEG_P Parameter: Organism Value: A. thaliana
  misc_feature: MA Experiment 20000460 PARAMETER Experiment Name: At_10percent_PEG_P Parameter: Plant Line Value: WS
  misc_feature: MA Experiment 20000460 PARAMETER Experiment Name: At_10percent_PEG_P Parameter: Timepoint (day) Value: 12
  misc_feature: MA Experiment 20000460 PARAMETER Experiment Name: At_10percent_PEG_P Parameter: Tissue Value: Whole Plant
  misc_feature: MA Experiment 20000460 PARAMETER Experiment Name: At_10percent_PEG_P Parameter: Treatment Value: 10percent PEG vs. No Treatment
  misc_feature: MA Experiment ID: 20000495 Result: Down-regulated in Transcription
  misc_feature: MA Experiment 20000495 PARAMETER Experiment Name: At_Guard_Cells_P Parameter: Harvest Date Value: 8/2/2002
  misc_feature: MA Experiment 20000495 PARAMETER Experiment Name: At_Guard_Cells_P Parameter: Organism Value: A. thaliana
  misc_feature: MA Experiment 20000495 PARAMETER Experiment Name: At_Guard_Cells_P Parameter: Tissue Value: Guard Cells vs. Leaves
  misc_feature: MA Experiment ID: 20000527 Result: Up-regulated in Transcription
  misc_feature: MA Experiment 20000527 PARAMETER Experiment Name: At_10percent_PEG_P Parameter: Age (day) Value: 20
  misc_feature: MA Experiment 20000527 PARAMETER Experiment Name: At_10percent_PEG_P Parameter: Organism Value: A. thaliana
  misc_feature: MA Experiment 20000527 PARAMETER Experiment Name: At_10percent_PEG_P Parameter: Plant Line Value: WS
  misc_feature: MA Experiment 20000527 PARAMETER Experiment Name: At_10percent_PEG_P Parameter: Timepoint (day) Value: 20
  misc_feature: MA Experiment 20000527 PARAMETER Experiment Name: At_10percent_PEG_P Parameter: Tissue Value: Whole Plant
  misc_feature: MA Experiment 20000527 PARAMETER Experiment Name: At_10percent_PEG_P Parameter: Treatment Value: 10percent PEG vs. No Treatment
  misc_feature: MA Experiment ID: 20000794 Result: Down-regulated in Transcription
  misc_feature: MA Experiment 20000794 PARAMETER Experiment Name: At_Petals_P Parameter: Age (day) Value: 23-25 days
  misc_feature: MA Experiment 20000794 PARAMETER Experiment Name: At_Petals_P Parameter: Plant Line Value: WS
  misc_feature: MA Experiment 20000794 PARAMETER Experiment Name: At_Petals_P Parameter: Tissue Value: Petals vs. Whole plant
  misc_feature: MA Experiment ID: 20001557 Result: Up-regulated in Transcription
  misc_feature: MA Experiment 20001557 PARAMETER Experiment Name: At_Drought_Soil_Dry_P Parameter: Age (day) Value: 27
  misc_feature: MA Experiment 20001557 PARAMETER Experiment Name: At_Drought_Soil_Dry_P Parameter: Organism Value: A. thaliana
  misc_feature: MA Experiment 20001557 PARAMETER Experiment Name: At_Drought_Soil_Dry_P Parameter: Plant Line Value: WS
  misc_feature: MA Experiment 20001557 PARAMETER Experiment Name: At_Drought_Soil_Dry_P Parameter: Post Timepoint (hr) Value: 3
  misc_feature: MA Experiment 20001557 PARAMETER Experiment Name: At_Drought_Soil_Dry_P Parameter: Post-Treatment Value: Re-Water vs. No Drought
  misc_feature: MA Experiment 20001557 PARAMETER Experiment Name: At_Drought_Soil_Dry_P Parameter: Timepoint (day) Value: 13
  misc_feature: MA Experiment 20001557 PARAMETER Experiment Name: At_Drought_Soil_Dry_P Parameter: Treatment Value: Drought vs. No Drought
  misc_feature: MA Experiment ID: 20001560 Result: Up-regulated in Transcription
  misc_feature: MA Experiment 20001560 PARAMETER Experiment Name: At_Drought_Soil_Dry_P Parameter: Age (day) Value: 28
  misc_feature: MA Experiment 20001560 PARAMETER Experiment Name: At_Drought_Soil_Dry_P Parameter: Organism Value: A. thaliana
  misc_feature: MA Experiment 20001560 PARAMETER Experiment Name: At_Drought_Soil_Dry_P Parameter: Plant Line Value: WS
  misc_feature: MA Experiment 20001560 PARAMETER Experiment Name: At_Drought_Soil_Dry_P Parameter: Post Timepoint (hr) Value: None
  misc_feature: MA Experiment 20001560 PARAMETER Experiment Name: At_Drought_Soil_Dry_P Parameter: Post-Treatment Value: None
  misc_feature: MA Experiment 20001560 PARAMETER Experiment Name: At_Drought_Soil_Dry_P Parameter: Timepoint (day) Value: 14
  misc_feature: MA Experiment 20001560 PARAMETER Experiment Name: At_Drought_Soil_Dry_P Parameter: Treatment Value: Drought vs. No Drought
  misc_feature: MA Experiment ID: 20001911 Result: Down-regulated in Transcription
  misc_feature: MA Experiment 20001911 PARAMETER Experiment Name: At_Drought_Reproduction_P Parameter: Age (day) Value: 40
  misc_feature: MA Experiment 20001911 PARAMETER Experiment Name: At_Drought_Reproduction_P Parameter: Organism Value: A. thaliana
  misc_feature: MA Experiment 20001911 PARAMETER Experiment Name: At_Drought_Reproduction_P Parameter: Plant Line Value: WS
  misc_feature: MA Experiment 20001911 PARAMETER Experiment Name: At_Drought_Reproduction_P Parameter: Timepoint (day) Value: 10
  misc_feature: MA Experiment 20001911 PARAMETER Experiment Name: At_Drought_Reproduction_P Parameter: Tissue Value: Flowers
  misc_feature: MA Experiment 20001911 PARAMETER Experiment Name: At_Drought_Reproduction_P Parameter: Treatment Value: Drought vs. No Drought
gtttgatattttccaattccgcgtctttctctgttgaaatcgaaaaaattttcaaaacaaaatctaaggaaaaaagagcaacaagtttcaaatctcatttgggtttttcattttgaaaagaaggacccatttttatctctctctttgttttgttttctcgaatctgaaggagtaaagttaaaagctttgaaggagagaatcaatggcgggttacagagcagatgatgaatacgattacctattcaaggttgttctgataggtgattcaggtgtgggcaaatccaatttgctttcacgattcacgaagaacgagtttagtctcgagtcaaaatccacgatcggggtcgagttcgcgactcggagtttgaatgttgatgataaagtcatcaaagctcagatttgggatactgctggtcaagaaaggtaccgagccatcactagtgcgtattaccgaggagctgttggagcgcttcttgtctacgatgtaacccgacactcaacatttgaaaacgttgagacttggctgaaagaactcagaaaccacactgatccaaacattgtagtcatgctcgtgggcaacaaatctgaccttcgccatctcgtggctgttcagactgaagatgctaagtcattcgccgagaaagaatctctctacttcatggaaacctcggctctcgaagccaccaatgttgagaacgctttcgccgaagtcctcactcagattcaccacattgtgagcaagaaggcgatggaagctgcgagcgaatccgctaatgttccatcgaaaggagacaagatcgatatcggtaaagatgtttcagctgtgaagaaaggtggatgctgctcgaactaatcagagagtagaattattgttaacaacctaaggatcggtttttgttaacggttctatcgaatatgaagattgcttttaggttgagtaatgcccatttggtgtatttctgttatttatctgatctatcaatgttattgtttgaaaatgctatgtcaaattttcagaaccctaaattatatttatctcaaacaatagaattgttg

SEQ ID NO: 99935 - protein, 216 aa, Arabidopsis thaliana; identical to SEQ ID NO: 39012
  peptide (1)..(216): Ceres Seq. ID no. 13603966
  misc_feature (15)..(176): Pfam Name: Ras family Pfam Description: Ras family
  misc_feature (1)..(216): Homolog of NCBI NO: 15242483 NR Description: GTP-binding protein, putative [Arabidopsis
  misc_feature (1)..(216): Homolog of NCBI NO: 21536533 NR Description: Rab-type small GTP-binding protein-like
  misc_feature (1)..(216): Homolog of NCBI NO: 15234020 NR Description: Ras family GTP-binding protein [Arabidopsis
  misc_feature (1)..(216): Homolog of NCBI NO: 541979 NR Description: GTP-binding protein, ras-like - fava bean

SEQ ID NO: 99936 - DNA, 1239 bp, Arabidopsis thaliana
  misc_feature (1)..(1239): Ceres Seq. ID no. 13603971
  misc_feature: MA Experiment ID: 20000184 Result: Down-regulated in Transcription
  misc_feature: MA Experiment 20000184 PARAMETER Experiment Name: At_Shoots__P Parameter: Age (day) Value: 7
  misc_feature: MA Experiment 20000184 PARAMETER Experiment Name: At_Shoots__P Parameter: Tissue Value: Shoots vs. Whole Plant
  misc_feature: MA Experiment ID: 20000264 Result: Up-regulated in Transcription
  misc_feature: MA Experiment 20000264 PARAMETER Experiment Name: At_Open_Flower_P Parameter: Age (day) Value: 21
  misc_feature: MA Experiment 20000264 PARAMETER Experiment Name: At_Open_Flower_P Parameter: Plant Line Value: WS
  misc_feature: MA Experiment 20000264 PARAMETER Experiment Name: At_Open_Flower_P Parameter: Tissue Value: Open Flower vs. Whole Plant
  misc_feature: MA Experiment ID: 20000438 Result: Down-regulated in Transcription
  misc_feature: MA Experiment 20000438 PARAMETER Experiment Name: At_Shoots__P Parameter: Age (day) Value: 14
  misc_feature: MA Experiment 20000438 PARAMETER Experiment Name: At_Shoots__P Parameter: Tissue Value: Shoots vs. Whole Plant
  misc_feature: MA Experiment ID: 20000439 Result: Down-regulated in Transcription
  misc_feature: MA Experiment 20000439 PARAMETER Experiment Name: At_Roots__P Parameter: Age (day) Value: 14 vs. 21
  misc_feature: MA Experiment 20000439 PARAMETER Experiment Name: At_Roots__P Parameter: Organism Value: A. thaliana
  misc_feature: MA Experiment 20000439 PARAMETER Experiment Name: At_Roots__P Parameter: Tissue Value: Roots vs. Whole Plant
  misc_feature: MA Experiment ID: 20000441 Result: Down-regulated in Transcription
  misc_feature: MA Experiment 20000441 PARAMETER Experiment Name: At_1uM_BR-BRZ__P Parameter: Tissue Value: Shoot Apices
  misc_feature: MA Experiment 20000441 PARAMETER Experiment Name: At_1uM_BR-BRZ__P Parameter: Treatment Value: 1uM BR vs. No Treatment
  misc_feature: MA Experiment ID: 20000794 Result: Up-regulated in Transcription
  misc_feature: MA Experiment 20000794 PARAMETER Experiment Name: At_Petals_P Parameter: Age (day) Value: 23-25 days
  misc_feature: MA Experiment 20000794 PARAMETER Experiment Name: At_Petals_P Parameter: Plant Line Value: WS
  misc_feature: MA Experiment 20000794 PARAMETER Experiment Name: At_Petals_P Parameter: Tissue Value: Petals vs. Whole plant
  misc_feature: MA Experiment ID: 20001457 Result: Down-regulated in Transcription
  misc_feature: MA Experiment 20001457 PARAMETER Experiment Name: At_50mM_NH4NO3_L-to-H_P Parameter: Age (day) Value: Undefined
  misc_feature: MA Experiment 20001457 PARAMETER Experiment Name: At_50mM_NH4NO3_L-to-H_P Parameter: Organism Value: Undefined
  misc_feature: MA Experiment 20001457 PARAMETER Experiment Name: At_50mM_NH4NO3_L-to-H_P Parameter: Plant Line Value: Undefined
  misc_feature: MA Experiment 20001457 PARAMETER Experiment Name: At_50mM_NH4NO3_L-to-H_P Parameter: Timepoint (hr) Value: 0.5
  misc_feature: MA Experiment 20001457 PARAMETER Experiment Name: At_50mM_NH4NO3_L-to-H_P Parameter: Tissue Value: Siliques
  misc_feature: MA Experiment 20001457 PARAMETER Experiment Name: At_50mM_NH4NO3_L-to-H_P Parameter: Treatment Value: 50mM NH4NO3 vs. 100mM Manitol
  misc_feature: MA Experiment ID: 20001458 Result: Down-regulated in Transcription
  misc_feature: MA Experiment 20001458 PARAMETER Experiment Name: At_50mM_NH4NO3_L-to-H_P Parameter: Age (day) Value: Undefined
  misc_feature: MA Experiment 20001458 PARAMETER Experiment Name: At_50mM_NH4NO3_L-to-H_P Parameter: Organism Value: Undefined
  misc_feature: MA Experiment 20001458 PARAMETER Experiment Name: At_50mM_NH4NO3_L-to-H_P Parameter: Plant Line Value: Undefined
  misc_feature: MA Experiment 20001458 PARAMETER Experiment Name: At_50mM_NH4NO3_L-to-H_P Parameter: Timepoint (hr) Value: 2
  misc_feature: MA Experiment 20001458 PARAMETER Experiment Name: At_50mM_NH4NO3_L-to-H_P Parameter: Tissue Value: Siliques
  misc_feature: MA Experiment 20001458 PARAMETER Experiment Name: At_50mM_NH4NO3_L-to-H_P Parameter: Treatment Value: 50mM NH4NO3 vs. 100mM Manitol
  misc_feature: MA Experiment ID: 20001554 Result: Up-regulated in Transcription
  misc_feature: MA Experiment 20001554 PARAMETER Experiment Name: At_Drought_Soil_Dry_P Parameter: Age (day) Value: 21
  misc_feature: MA Experiment 20001554 PARAMETER Experiment Name: At_Drought_Soil_Dry_P Parameter: Organism Value: A. thaliana
  misc_feature: MA Experiment 20001554 PARAMETER Experiment Name: At_Drought_Soil_Dry_P Parameter: Plant Line Value: WS
  misc_feature: MA Experiment 20001554 PARAMETER Experiment Name: At_Drought_Soil_Dry_P Parameter: Post Timepoint (hr) Value: None
  misc_feature: MA Experiment 20001554 PARAMETER Experiment Name: At_Drought_Soil_Dry_P Parameter: Post-Treatment Value: None
  misc_feature: MA Experiment 20001554 PARAMETER Experiment Name: At_Drought_Soil_Dry_P Parameter: Timepoint (day) Value: 7
  misc_feature: MA Experiment 20001554 PARAMETER Experiment Name: At_Drought_Soil_Dry_P Parameter: Treatment Value: Drought vs. No Drought
  misc_feature: MA Experiment ID: 20001555 Result: Up-regulated in Transcription
  misc_feature: MA Experiment 20001555 PARAMETER Experiment Name: At_Drought_Soil_Dry_P Parameter: Age (day) Value: 24
  misc_feature: MA Experiment 20001555 PARAMETER Experiment Name: At_Drought_Soil_Dry_P Parameter: Organism Value: A. thaliana
  misc_feature: MA Experiment 20001555 PARAMETER Experiment Name: At_Drought_Soil_Dry_P Parameter: Plant Line Value: WS
  misc_feature: MA Experiment 20001555 PARAMETER Experiment Name: At_Drought_Soil_Dry_P Parameter: Post Timepoint (hr) Value: None
  misc_feature: MA Experiment 20001555 PARAMETER Experiment Name: At_Drought_Soil_Dry_P Parameter: Post-Treatment Value: None
  misc_feature: MA Experiment 20001555 PARAMETER Experiment Name: At_Drought_Soil_Dry_P Parameter: Timepoint (day) Value: 10
  misc_feature: MA Experiment 20001555 PARAMETER Experiment Name: At_Drought_Soil_Dry_P Parameter: Treatment Value: Drought vs. No Drought
  misc_feature: MA Experiment ID: 20001557 Result: Down-regulated in Transcription
  misc_feature: MA Experiment 20001557 PARAMETER Experiment Name: At_Drought_Soil_Dry_P Parameter: Age (day) Value: 27
  misc_feature: MA Experiment 20001557 PARAMETER Experiment Name: At_Drought_Soil_Dry_P Parameter: Organism Value: A. thaliana
  misc_feature: MA Experiment 20001557 PARAMETER Experiment Name: At_Drought_Soil_Dry_P Parameter: Plant Line Value: WS
  misc_feature: MA Experiment 20001557 PARAMETER Experiment Name: At_Drought_Soil_Dry_P Parameter: Post Timepoint (hr) Value: 3
  misc_feature: MA Experiment 20001557 PARAMETER Experiment Name: At_Drought_Soil_Dry_P Parameter: Post-Treatment Value: Re-Water vs. No Drought
  misc_feature: MA Experiment 20001557 PARAMETER Experiment Name: At_Drought_Soil_Dry_P Parameter: Timepoint (day) Value: 13
  misc_feature: MA Experiment 20001557 PARAMETER Experiment Name: At_Drought_Soil_Dry_P Parameter: Treatment Value: Drought vs. No Drought
  misc_feature: MA Experiment ID: 20001558 Result: Down-regulated in Transcription
  misc_feature: MA Experiment 20001558 PARAMETER Experiment Name: At_Drought_Soil_Dry_P Parameter: Age (day) Value: 27
  misc_feature: MA Experiment 20001558 PARAMETER Experiment Name: At_Drought_Soil_Dry_P Parameter: Organism Value: A. thaliana
  misc_feature: MA Experiment 20001558 PARAMETER Experiment Name: At_Drought_Soil_Dry_P Parameter: Plant Line Value: WS
  misc_feature: MA Experiment 20001558 PARAMETER Experiment Name: At_Drought_Soil_Dry_P Parameter: Post Timepoint (hr) Value: 6
  misc_feature: MA Experiment 20001558 PARAMETER Experiment Name: At_Drought_Soil_Dry_P Parameter: Post-Treatment Value: Re-Water vs. No Drought
  misc_feature: MA Experiment 20001558 PARAMETER Experiment Name: At_Drought_Soil_Dry_P Parameter: Timepoint (day) Value: 13
  misc_feature: MA Experiment 20001558 PARAMETER Experiment Name: At_Drought_Soil_Dry_P Parameter: Treatment Value: Drought vs. No Drought
  misc_feature: MA Experiment ID: 20001757 Result: Down-regulated in Transcription
  misc_feature: MA Experiment 20001757 PARAMETER Experiment Name: At_50mM_NH4NO3_L-to-H_P Parameter: Timepoint (hr) Value: 6
  misc_feature: MA Experiment 20001757 PARAMETER Experiment Name: At_50mM_NH4NO3_L-to-H_P Parameter: Tissue Value: Leaf
  misc_feature: MA Experiment 20001757 PARAMETER Experiment Name: At_50mM_NH4NO3_L-to-H_P Parameter: Treatment Value: 50mM NH4NO3 vs 100mM Mannitol
  misc_feature: MA Experiment ID: 20001761 Result: Down-regulated in Transcription
  misc_feature: MA Experiment 20001761 PARAMETER Experiment Name: At_50mM_NH4NO3_L-to-H_P Parameter: Timepoint (hr) Value: 4
  misc_feature: MA Experiment 20001761 PARAMETER Experiment Name: At_50mM_NH4NO3_L-to-H_P Parameter: Tissue Value: Siliques
  misc_feature: MA Experiment 20001761 PARAMETER Experiment Name: At_50mM_NH4NO3_L-to-H_P Parameter: Treatment Value: 50mM NH4NO3 vs 100mM Mannitol
  misc_feature: MA Experiment ID: 20001768 Result: Up-regulated in Transcription
  misc_feature: MA Experiment 20001768 PARAMETER Experiment Name: At_Far-red-enriched-adult_P Parameter: Age (day) Value: 28
  misc_feature: MA Experiment 20001768 PARAMETER Experiment Name: At_Far-red-enriched-adult_P Parameter: Light Value: Far-red enriched vs. White
  misc_feature: MA Experiment 20001768 PARAMETER Experiment Name: At_Far-red-enriched-adult_P Parameter: Organism Value: A. thaliana
  misc_feature: MA Experiment 20001768 PARAMETER Experiment Name: At_Far-red-enriched-adult_P Parameter: Plant Line Value: Columbia
  misc_feature: MA Experiment 20001768 PARAMETER Experiment Name: At_Far-red-enriched-adult_P Parameter: Timepoint (hr) Value: 1
  misc_feature: MA Experiment 20001768 PARAMETER Experiment Name: At_Far-red-enriched-adult_P Parameter: Tissue Value: Aerial
  misc_feature: MA Experiment ID: 20001904 Result: Up-regulated in Transcription
  misc_feature: MA Experiment 20001904 PARAMETER Experiment Name: At_Drought_Reproduction_P Parameter: Age (day) Value: 37
  misc_feature: MA Experiment 20001904 PARAMETER Experiment Name: At_Drought_Reproduction_P Parameter: Organism Value: A. thaliana
  misc_feature: MA Experiment 20001904 PARAMETER Experiment Name: At_Drought_Reproduction_P Parameter: Plant Line Value: WS
  misc_feature: MA Experiment 20001904 PARAMETER Experiment Name: At_Drought_Reproduction_P Parameter: Timepoint (day) Value: 7
  misc_feature: MA Experiment 20001904 PARAMETER Experiment Name: At_Drought_Reproduction_P Parameter: Tissue Value: Rosettes
  misc_feature: MA Experiment 20001904 PARAMETER Experiment Name: At_Drought_Reproduction_P Parameter: Treatment Value: Drought vs. No Drought
  misc_feature: MA Experiment ID: 20001905 Result: Up-regulated in Transcription
  misc_feature: MA Experiment 20001905 PARAMETER Experiment Name: At_Drought_Reproduction_P Parameter: Age (day) Value: 40
  misc_feature: MA Experiment 20001905 PARAMETER Experiment Name: At_Drought_Reproduction_P Parameter: Organism Value: A. thaliana
  misc_feature: MA Experiment 20001905 PARAMETER Experiment Name: At_Drought_Reproduction_P Parameter: Plant Line Value: WS
  misc_feature: MA Experiment 20001905 PARAMETER Experiment Name: At_Drought_Reproduction_P Parameter: Timepoint (day) Value: 10
  misc_feature: MA Experiment 20001905 PARAMETER Experiment Name: At_Drought_Reproduction_P Parameter: Tissue Value: Rosettes
  misc_feature: MA Experiment 20001905 PARAMETER Experiment Name: At_Drought_Reproduction_P Parameter: Treatment Value: Drought vs. No Drought
  misc_feature: MA Experiment ID: 20001906 Result: Down-regulated in Transcription
  misc_feature: MA Experiment 20001906 PARAMETER Experiment Name: At_Drought_Reproduction_P Parameter: Age (day) Value: 35
  misc_feature: MA Experiment 20001906 PARAMETER Experiment Name: At_Drought_Reproduction_P Parameter: Organism Value: A. thaliana
  misc_feature: MA Experiment 20001906 PARAMETER Experiment Name: At_Drought_Reproduction_P Parameter: Plant Line Value: WS
  misc_feature: MA Experiment 20001906 PARAMETER Experiment Name: At_Drought_Reproduction_P Parameter: Timepoint (day) Value: 5
  misc_feature: MA Experiment 20001906 PARAMETER Experiment Name: At_Drought_Reproduction_P Parameter: Tissue Value: Siliques
  misc_feature: MA Experiment 20001906 PARAMETER Experiment Name: At_Drought_Reproduction_P Parameter: Treatment Value: Drought vs. No Drought
  misc_feature: MA Experiment ID: 20001911 Result: Down-regulated in Transcription
  misc_feature: MA Experiment 20001911 PARAMETER Experiment Name: At_Drought_Reproduction_P Parameter: Age (day) Value: 40
  misc_feature: MA Experiment 20001911 PARAMETER Experiment Name: At_Drought_Reproduction_P Parameter: Organism Value: A. thaliana
  misc_feature: MA Experiment 20001911 PARAMETER Experiment Name: At_Drought_Reproduction_P Parameter: Plant Line Value: WS
  misc_feature: MA Experiment 20001911 PARAMETER Experiment Name: At_Drought_Reproduction_P Parameter: Timepoint (day) Value: 10
  misc_feature: MA Experiment 20001911 PARAMETER Experiment Name: At_Drought_Reproduction_P Parameter: Tissue Value: Flowers
  misc_feature: MA Experiment 20001911 PARAMETER Experiment Name: At_Drought_Reproduction_P Parameter: Treatment Value: Drought vs. No Drought
aatcaaattaagagcaaaagtcatttaactttcctaaaacaatggctttaaaacatatgcaaatctttctcttcgtcgctatattttcatcattctgtttctccatcactctttctcgtccactcgacaatgaactcatcatgcaaaagaggcacatcgagtggatgactaaacacggccgtgtctacgcggatgtgaaggaggaaaacaatcgctacgttgtgttcaaaaacaacgtcgaacgcattgaacatttaaatagcattcctgccggaagaactttcaaacttgcggtaaatcagtttgctgatttaaccaatgacgaatttcgttccatgtacactggtttcaaaggtgtctcggcattatctagccaaagccaaactaaaatgtcgccgtttaggtaccaaaacgtttcttctggtgctttgccggtttctgttgactggaggaagaaaggagctgtgacccctatcaagaatcaaggcagctgcggatgttgttgggcgttttcagcggttgcggctattgaaggagcaacacaaataaagaaagggaaacttatatctttgtcagaacaacagcttgttgattgcgacacaaacgattttggctgcgaaggcggtttaatggatactgcgtttgagcatataaaagcgactggcggcttgacaactgagtcaaattatccttacaaaggcgaagacgctacttgcaattccaaaaagaccaatccaaaagcaacttctattacaggttatgaggatgtcccggttaatgatgagcaagcactgatgaaggcagtggcacaccaaccggttagcgttggaattgaaggaggtggttttgatttccaattctattcgtctggtgtgttcactggagagtgcactacgtatcttgatcatgcagtaactgcgattggatacggcgaatctactaacggatcaaagtattggatcatcaagaattcatggggaacaaaatggggagaaagtggatatatgaggattcaaaaagatgtcaaggataaacaaggactatgtggtcttgccatgaaagcttcttacccaactatatgaattcaaaaccgtgttaagcttttaattgtgtatgtttgtgtgggattgatgtctaaaaataatttgaattgttttatgtaaaaaaattgtatttagactgttgtatgcattttatgaaattgtaagcttatgtaatgcaaaggattgataattttcg

SEQ ID NO: 99937 - protein, 346 aa, Arabidopsis thaliana; identical to SEQ ID NO: 36431
  peptide (1)..(346): Ceres Seq. ID no. 13603972
  misc_feature (130)..(345): Pfam Name: Papain family cysteine protease Pfam Description: Papain family cysteine protease
  misc_feature (1)..(346): Homolog of NCBI NO: 18422605 NR Description: senescence-specific cysteine protease SAG12
  misc_feature (1)..(346): Homolog of NCBI NO: 1046373 NR Description: SAG12 protein
  misc_feature (1)..(346): Homolog of NCBI NO: 5823018 NR Description: senescence-specific cysteine protease [Brassica
  misc_feature (1)..(346): Homolog of NCBI NO: 5823020 NR Description: senescence-specific cysteine protease [Brassica
  misc_feature (1)..(346): Homolog of NCBI NO: 21666724 NR Description: cysteine proteinase [Brassica napus]
  misc_feature (1)..(345): Homolog of NCBI NO: 24285904 NR Description: cysteine proteinase precursor [Ipomoea batatas]
  misc_feature (1)..(345): Homolog of NCBI NO: 13491750 NR Description: cysteine protease [Ipomoea batatas]
  misc_feature (7)..(345): Homolog of NCBI NO: 535454 NR Description: cysteine proteinase
  misc_feature (7)..(345): Homolog of NCBI NO: 34329348 NR Description: putative cysteine proteinase [Medicago truncatula]
  misc_feature (1)..(344): Homolog of NCBI NO: 1169186 NR Description: Thiol protease SEN102 precursor

SEQ ID NO: 99938 - protein, 341 aa, Arabidopsis thaliana; identical to SEQ ID NO: 36432
  peptide (1)..(341): Ceres Seq. ID no. 13603973
  misc_feature (125)..(340): Pfam Name: Papain family cysteine protease Pfam Description: Papain family cysteine protease
  misc_feature (1)..(341): Homolog of NCBI NO: 18422605 NR Description: senescence-specific cysteine protease SAG12
  misc_feature (1)..(341): Homolog of NCBI NO: 1046373 NR Description: SAG12 protein
  misc_feature (1)..(341): Homolog of NCBI NO: 5823018 NR Description: senescence-specific cysteine protease [Brassica
  misc_feature (1)..(341): Homolog of NCBI NO: 5823020 NR Description: senescence-specific cysteine protease [Brassica
  misc_feature (1)..(341): Homolog of NCBI NO: 21666724 NR Description: cysteine proteinase [Brassica napus]
  misc_feature (1)..(340): Homolog of NCBI NO: 24285904 NR Description: cysteine proteinase precursor [Ipomoea batatas]
  misc_feature (1)..(340): Homolog of NCBI NO: 13491750 NR Description: cysteine protease [Ipomoea batatas]
  misc_feature (2)..(340): Homolog of NCBI NO: 535454 NR Description: cysteine proteinase
  misc_feature (2)..(340): Homolog of NCBI NO: 34329348 NR Description: putative cysteine proteinase [Medicago truncatula]
  misc_feature (1)..(339): Homolog of NCBI NO: 1169186 NR Description: Thiol protease SEN102 precursor

SEQ ID NO: 99939 - protein, 313 aa, Arabidopsis thaliana; identical to SEQ ID NO: 36433
  peptide (1)..(313): Ceres Seq. ID no. 13603974
  misc_feature (97)..(312): Pfam Name: Papain family cysteine protease Pfam Description: Papain family cysteine protease
  misc_feature (1)..(313): Homolog of NCBI NO: 18422605 NR Description: senescence-specific cysteine protease SAG12
  misc_feature (1)..(313): Homolog of NCBI NO: 1046373 NR Description: SAG12 protein
  misc_feature (1)..(313): Homolog of NCBI NO: 5823018 NR Description: senescence-specific cysteine protease [Brassica
  misc_feature (1)..(313): Homolog of NCBI NO: 5823020 NR Description: senescence-specific cysteine protease [Brassica
  misc_feature (1)..(313): Homolog of NCBI NO: 21666724 NR Description: cysteine proteinase [Brassica napus]
  misc_feature (1)..(312): Homolog of NCBI NO: 24285904 NR Description: cysteine proteinase precursor [Ipomoea batatas]
  misc_feature (1)..(312): Homolog of NCBI NO: 13491750 NR Description: cysteine protease [Ipomoea batatas]
  misc_feature (1)..(312): Homolog of NCBI NO: 535454 NR Description: cysteine proteinase
  misc_feature (1)..(312): Homolog of NCBI NO: 34329348 NR Description: putative cysteine proteinase [Medicago truncatula]
  misc_feature (1)..(311): Homolog of NCBI NO: 1169186 NR Description: Thiol protease SEN102 precursor

SEQ ID NO: 99940 - DNA, 1277 bp, Arabidopsis thaliana
  misc_feature (1)..(1277): Ceres Seq. ID no. 13603975
  misc_feature: MA Experiment ID: 108474 Result: Up-regulated in Transcription
  misc_feature: MA Experiment 108474 PARAMETER Experiment Name: At_Drought_Flowers_cDNA_P Parameter: Timepoint (hr) Value: null
  misc_feature: MA Experiment 108474 PARAMETER Experiment Name: At_Drought_Flowers_cDNA_P Parameter: Treatment Value: Drought vs. No Drought
  misc_feature: MA Experiment ID: 108576 Result: Up-regulated in Transcription
  misc_feature: MA Experiment 108576 PARAMETER Experiment Name: At_42deg_Heat_cDNA_P Parameter: Temperature (deg C) Value: 42 vs. 22
  misc_feature: MA Experiment 108576 PARAMETER Experiment Name: At_42deg_Heat_cDNA_P Parameter: Timepoint (hr) Value: 1
  misc_feature: MA Experiment 108576 PARAMETER Experiment Name: At_42deg_Heat_cDNA_P Parameter: Tissue Value: Aerial
  misc_feature: MA Experiment ID: 108595 Result: Up-regulated in Transcription
  misc_feature: MA Experiment 108595 PARAMETER Experiment Name: At_Ler-pi_Ovule_cDNA_P Parameter: Plant Line Value: null
  misc_feature: MA Experiment ID: 20001450 Result: Up-regulated in Transcription
  misc_feature: MA Experiment 20001450 PARAMETER Experiment Name: At_Far-red-induction_P Parameter: Age (day) Value: 7
  misc_feature: MA Experiment 20001450 PARAMETER Experiment Name: At_Far-red-induction_P Parameter: Light Value: Far-red vs. White
  misc_feature: MA Experiment 20001450 PARAMETER Experiment Name: At_Far-red-induction_P Parameter: Organism Value: A. thaliana
  misc_feature: MA Experiment 20001450 PARAMETER Experiment Name: At_Far-red-induction_P Parameter: Plant Line Value: Columbia
  misc_feature: MA Experiment 20001450 PARAMETER Experiment Name: At_Far-red-induction_P Parameter: Timepoint (hr) Value: 8
  misc_feature: MA Experiment 20001450 PARAMETER Experiment Name: At_Far-red-induction_P Parameter: Tissue Value: Whole Plant
  misc_feature: MA Experiment ID: 20001556 Result: Down-regulated in Transcription
  misc_feature: MA Experiment 20001556 PARAMETER Experiment Name: At_Drought_Soil_Dry_P Parameter: Age (day) Value: 26
  misc_feature: MA Experiment 20001556 PARAMETER Experiment Name: At_Drought_Soil_Dry_P Parameter: Organism Value: A. thaliana
  misc_feature: MA Experiment 20001556 PARAMETER Experiment Name: At_Drought_Soil_Dry_P Parameter: Plant Line Value: WS
  misc_feature: MA Experiment 20001556 PARAMETER Experiment Name: At_Drought_Soil_Dry_P Parameter: Post Timepoint (hr) Value: None
  misc_feature: MA Experiment 20001556 PARAMETER Experiment Name: At_Drought_Soil_Dry_P Parameter: Post-Treatment Value: None
  misc_feature: MA Experiment 20001556 PARAMETER Experiment Name: At_Drought_Soil_Dry_P Parameter: Timepoint (day) Value: 12
  misc_feature: MA Experiment 20001556 PARAMETER Experiment Name: At_Drought_Soil_Dry_P Parameter: Treatment Value: Drought vs. No Drought
  misc_feature: MA Experiment ID: 20001557 Result: Down-regulated in Transcription
  misc_feature: MA Experiment 20001557 PARAMETER Experiment Name: At_Drought_Soil_Dry_P Parameter: Age (day) Value: 27
  misc_feature: MA Experiment 20001557 PARAMETER Experiment Name: At_Drought_Soil_Dry_P Parameter: Organism Value: A. thaliana
  misc_feature: MA Experiment 20001557 PARAMETER Experiment Name: At_Drought_Soil_Dry_P Parameter: Plant Line Value: WS
  misc_feature: MA Experiment 20001557 PARAMETER Experiment Name: At_Drought_Soil_Dry_P Parameter: Post Timepoint (hr) Value: 3
  misc_feature: MA Experiment 20001557 PARAMETER Experiment Name: At_Drought_Soil_Dry_P Parameter: Post-Treatment Value: Re-Water vs. No Drought
  misc_feature: MA Experiment 20001557 PARAMETER Experiment Name: At_Drought_Soil_Dry_P Parameter: Timepoint (day) Value: 13
  misc_feature: MA Experiment 20001557 PARAMETER Experiment Name: At_Drought_Soil_Dry_P Parameter: Treatment Value: Drought vs. No Drought
  misc_feature: MA Experiment ID: 20001558 Result: Down-regulated in Transcription
  misc_feature: MA Experiment 20001558 PARAMETER Experiment Name: At_Drought_Soil_Dry_P Parameter: Age (day) Value: 27
  misc_feature: MA Experiment 20001558 PARAMETER Experiment Name: At_Drought_Soil_Dry_P Parameter: Organism Value: A. thaliana
  misc_feature: MA Experiment 20001558 PARAMETER Experiment Name: At_Drought_Soil_Dry_P Parameter: Plant Line Value: WS
  misc_feature: MA Experiment 20001558 PARAMETER Experiment Name: At_Drought_Soil_Dry_P Parameter: Post Timepoint (hr) Value: 6
  misc_feature: MA Experiment 20001558 PARAMETER Experiment Name: At_Drought_Soil_Dry_P Parameter: Post-Treatment Value: Re-Water vs. No Drought
  misc_feature: MA Experiment 20001558 PARAMETER Experiment Name: At_Drought_Soil_Dry_P Parameter: Timepoint (day) Value: 13
  misc_feature: MA Experiment 20001558 PARAMETER Experiment Name: At_Drought_Soil_Dry_P Parameter: Treatment Value: Drought vs. No Drought
aactgaatttgaaagaaaaaaaaaaagaaatcataaaatgagaatcaatatgttattcatagtggcattctcatttttagtctctgttcggtcattaccgatgagaccaactctaaagtacgagtcaatctttaattttggcgattctttaagcgataccggaaactttttattatccggtgatgttgactctccgaacattggaagactaccgtacggacaaaccttttttaaccgttccaccggtcgttgctctgacggacgtctcatcatcgatttcatcgctgaggctagtggactaccgtacattccaccgtatctccaaagcttacggacgaatgattcggtagatttcaagagaggtgcaaattttgcggtggctggagcaacagcgaacgaatttagcttctttaaaaacagaggtctttcagtaacattgttgacaaacaagacactggatattcaacttgattggttcaagaagttgaaaccttctctgtgtaaaaccaagccagaatgtgaacaatattttagaaaatctctatttctcgttggagaaattggtggaaacgattataactaccctcttttggcattccgaagtttcaaacatgctatggatttggtaccatttgttattaacaaaatcatggacgtcacaagtgcattgatagaggaaggtgccatgacactaatagttccaggaaaccttccaatcggttgttctgcggctctactagagcggtttaatgataatagtggatggctttatgactcgaggaaccaatgctacatgccattgaacaatttggctaagcttcacaatgataagctcaagaaaggcctcgcggctctaagaaaaaagtacccttatgccaaaattatatatgctgattattacagttctgccatgcaattcttcaactcaccttccaaatacggtttcactggaagtgtcctaaaggcatgttgtggaggaggagatggaagatacaacgtgcaaccaaacgtgcggtgcggagaaaagggttcaaccacttgcgaagatccatcaacgtacgcaaattgggacggaattcacctcactgaagcggcttaccgccacattgcaactggtctcatctccggccgtttcaccatgcctacttataattaataacaattaagttactcataagttgtaactttttttttaacacacaaacttttcatataactcctaattgaaaacctataaatcgatcatatttatatcaagctcgttcgagagcataagc

SEQ ID NO: 99941 - protein, 384 aa, Arabidopsis thaliana
  peptide (1)..(384): Ceres Seq. ID no. 13603976
  misc_feature (43)..(373): Pfam Name: GDSL-like Lipase/Acylhydrolase Pfam Description: GDSL-like Lipase/Acylhydrolase
  misc_feature (13)..(384): Homolog of NCBI NO: 15242538 NR Description: GDSL-motif lipase/hydrolase protein [Arabidopsis
  misc_feature (17)..(384): Homolog of NCBI NO: 21553708 NR Description: GDSL-motif lipase/hydrolase-like protein
  misc_feature (40)..(381): Homolog of NCBI NO: 34903978 NR Description: unnamed protein product [Oryza sativa (japonica group)] >gi|7523500|dbj|BAA94228.1| unnamed protein product
  misc_feature (13)..(381): Homolog of NCBI NO: 34903958 NR Description: OSJNBa0038J17.24 [Oryza sativa (japonica >gi|7523510|dbj|BAA94238.1| unnamed protein product [Oryza sativa
  misc_feature (12)..(384): Homolog of NCBI NO: 15218756 NR Description: lipase [Arabidopsis thaliana]
  misc_feature (15)..(384): Homolog of NCBI NO: 15218753 NR Description: lipase, putative [Arabidopsis thaliana]
  misc_feature (12)..(384): Homolog of NCBI NO: 10764854 NR Description: F1K23.13 [Arabidopsis thaliana]
  misc_feature (15)..(384): Homolog of NCBI NO: 21593234 NR Description: lipase, putative [Arabidopsis thaliana]
  misc_feature (15)..(384): Homolog of NCBI NO: 10764858 NR Description: F1K23.17 [Arabidopsis thaliana]
  misc_feature (39)..(381): Homolog of NCBI NO: 34903994 NR Description: unnamed protein product [Oryza sativa (japonica group)] >gi|7523492|dbj|BAA94220.1| unnamed protein product
TEFERKKKRNHKMRINMLFIVAFSFLVSVRSLPMRPTLKYESIFNFGDSLSDTGNFLLSGDVDSPNIGRLPYGQTFFNRSTGRCSDGRLIIDFIAEASGLPYIPPYLQSLRTNDSVDFKRGANFAVAGATANEFSFFKNRGLSVTLLTNKTLDIQLDWFKKLKPSLCKTKPECEQYFRKSLFLVGEIGGNDYNYPLLAFRSFKHAMDLVPFVINKIMDVTSALIEEGAMTLIVPGNLPIGCSAALLERFNDNSGWLYDSRNQCYMPLNNLAKLHNDKLKKGLAALRKKYPYAKIIYADYYSSAMQFFNSPSKYGFTGSVLKACCGGGDGRYNVQPNVRCGEKGSTTCEDPSTYANWDGIHLTEAAYRHIATGLISGRFTMPTYN

SEQ ID NO: 99942 - protein, 372 aa, Arabidopsis thaliana
  peptide (1)..(372): Ceres Seq. ID no. 13603977
  misc_feature (31)..(361): Pfam Name: GDSL-like Lipase/Acylhydrolase Pfam Description: GDSL-like Lipase/Acylhydrolase
  misc_feature (1)..(372): Homolog of NCBI NO: 15242538 NR Description: GDSL-motif lipase/hydrolase protein [Arabidopsis
  misc_feature (5)..(372): Homolog of NCBI NO: 21553708 NR Description: GDSL-motif lipase/hydrolase-like protein
  misc_feature (28)..(369): Homolog of NCBI NO: 34903978 NR Description: unnamed protein product [Oryza sativa (japonica group)] >gi|7523500|dbj|BAA94228.1| unnamed protein product
  misc_feature (1)..(369): Homolog of NCBI NO: 34903958 NR Description: OSJNBa0038J17.24 [Oryza sativa (japonica >gi|7523510|dbj|BAA94238.1| unnamed protein product [Oryza sativa
  misc_feature (1)..(372): Homolog of NCBI NO: 15218756 NR Description: lipase [Arabidopsis thaliana]
  misc_feature (3)..(372): Homolog of NCBI NO: 15218753 NR Description: lipase, putative [Arabidopsis thaliana]
  misc_feature (1)..(372): Homolog of NCBI NO: 10764854 NR Description: F1K23.13 [Arabidopsis thaliana]
  misc_feature (3)..(372): Homolog of NCBI NO: 21593234 NR Description: lipase, putative [Arabidopsis thaliana]
  misc_feature (3)..(372): Homolog of NCBI NO: 10764858 NR Description: F1K23.17 [Arabidopsis thaliana]
  misc_feature (27)..(369): Homolog of NCBI NO: 34903994 NR Description: unnamed protein product [Oryza sativa (japonica group)] >gi|7523492|dbj|BAA94220.1| unnamed protein product
MRINMLFIVAFSFLVSVRSLPMRPTLKYESIFNFGDSLSDTGNFLLSGDVDSPNIGRLPYGQTFFNRSTGRCSDGRLIIDFIAEASGLPYIPPYLQSLRTNDSVDFKRGANFAVAGATANEFSFFKNRGLSVTLLTNKTLDIQLDWFKKLKPSLCKTKPECEQYFRKSLFLVGEIGGNDYNYPLLAFRSFKHAMDLVPFVINKIMDVTSALIEEGAMTLIVPGNLPIGCSAALLERFNDNSGWLYDSRNQCYMPLNNLAKLHNDKLKKGLAALRKKYPYAKIIYADYYSSAMQFFNSPSKYGFTGSVLKACCGGGDGRYNVQPNVRCGEKGSTTCEDPSTYANWDGIHLTEAAYRHIATGLISGRFTMPTYN

SEQ ID NO: 99943 - protein, 368 aa, Arabidopsis thaliana
  peptide (1)..(368): Ceres Seq. ID no. 13603978
  misc_feature (27)..(357): Pfam Name: GDSL-like Lipase/Acylhydrolase Pfam Description: GDSL-like Lipase/Acylhydrolase
  misc_feature (1)..(368): Homolog of NCBI NO: 15242538 NR Description: GDSL-motif lipase/hydrolase protein [Arabidopsis
  misc_feature (1)..(368): Homolog of NCBI NO: 21553708 NR Description: GDSL-motif lipase/hydrolase-like protein
  misc_feature (24)..(365): Homolog of NCBI NO: 34903978 NR Description: unnamed protein product [Oryza sativa (japonica group)] >gi|7523500|dbj|BAA94228.1| unnamed protein product
  misc_feature (1)..(365): Homolog of NCBI NO: 34903958 NR Description: OSJNBa0038J17.24 [Oryza sativa (japonica >gi|7523510|dbj|BAA94238.1| unnamed protein product [Oryza sativa
  misc_feature (1)..(368): Homolog of NCBI NO: 15218756 NR Description: lipase [Arabidopsis thaliana]
  misc_feature (1)..(368): Homolog of NCBI NO: 15218753 NR Description: lipase, putative [Arabidopsis thaliana]
  misc_feature (1)..(368): Homolog of NCBI NO: 10764854 NR Description: F1K23.13 [Arabidopsis thaliana]
  misc_feature (1)..(368): Homolog of NCBI NO: 21593234 NR Description: lipase, putative [Arabidopsis thaliana]
  misc_feature (1)..(368): Homolog of NCBI NO: 10764858 NR Description: F1K23.17 [Arabidopsis thaliana]
  misc_feature (23)..(365): Homolog of NCBI NO: 34903994 NR Description: unnamed protein product [Oryza sativa (japonica group)] >gi|7523492|dbj|BAA94220.1| unnamed protein product
MLFIVAFSFLVSVRSLPMRPTLKYESIFNFGDSLSDTGNFLLSGDVDSPNIGRLPYGQTFFNRSTGRCSDGRLIIDFIAEASGLPYIPPYLQSLRTNDSVDFKRGANFAVAGATANEFSFFKNRGLSVTLLTNKTLDIQLDWFKKLKPSLCKTKPECEQYFRKSLFLVGEIGGNDYNYPLLAFRSFKHAMDLVPFVINKIMDVTSALIEEGAMTLIVPGNLPIGCSAALLERFNDNSGWLYDSRNQCYMPLNNLAKLHNDKLKKGLAALRKKYPYAKIIYADYYSSAMQFFNSPSKYGFTGSVLKACCGGGDGRYNVQPNVRCGEKGSTTCEDPSTYANWDGIHLTEAAYRHIATGLISGRFTMPTYN

SEQ ID NO: 99944 - DNA, 1245 bp, Arabidopsis thaliana
  misc_feature (1)..(1245): Ceres Seq. ID no. 13603979
  misc_feature: MA Experiment ID: 108461 Result: Up-regulated in Transcription
  misc_feature: MA Experiment 108461 PARAMETER Experiment Name: At_Germinating_Seeds_cDNA_P Parameter: Age (day) Value: 1 vs. 0
  misc_feature: MA Experiment 108461 PARAMETER Experiment Name: At_Germinating_Seeds_cDNA_P Parameter: Tissue Value: Germinating Seeds
  misc_feature: MA Experiment ID: 108462 Result: Up-regulated in Transcription
  misc_feature: MA Experiment 108462 PARAMETER Experiment Name: At_Germinating_Seeds_cDNA_P Parameter: Age (day) Value: 2 vs. 0
  misc_feature: MA Experiment 108462 PARAMETER Experiment Name: At_Germinating_Seeds_cDNA_P Parameter: Tissue Value: Germinating Seeds
  misc_feature: MA Experiment ID: 108463 Result: Up-regulated in Transcription
  misc_feature: MA Experiment 108463 PARAMETER Experiment Name: At_Germinating_Seeds_cDNA_P Parameter: Age (day) Value: 3 vs. 0
  misc_feature: MA Experiment 108463 PARAMETER Experiment Name: At_Germinating_Seeds_cDNA_P Parameter: Tissue Value: Germinating Seeds
  misc_feature: MA Experiment ID: 108464 Result: Up-regulated in Transcription
  misc_feature: MA Experiment 108464 PARAMETER Experiment Name: At_Germinating_Seeds_cDNA_P Parameter: Age (day) Value: 4 vs. 0
  misc_feature: MA Experiment 108464 PARAMETER Experiment Name: At_Germinating_Seeds_cDNA_P Parameter: Tissue Value: Germinating Seeds
  misc_feature: MA Experiment ID: 108474 Result: Down-regulated in Transcription
  misc_feature: MA Experiment 108474 PARAMETER Experiment Name: At_Drought_Flowers_cDNA_P Parameter: Timepoint (hr) Value: null
  misc_feature: MA Experiment 108474 PARAMETER Experiment Name: At_Drought_Flowers_cDNA_P Parameter: Treatment Value: Drought vs. No Drought
  misc_feature: MA Experiment ID: 108561 Result: Up-regulated in Transcription
  misc_feature: MA Experiment 108561 PARAMETER Experiment Name: At_100uM_ABA_cDNA_P Parameter: Timepoint (hr) Value: 6
  misc_feature: MA Experiment 108561 PARAMETER Experiment Name: At_100uM_ABA_cDNA_P Parameter: Tissue Value: Aerial
  misc_feature: MA Experiment 108561 PARAMETER Experiment Name: At_100uM_ABA_cDNA_P Parameter: Treatment Value: 100uM ABA vs. No Treatment
  misc_feature: MA Experiment ID: 108572 Result: Up-regulated in Transcription
  misc_feature: MA Experiment 108572 PARAMETER Experiment Name: At_Drought_cDNA_P Parameter: Timepoint (hr) Value: 1
  misc_feature: MA Experiment 108572 PARAMETER Experiment Name: At_Drought_cDNA_P Parameter: Tissue Value: Aerial
  misc_feature: MA Experiment 108572 PARAMETER Experiment Name: At_Drought_cDNA_P Parameter: Treatment Value: Drought vs. No Drought
  misc_feature: MA Experiment ID: 108573 Result: Up-regulated in Transcription
  misc_feature: MA Experiment 108573 PARAMETER Experiment Name: At_Drought_cDNA_P Parameter: Timepoint (hr) Value: 6
  misc_feature: MA Experiment 108573 PARAMETER Experiment Name: At_Drought_cDNA_P Parameter: Tissue Value: Aerial
  misc_feature: MA Experiment 108573 PARAMETER Experiment Name: At_Drought_cDNA_P Parameter: Treatment Value: Drought vs. No Drought
  misc_feature: MA Experiment ID: 108577 Result: Down-regulated in Transcription
  misc_feature: MA Experiment 108577 PARAMETER Experiment Name: At_42deg_Heat_cDNA_P Parameter: Temperature (deg C) Value: 42 vs. 22
  misc_feature: MA Experiment 108577 PARAMETER Experiment Name: At_42deg_Heat_cDNA_P Parameter: Timepoint (hr) Value: 6
  misc_feature: MA Experiment 108577 PARAMETER Experiment Name: At_42deg_Heat_cDNA_P Parameter: Tissue Value: Aerial
  misc_feature: MA Experiment ID: 108585 Result: Down-regulated in Transcription
  misc_feature: MA Experiment 108585 PARAMETER Experiment Name: At_5mM_NaNP_cDNA_P Parameter: Timepoint (hr) Value: 6
  misc_feature: MA Experiment 108585 PARAMETER Experiment Name: At_5mM_NaNP_cDNA_P Parameter: Tissue Value: Aerial
  misc_feature: MA Experiment 108585 PARAMETER Experiment Name: At_5mM_NaNP_cDNA_P Parameter: Treatment Value: null
  misc_feature: MA Experiment ID: 108595 Result: Down-regulated in Transcription
  misc_feature: MA Experiment 108595 PARAMETER Experiment Name: At_Ler-pi_Ovule_cDNA_P Parameter: Plant Line Value: null
  misc_feature: MA Experiment ID: 108605 Result: Up-regulated in Transcription
  misc_feature: MA Experiment 108605 PARAMETER Experiment Name: At_100uM_ABA_cDNA_P Parameter: Timepoint (hr) Value: 6
  misc_feature: MA Experiment 108605 PARAMETER Experiment Name: At_100uM_ABA_cDNA_P Parameter: Tissue Value: Aerial
  misc_feature: MA Experiment 108605 PARAMETER Experiment Name: At_100uM_ABA_cDNA_P Parameter: Treatment Value: 100uM ABA vs. No Treatment
  misc_feature: MA Experiment ID: 108607 Result: Up-regulated in Transcription
  misc_feature: MA Experiment 108607 PARAMETER Experiment Name: At_100uM_ABA_cDNA_P Parameter: Timepoint (hr) Value: 4
  misc_feature: MA Experiment 108607 PARAMETER Experiment Name: At_100uM_ABA_cDNA_P Parameter: Tissue Value: Aerial
  misc_feature: MA Experiment 108607 PARAMETER Experiment Name: At_100uM_ABA_cDNA_P Parameter: Treatment Value: 100uM ABA vs. No Treatment
  misc_feature: MA Experiment ID: 108608 Result: Up-regulated in Transcription
  misc_feature: MA Experiment 108608 PARAMETER Experiment Name: At_100uM_ABA_cDNA_P Parameter: Timepoint (hr) Value: 1
  misc_feature: MA Experiment 108608 PARAMETER Experiment Name: At_100uM_ABA_cDNA_P Parameter: Tissue Value: Aerial
  misc_feature: MA Experiment 108608 PARAMETER Experiment Name: At_100uM_ABA_cDNA_P Parameter: Treatment Value: 100uM ABA vs. No Treatment
  misc_feature: MA Experiment ID: 20000072 Result: Up-regulated in Transcription
  misc_feature: MA Experiment 20000072 PARAMETER Experiment Name: At_100uM_ABA_Mutants_cDNA_P Parameter: Plant Line Value: CS8105
  misc_feature: MA Experiment 20000072 PARAMETER Experiment Name: At_100uM_ABA_Mutants_cDNA_P Parameter: Timepoint (hr) Value: 6
  misc_feature: MA Experiment 20000072 PARAMETER Experiment Name: At_100uM_ABA_Mutants_cDNA_P Parameter: Tissue Value: Aerial
  misc_feature: MA Experiment 20000072 PARAMETER Experiment Name: At_100uM_ABA_Mutants_cDNA_P Parameter: Treatment Value: 100uM ABA vs. No Treatment
  misc_feature: MA Experiment ID: 20000093 Result: Down-regulated in Transcription
  misc_feature: MA Experiment 20000093 PARAMETER Experiment Name: At_42deg_Heat_cDNA_P Parameter: Temperature (deg C) Value: 42 vs. 22
  misc_feature: MA Experiment 20000093 PARAMETER Experiment Name: At_42deg_Heat_cDNA_P Parameter: Timepoint (hr) Value: 0.5
  misc_feature: MA Experiment 20000093 PARAMETER Experiment Name: At_42deg_Heat_cDNA_P Parameter: Tissue Value: Aerial
  misc_feature: MA Experiment ID: 20000111 Result: Down-regulated in Transcription
  misc_feature: MA Experiment 20000111 PARAMETER Experiment Name: At_42deg_Heat_cDNA_P Parameter: Temperature (deg C) Value: 42 vs. 22
  misc_feature: MA Experiment 20000111 PARAMETER Experiment Name: At_42deg_Heat_cDNA_P Parameter: Timepoint (hr) Value: 6
  misc_feature: MA Experiment 20000111 PARAMETER Experiment Name: At_42deg_Heat_cDNA_P Parameter: Tissue Value: Aerial
  misc_feature: MA Experiment ID: 20000144 Result: Down-regulated in Transcription
  misc_feature: MA Experiment 20000144 PARAMETER Experiment Name: At_42deg_Heat_cDNA_P Parameter: Temperature (deg C) Value: 42 vs. 22
  misc_feature: MA Experiment 20000144 PARAMETER Experiment Name: At_42deg_Heat_cDNA_P Parameter: Timepoint (hr) Value: 1
  misc_feature: MA Experiment 20000144 PARAMETER Experiment Name: At_42deg_Heat_cDNA_P Parameter: Tissue Value: Aerial
  misc_feature: MA Experiment ID: 20000166 Result: Up-regulated in Transcription
  misc_feature: MA Experiment 20000166 PARAMETER Experiment Name: At_100uM_ABA_P Parameter: Age (day) Value: 14
  misc_feature: MA Experiment 20000166 PARAMETER Experiment Name: At_100uM_ABA_P Parameter: Organism Value: A. thaliana
  misc_feature: MA Experiment 20000166 PARAMETER Experiment Name: At_100uM_ABA_P Parameter: Plant Line Value: WS
  misc_feature: MA Experiment 20000166 PARAMETER Experiment Name: At_100uM_ABA_P Parameter: Timepoint (hr) Value: 1
  misc_feature: MA Experiment 20000166 PARAMETER Experiment Name: At_100uM_ABA_P Parameter: Tissue Value: Aerial
  misc_feature: MA Experiment 20000166 PARAMETER Experiment Name: At_100uM_ABA_P Parameter: Treatment Value: 100uM ABA vs. No Treatment
  misc_feature: MA Experiment ID: 20000169 Result: Up-regulated in Transcription
  misc_feature: MA Experiment 20000169 PARAMETER Experiment Name: At_100uM_ABA_P Parameter: Age (day) Value: 14
  misc_feature: MA Experiment 20000169 PARAMETER Experiment Name: At_100uM_ABA_P Parameter: Organism Value: A. thaliana
  misc_feature: MA Experiment 20000169 PARAMETER Experiment Name: At_100uM_ABA_P Parameter: Plant Line Value: WS
  misc_feature: MA Experiment 20000169 PARAMETER Experiment Name: At_100uM_ABA_P Parameter: Timepoint (hr) Value: 6
  misc_feature: MA Experiment 20000169 PARAMETER Experiment Name: At_100uM_ABA_P Parameter: Tissue Value: Aerial
  misc_feature: MA Experiment 20000169 PARAMETER Experiment Name: At_100uM_ABA_P Parameter: Treatment Value: 100uM ABA vs. No Treatment
  misc_feature: MA Experiment ID: 20000171 Result: Down-regulated in Transcription
  misc_feature: MA Experiment 20000171 PARAMETER Experiment Name: At_42deg_Heat_P Parameter: Age (day) Value: 14
  misc_feature: MA Experiment 20000171 PARAMETER Experiment Name: At_42deg_Heat_P Parameter: Organism Value: A. thaliana
  misc_feature: MA Experiment 20000171 PARAMETER Experiment Name: At_42deg_Heat_P Parameter: Plant Line Value: WS
  misc_feature: MA Experiment 20000171 PARAMETER Experiment Name: At_42deg_Heat_P Parameter: Temperature (deg C) Value: 42 vs. 22
  misc_feature: MA Experiment 20000171 PARAMETER Experiment Name: At_42deg_Heat_P Parameter: Timepoint (hr) Value: 1
  misc_feature: MA Experiment 20000171 PARAMETER Experiment Name: At_42deg_Heat_P Parameter: Tissue Value: Aerial
  misc_feature: MA Experiment ID: 20000173 Result: Down-regulated in Transcription
  misc_feature: MA Experiment 20000173 PARAMETER Experiment Name: At_42deg_Heat_P Parameter: Age (day) Value: 14
  misc_feature: MA Experiment 20000173 PARAMETER Experiment Name: At_42deg_Heat_P Parameter: Organism Value: A. thaliana
  misc_feature: MA Experiment 20000173 PARAMETER Experiment Name: At_42deg_Heat_P Parameter: Plant Line Value: WS
  misc_feature: MA Experiment 20000173 PARAMETER Experiment Name: At_42deg_Heat_P Parameter: Temperature (deg C) Value: 42 vs. 22
  misc_feature: MA Experiment 20000173 PARAMETER Experiment Name: At_42deg_Heat_P Parameter: Timepoint (hr) Value: 6
  misc_feature: MA Experiment 20000173 PARAMETER Experiment Name: At_42deg_Heat_P Parameter: Tissue Value: Aerial
  misc_feature: MA Experiment ID: 20000179 Result: Up-regulated in Transcription
  misc_feature: MA Experiment 20000179 PARAMETER Experiment Name: At_Germinating_Seeds_P Parameter: Age (hr) Value: 6 vs. 0
  misc_feature: MA Experiment 20000179 PARAMETER Experiment Name: At_Germinating_Seeds_P Parameter: Tissue Value: Germinating Seeds
  misc_feature: MA Experiment ID: 20000180 Result: Up-regulated in Transcription
  misc_feature: MA Experiment 20000180 PARAMETER Experiment Name: At_Germinating_Seeds_P Parameter: Age (hr) Value: 24 vs. 0
  misc_feature: MA Experiment 20000180 PARAMETER Experiment Name: At_Germinating_Seeds_P Parameter: Tissue Value: Germinating Seeds
  misc_feature: MA Experiment ID: 20000184 Result: Up-regulated in Transcription
  misc_feature: MA Experiment 20000184 PARAMETER Experiment Name: At_Shoots__P Parameter: Age (day) Value: 7
  misc_feature: MA Experiment 20000184 PARAMETER Experiment Name: At_Shoots__P Parameter: Tissue Value: Shoots vs. Whole Plant
  misc_feature: MA Experiment ID: 20000224 Result: Up-regulated in Transcription
  misc_feature: MA Experiment ID: 20000234 Result: Up-regulated in Transcription
  misc_feature: MA Experiment 20000234 PARAMETER Experiment Name: At_Siliques_P Parameter: Age (day) Value: 21
  misc_feature: MA Experiment 20000234 PARAMETER Experiment Name: At_Siliques_P Parameter: Organism Value: A. thaliana
  misc_feature: MA Experiment 20000234 PARAMETER Experiment Name: At_Siliques_P Parameter: Plant Line Value: WS
  misc_feature: MA Experiment 20000234 PARAMETER Experiment Name: At_Siliques_P Parameter: Tissue Value: Less Than 5mm Siliques vs. Whole Plant
  misc_feature: MA Experiment ID: 20000235 Result: Up-regulated in Transcription
  misc_feature: MA Experiment 20000235 PARAMETER Experiment Name: At_Siliques_P Parameter: Age (day) Value: 21
  misc_feature: MA Experiment 20000235 PARAMETER Experiment Name: At_Siliques_P Parameter: Organism Value: A. thaliana
  misc_feature: MA Experiment 20000235 PARAMETER Experiment Name: At_Siliques_P Parameter: Plant Line Value: WS
  misc_feature: MA Experiment 20000235 PARAMETER Experiment Name: At_Siliques_P Parameter: Tissue Value: 5-10mm Siliques vs. Whole Plant
  misc_feature: MA Experiment ID: 20000264 Result: Up-regulated in Transcription
  misc_feature: MA Experiment 20000264 PARAMETER Experiment Name: At_Open_Flower_P Parameter: Age (day) Value: 21
  misc_feature: MA Experiment 20000264 PARAMETER Experiment Name: At_Open_Flower_P Parameter: Plant Line Value: WS
  misc_feature: MA Experiment 20000264 PARAMETER Experiment Name: At_Open_Flower_P Parameter: Tissue Value: Open Flower vs. Whole Plant
  misc_feature: MA Experiment ID: 20000265 Result: Up-regulated in Transcription
  misc_feature: MA Experiment 20000265 PARAMETER Experiment Name: At_Open_Flower_P Parameter: Age (day) Value: 21
  misc_feature: MA Experiment 20000265 PARAMETER Experiment Name: At_Open_Flower_P Parameter: Plant Line Value: WS
  misc_feature: MA Experiment 20000265 PARAMETER Experiment Name: At_Open_Flower_P Parameter: Tissue Value: Closed Flower vs. Whole Plant
  misc_feature: MA Experiment ID: 20000267 Result: Up-regulated in Transcription
  misc_feature: MA Experiment 20000267 PARAMETER Experiment Name: At_Drought_P Parameter: Age (day) Value: 7
  misc_feature: MA Experiment 20000267 PARAMETER Experiment Name: At_Drought_P Parameter: Organism Value: A. thaliana
  misc_feature: MA Experiment 20000267 PARAMETER Experiment Name: At_Drought_P Parameter: Plant Line Value: WS
  misc_feature: MA Experiment 20000267 PARAMETER Experiment Name: At_Drought_P Parameter: Timepoint (hr) Value: 6
  misc_feature: MA Experiment 20000267 PARAMETER Experiment Name: At_Drought_P Parameter: Tissue Value: Whole Plant
  misc_feature: MA Experiment 20000267 PARAMETER Experiment Name: At_Drought_P Parameter: Treatment Value: Drought vs. No Drought
  misc_feature: MA Experiment ID: 20000286 Result: Up-regulated in Transcription
  misc_feature: MA Experiment 20000286 PARAMETER Experiment Name: At_Open_Flower_P Parameter: Age (day) Value: 21
  misc_feature: MA Experiment 20000286 PARAMETER Experiment Name: At_Open_Flower_P Parameter: Plant Line Value: WS
  misc_feature: MA Experiment 20000286 PARAMETER Experiment Name: At_Open_Flower_P Parameter: Tissue Value: Half Open vs. Whole Plant
  misc_feature: MA Experiment ID: 20000436 Result: Up-regulated in Transcription
  misc_feature: MA Experiment 20000436 PARAMETER Experiment Name: At_Drought_P Parameter: Age (day) Value: 7
  misc_feature: MA Experiment 20000436 PARAMETER Experiment Name: At_Drought_P Parameter: Organism Value: A. thaliana
  misc_feature: MA Experiment 20000436 PARAMETER Experiment Name: At_Drought_P Parameter: Plant Line Value: WS
  misc_feature: MA Experiment 20000436 PARAMETER Experiment Name: At_Drought_P Parameter: Timepoint (hr) Value: 12
  misc_feature: MA Experiment 20000436 PARAMETER Experiment Name: At_Drought_P Parameter: Tissue Value: Whole Plant
  misc_feature: MA Experiment 20000436 PARAMETER Experiment Name: At_Drought_P Parameter: Treatment Value: Drought vs. No Drought
  misc_feature: MA Experiment ID: 20000437 Result: Up-regulated in Transcription
  misc_feature: MA Experiment 20000437 PARAMETER Experiment Name: At_Drought_P Parameter: Age (day) Value: 8
  misc_feature: MA Experiment 20000437 PARAMETER Experiment Name: At_Drought_P Parameter: Organism Value: A. thaliana
  misc_feature: MA Experiment 20000437 PARAMETER Experiment Name: At_Drought_P Parameter: Plant Line Value: WS
  misc_feature: MA Experiment 20000437 PARAMETER Experiment Name: At_Drought_P Parameter: Timepoint (hr) Value: 24
  misc_feature: MA Experiment 20000437 PARAMETER Experiment Name: At_Drought_P Parameter: Tissue Value: Whole Plant
  misc_feature: MA Experiment 20000437 PARAMETER Experiment Name: At_Drought_P Parameter: Treatment Value: Drought vs. No Drought
  misc_feature: MA Experiment ID: 20000438 Result: Up-regulated in Transcription
  misc_feature: MA Experiment 20000438 PARAMETER Experiment Name: At_Shoots__P Parameter: Age (day) Value: 14
  misc_feature: MA Experiment 20000438 PARAMETER Experiment Name: At_Shoots__P Parameter: Tissue Value: Shoots vs. Whole Plant
  misc_feature: MA Experiment ID: 20000439 Result: Down-regulated in Transcription
  misc_feature: MA Experiment 20000439 PARAMETER Experiment Name: At_Roots__P Parameter: Age (day) Value: 14 vs. 21
  misc_feature: MA Experiment 20000439 PARAMETER Experiment Name: At_Roots__P Parameter: Organism Value: A. thaliana
  misc_feature: MA Experiment 20000439 PARAMETER Experiment Name: At_Roots__P Parameter: Tissue Value: Roots vs. Whole Plant
  misc_feature: MA Experiment ID: 20000441 Result: Down-regulated in Transcription
  misc_feature: MA Experiment 20000441 PARAMETER Experiment Name: At_1uM_BR-BRZ__P Parameter: Tissue Value: Shoot Apices
  misc_feature: MA Experiment 20000441 PARAMETER Experiment Name: At_1uM_BR-BRZ__P Parameter: Treatment Value: 1uM BR vs. No Treatment
  misc_feature: MA Experiment ID: 20000443 Result: Down-regulated in Transcription
  misc_feature: MA Experiment 20000443 PARAMETER Experiment Name: At_1uM_BR-BRZ__P Parameter: Tissue Value: Shoot Apices
  misc_feature: MA Experiment 20000443 PARAMETER Experiment Name: At_1uM_BR-BRZ__P Parameter: Treatment Value: 1uM BRZ vs. No Treatment
  misc_feature: MA Experiment ID: 20000573 Result: Down-regulated in Transcription
  misc_feature: MA Experiment 20000573 PARAMETER Experiment Name: At_100uM_ABA_Mutants__P Parameter: Organism Value: A. thaliana
  misc_feature: MA Experiment 20000573 PARAMETER Experiment Name: At_100uM_ABA_Mutants__P Parameter: Plant Line Value: CS22 vs. Ler wt
  misc_feature: MA Experiment 20000573 PARAMETER Experiment Name: At_100uM_ABA_Mutants__P Parameter: Timepoint (hr) Value: N/A
  misc_feature: MA Experiment 20000573 PARAMETER Experiment Name: At_100uM_ABA_Mutants__P Parameter: Tissue Value: Whole Plant
  misc_feature: MA Experiment 20000573 PARAMETER Experiment Name: At_100uM_ABA_Mutants__P Parameter: Treatment Value: None
  misc_feature: MA Experiment ID: 20000574 Result: Down-regulated in Transcription
  misc_feature: MA Experiment 20000574 PARAMETER Experiment Name: At_100uM_ABA_Mutants__P Parameter: Organism Value: A. thaliana
  misc_feature: MA Experiment 20000574 PARAMETER Experiment Name: At_100uM_ABA_Mutants__P Parameter: Plant Line Value: CS23 vs. Ler wt
  misc_feature: MA Experiment 20000574 PARAMETER Experiment Name: At_100uM_ABA_Mutants__P Parameter: Timepoint (hr) Value: N/A
  misc_feature: MA Experiment 20000574 PARAMETER Experiment Name: At_100uM_ABA_Mutants__P Parameter: Tissue Value: Whole Plant
  misc_feature: MA Experiment 20000574 PARAMETER Experiment Name: At_100uM_ABA_Mutants__P Parameter: Treatment Value: None
  misc_feature: MA Experiment ID: 20000794 Result: Up-regulated in Transcription
  misc_feature: MA Experiment 20000794 PARAMETER Experiment Name: At_Petals_P Parameter: Age (day) Value: 23-25 days
  misc_feature: MA Experiment 20000794 PARAMETER Experiment Name: At_Petals_P Parameter: Plant Line Value: WS
  misc_feature: MA Experiment 20000794 PARAMETER Experiment Name: At_Petals_P Parameter: Tissue Value: Petals vs. Whole plant
  misc_feature: MA Experiment ID: 20001248 Result: Down-regulated in Transcription
  misc_feature: MA Experiment 20001248 PARAMETER Experiment Name: At_Far-red-induction_P Parameter: Age (day) Value: 7
  misc_feature: MA Experiment 20001248 PARAMETER Experiment Name: At_Far-red-induction_P Parameter: Light Value: Far-red vs. White
  misc_feature: MA Experiment 20001248 PARAMETER Experiment Name: At_Far-red-induction_P Parameter: Organism Value: A. thaliana
  misc_feature: MA Experiment 20001248 PARAMETER Experiment Name: At_Far-red-induction_P Parameter: Plant Line Value: Columbia
  misc_feature: MA Experiment 20001248 PARAMETER Experiment Name: At_Far-red-induction_P Parameter: Timepoint (hr) Value: 4
  misc_feature: MA Experiment 20001248 PARAMETER Experiment Name: At_Far-red-induction_P Parameter: Tissue Value: Whole Plant
  misc_feature: MA Experiment ID: 20001450 Result: Down-regulated in Transcription
  misc_feature: MA Experiment 20001450 PARAMETER Experiment Name: At_Far-red-induction_P Parameter: Age (day) Value: 7
  misc_feature: MA Experiment 20001450 PARAMETER Experiment Name: At_Far-red-induction_P Parameter: Light Value: Far-red vs. White
  misc_feature: MA Experiment 20001450 PARAMETER Experiment Name: At_Far-red-induction_P Parameter: Organism Value: A. thaliana
  misc_feature: MA Experiment 20001450 PARAMETER Experiment Name: At_Far-red-induction_P Parameter: Plant Line Value: Columbia
  misc_feature: MA Experiment 20001450 PARAMETER Experiment Name: At_Far-red-induction_P Parameter: Timepoint (hr) Value: 8
  misc_feature: MA Experiment 20001450 PARAMETER Experiment Name: At_Far-red-induction_P Parameter: Tissue Value: Whole Plant
  misc_feature: MA Experiment ID: 20001457 Result: Up-regulated in Transcription
  misc_feature: MA Experiment 20001457 PARAMETER Experiment Name: At_50mM_NH4NO3_L-to-H_P Parameter: Age (day) Value: Undefined
  misc_feature: MA Experiment 20001457 PARAMETER Experiment Name: At_50mM_NH4NO3_L-to-H_P Parameter: Organism Value: Undefined
  misc_feature: MA Experiment 20001457 PARAMETER Experiment Name: At_50mM_NH4NO3_L-to-H_P Parameter: Plant Line Value: Undefined
  misc_feature: MA Experiment 20001457 PARAMETER Experiment Name: At_50mM_NH4NO3_L-to-H_P Parameter: Timepoint (hr) Value: 0.5
  misc_feature: MA Experiment 20001457 PARAMETER Experiment Name: At_50mM_NH4NO3_L-to-H_P Parameter: Tissue Value: Siliques
  misc_feature: MA Experiment 20001457 PARAMETER Experiment Name: At_50mM_NH4NO3_L-to-H_P Parameter: Treatment Value: 50mM NH4NO3 vs. 100mM Manitol
  misc_feature: MA Experiment ID: 20001558 Result: Up-regulated in Transcription
  misc_feature: MA Experiment 20001558 PARAMETER Experiment Name: At_Drought_Soil_Dry_P Parameter: Age (day) Value: 27
  misc_feature: MA Experiment 20001558 PARAMETER Experiment Name: At_Drought_Soil_Dry_P Parameter: Organism Value: A. thaliana
  misc_feature: MA Experiment 20001558 PARAMETER Experiment Name: At_Drought_Soil_Dry_P Parameter: Plant Line Value: WS
  misc_feature: MA Experiment 20001558 PARAMETER Experiment Name: At_Drought_Soil_Dry_P Parameter: Post Timepoint (hr) Value: 6
  misc_feature: MA Experiment 20001558 PARAMETER Experiment Name: At_Drought_Soil_Dry_P Parameter: Post-Treatment Value: Re-Water vs. No Drought
  misc_feature: MA Experiment 20001558 PARAMETER Experiment Name: At_Drought_Soil_Dry_P Parameter: Timepoint (day) Value: 13
  misc_feature: MA Experiment 20001558 PARAMETER Experiment Name: At_Drought_Soil_Dry_P Parameter: Treatment Value: Drought vs. No Drought
  misc_feature: MA Experiment ID: 20001904 Result: Up-regulated in Transcription
  misc_feature: MA Experiment 20001904 PARAMETER Experiment Name: At_Drought_Reproduction_P Parameter: Age (day) Value: 37
  misc_feature: MA Experiment 20001904 PARAMETER Experiment Name: At_Drought_Reproduction_P Parameter: Organism Value: A. thaliana
  misc_feature: MA Experiment 20001904 PARAMETER Experiment Name: At_Drought_Reproduction_P Parameter: Plant Line Value: WS
  misc_feature: MA Experiment 20001904 PARAMETER Experiment Name: At_Drought_Reproduction_P Parameter: Timepoint (day) Value: 7
  misc_feature: MA Experiment 20001904 PARAMETER Experiment Name: At_Drought_Reproduction_P Parameter: Tissue Value: Rosettes
  misc_feature: MA Experiment 20001904 PARAMETER Experiment Name: At_Drought_Reproduction_P Parameter: Treatment Value: Drought vs. No Drought
  misc_feature: MA Experiment ID: 20001906 Result: Down-regulated in Transcription
  misc_feature: MA Experiment 20001906 PARAMETER Experiment Name: At_Drought_Reproduction_P Parameter: Age (day) Value: 35
  misc_feature: MA Experiment 20001906 PARAMETER Experiment Name: At_Drought_Reproduction_P Parameter: Organism Value: A. thaliana
  misc_feature: MA Experiment 20001906 PARAMETER Experiment Name: At_Drought_Reproduction_P Parameter: Plant Line Value: WS
  misc_feature: MA Experiment 20001906 PARAMETER Experiment Name: At_Drought_Reproduction_P Parameter: Timepoint (day) Value: 5
  misc_feature: MA Experiment 20001906 PARAMETER Experiment Name: At_Drought_Reproduction_P Parameter: Tissue Value: Siliques
  misc_feature: MA Experiment 20001906 PARAMETER Experiment Name: At_Drought_Reproduction_P Parameter: Treatment Value: Drought vs. No Drought
atatgacatttacattctctcaaaagaaactttctacataatataaaaagtcacacattctctctattaattaaacatgttgcttgttgcgtttgtgactcttttggtagcagtagctttgcagccactaccgtcagtgttgtctttggacgttcaccttcttcggcagctagccgcaaagcacaatgtgacatcgatacttgtgtttggagattctagtgtcgatccagggaacaataatttcattaaaaccgaaatgaaagggaattttccaccttatggtgaaaatttcatcaaccataaacccaccggtagattatgcgatggattactcgctcccgattatattgcggaggccatgggttaccctcccataccggcttttcttgatccatccctaacccaagctgatctaactcgcggtgcaagttttgcctctgctggttctggctatgacgatctcacagctaatatatcaaacgtatggagtttcactacacaagccaattactttctacattacaagattcatctgactaaattggtcggtccattagagagcgctaaaatgataaataatgctatatttcttatgagtatgggatcaaatgactttcttcaaaattacttagtcgattttactcgacaaaagcaattcacggttgagcaatacatcgagtttctctcccaccgtatgctttacgacgccaagatgttgcataggcttggagctaaaaggttggtggtagtgggagttcctcccatgggatgcatgcctttaattaaatacctacgaggccaaaaaacttgtgtagatcaactaaaccaaatcgctttctcctttaacgccaaaatcatcaaaaatctagagcttcttcagtctaaaatcggtttgaaaaccatctacgttgatgcttattcgaccatccaagaagccattaaaaatccgagaaaatttggtttcgtcgaggcttcgctaggctgttgtggaacaggtacatacgaatatggagagacatgcaaagatatgcaagtatgcaaagatcctaccaaatacgttttttgggacgctgtccatccaacacaaagaatgtatcaaatcattgttaagaaggcaatcgcatccatcagtgaagagtttcttgtttagaaatattatatgtttgtattttactatcatgatttatgaaaaattctagatgtaattgaaaagcattcaaaatgttaaatttaatggttcaaatc

SEQ ID NO: 99945 - protein, 357 aa, Arabidopsis thaliana
  peptide (1)..(357): Ceres Seq. ID no. 13603980
  misc_feature (41)..(347): Pfam Name: GDSL-like Lipase/Acylhydrolase Pfam Description: GDSL-like Lipase/Acylhydrolase
  misc_feature (1)..(357): Homolog of NCBI NO: 15237350 NR Description: GDSL-motif lipase/hydrolase protein [Arabidopsis
  misc_feature (35)..(340): Homolog of NCBI NO: 15237351 NR Description: GDSL-motif lipase/hydrolase protein [Arabidopsis
  misc_feature (35)..(340): Homolog of NCBI NO: 21536954 NR Description: GDSL-motif lipase/hydrolase-like protein
  misc_feature (38)..(356): Homolog of NCBI NO: 21593518 NR Description: putative GDSL-motif lipase/hydrolase [Arabidopsis
  misc_feature (38)..(356): Homolog of NCBI NO: 15228157 NR Description: GDSL-motif lipase/hydrolase protein [Arabidopsis
  misc_feature (31)..(355): Homolog of NCBI NO: 15228189 NR Description: GDSL-motif lipase/hydrolase protein [Arabidopsis
  misc_feature (42)..(355): Homolog of NCBI NO: 2062167 NR Description: Proline-rich protein APG isolog [Arabidopsis
  misc_feature (39)..(352): Homolog of NCBI NO: 34907922 NR Description: putative GDSL-motif lipase/hydrolase [Oryza
  misc_feature (36)..(348): Homolog of NCBI NO: 18394825 NR Description: lipase, putative [Arabidopsis thaliana]
  misc_feature (40)..(351): Homolog of NCBI NO: 18390708 NR Description: GDSL-motif lipase/hydrolase protein [Arabidopsis
MLLVAFVTLLVAVALQPLPSVLSLDVHLLRQLAAKHNVTSILVFGDSSVDPGNNNFIKTEMKGNFPPYGENFINHKPTGRLCDGLLAPDYIAEAMGYPPIPAFLDPSLTQADLTRGASFASAGSGYDDLTANISNVWSFTTQANYFLHYKIHLTKLVGPLESAKMINNAIFLMSMGSNDFLQNYLVDFTRQKQFTVEQYIEFLSHRMLYDAKMLHRLGAKRLVVVGVPPMGCMPLIKYLRGQKTCVDQLNQIAFSFNAKIIKNLELLQSKIGLKTIYVDAYSTIQEAIKNPRKFGFVEASLGCCGTGTYEYGETCKDMQVCKDPTKYVFWDAVHPTQRMYQIIVKKAIASISEEFLV

SEQ ID NO: 99946 - protein, 297 aa, Arabidopsis thaliana; identical to SEQ ID NO: 34920
  peptide (1)..(297): Ceres Seq. ID no. 13603981
  misc_feature (1)..(287): Pfam Name: GDSL-like Lipase/Acylhydrolase Pfam Description: GDSL-like Lipase/Acylhydrolase
  misc_feature (1)..(297): Homolog of NCBI NO: 15237350 NR Description: GDSL-motif lipase/hydrolase protein [Arabidopsis
  misc_feature (1)..(280): Homolog of NCBI NO: 15237351 NR Description: GDSL-motif lipase/hydrolase protein [Arabidopsis
  misc_feature (1)..(280): Homolog of NCBI NO: 21536954 NR Description: GDSL-motif lipase/hydrolase-like protein
  misc_feature (1)..(296): Homolog of NCBI NO: 21593518 NR Description: putative GDSL-motif lipase/hydrolase [Arabidopsis
  misc_feature (1)..(296): Homolog of NCBI NO: 15228157 NR Description: GDSL-motif lipase/hydrolase protein [Arabidopsis
  misc_feature (1)..(295): Homolog of NCBI NO: 15228189 NR Description: GDSL-motif lipase/hydrolase protein [Arabidopsis
  misc_feature (1)..(295): Homolog of NCBI NO: 2062167 NR Description: Proline-rich protein APG isolog [Arabidopsis
  misc_feature (1)..(292): Homolog of NCBI NO: 34907922 NR Description: putative GDSL-motif lipase/hydrolase [Oryza
  misc_feature (1)..(288): Homolog of NCBI NO: 18394825 NR Description: lipase, putative [Arabidopsis thaliana]
  misc_feature (1)..(291): Homolog of NCBI NO: 18390708 NR Description: GDSL-motif lipase/hydrolase protein [Arabidopsis

SEQ ID NO: 99947 - protein, 263 aa, Arabidopsis thaliana; identical to SEQ ID NO: 34921
  peptide (1)..(263): Ceres Seq. ID no. 13603982
  misc_feature (1)..(253): Pfam Name: GDSL-like Lipase/Acylhydrolase Pfam Description: GDSL-like Lipase/Acylhydrolase
  misc_feature (1)..(263): Homolog of NCBI NO: 15237350 NR Description: GDSL-motif lipase/hydrolase protein [Arabidopsis
  misc_feature (1)..(246): Homolog of NCBI NO: 15237351 NR Description: GDSL-motif lipase/hydrolase protein [Arabidopsis
  misc_feature (1)..(246): Homolog of NCBI NO: 21536954 NR Description: GDSL-motif lipase/hydrolase-like protein
  misc_feature (1)..(262): Homolog of NCBI NO: 21593518 NR Description: putative GDSL-motif lipase/hydrolase [Arabidopsis
  misc_feature (1)..(262): Homolog of NCBI NO: 15228157 NR Description: GDSL-motif lipase/hydrolase protein [Arabidopsis
  misc_feature (1)..(261): Homolog of NCBI NO: 15228189 NR Description: GDSL-motif lipase/hydrolase protein [Arabidopsis
  misc_feature (1)..(261): Homolog of NCBI NO: 2062167 NR Description: Proline-rich protein APG isolog [Arabidopsis
  misc_feature (1)..(258): Homolog of NCBI NO: 34907922 NR Description: putative GDSL-motif lipase/hydrolase [Oryza
  misc_feature (1)..(254): Homolog of NCBI NO: 18394825 NR Description: lipase, putative [Arabidopsis thaliana]
  misc_feature (1)..(257): Homolog of NCBI NO: 18390708 NR Description: GDSL-motif lipase/hydrolase protein [Arabidopsis

SEQ ID NO: 99948 - DNA, 1318 bp, Arabidopsis thaliana
  misc_feature (1)..(1318): Ceres Seq. ID no. 13603983
  misc_feature: MA Experiment ID: 108462 Result: Up-regulated in Transcription
  misc_feature: MA Experiment 108462 PARAMETER Experiment Name: At_Germinating_Seeds_cDNA_P Parameter: Age (day) Value: 2 vs. 0
  misc_feature: MA Experiment 108462 PARAMETER Experiment Name: At_Germinating_Seeds_cDNA_P Parameter: Tissue Value: Germinating Seeds
  misc_feature: MA Experiment ID: 108463 Result: Up-regulated in Transcription
  misc_feature: MA Experiment 108463 PARAMETER Experiment Name: At_Germinating_Seeds_cDNA_P Parameter: Age (day) Value: 3 vs. 0
  misc_feature: MA Experiment 108463 PARAMETER Experiment Name: At_Germinating_Seeds_cDNA_P Parameter: Tissue Value: Germinating Seeds
  misc_feature: MA Experiment ID: 108464 Result: Up-regulated in Transcription
  misc_feature: MA Experiment 108464 PARAMETER Experiment Name: At_Germinating_Seeds_cDNA_P Parameter: Age (day) Value: 4 vs. 0
  misc_feature: MA Experiment 108464 PARAMETER Experiment Name: At_Germinating_Seeds_cDNA_P Parameter: Tissue Value: Germinating Seeds
  misc_feature: MA Experiment ID: 108473 Result: Down-regulated in Transcription
  misc_feature: MA Experiment 108473 PARAMETER Experiment Name: At_Drought_Flowers_cDNA_P Parameter: Timepoint (hr) Value: 7 d
  misc_feature: MA Experiment 108473 PARAMETER Experiment Name: At_Drought_Flowers_cDNA_P Parameter: Tissue Value: Flower
  misc_feature: MA Experiment 108473 PARAMETER Experiment Name: At_Drought_Flowers_cDNA_P Parameter: Treatment Value: Drought vs. No Drought
  misc_feature: MA Experiment ID: 20000117 Result: Down-regulated in Transcription
  misc_feature: MA Experiment 20000117 PARAMETER Experiment Name: At_100uM_ABA_Mutants_cDNA_P Parameter: Plant Line Value: Columbia
  misc_feature: MA Experiment 20000117 PARAMETER Experiment Name: At_100uM_ABA_Mutants_cDNA_P Parameter: Timepoint (hr) Value: 6
  misc_feature: MA Experiment 20000117 PARAMETER Experiment Name: At_100uM_ABA_Mutants_cDNA_P Parameter: Tissue Value: Aerial
  misc_feature: MA Experiment 20000117 PARAMETER Experiment Name: At_100uM_ABA_Mutants_cDNA_P Parameter: Treatment Value: 100uM ABA vs. No Treatment
  misc_feature: MA Experiment ID: 20000144 Result: Down-regulated in Transcription
  misc_feature: MA Experiment 20000144 PARAMETER Experiment Name: At_42deg_Heat_cDNA_P Parameter: Temperature (deg C) Value: 42 vs. 22
  misc_feature: MA Experiment 20000144 PARAMETER Experiment Name: At_42deg_Heat_cDNA_P Parameter: Timepoint (hr) Value: 1
  misc_feature: MA Experiment 20000144 PARAMETER Experiment Name: At_42deg_Heat_cDNA_P Parameter: Tissue Value: Aerial
  misc_feature: MA Experiment ID: 20000185 Result: Down-regulated in Transcription
  misc_feature: MA Experiment 20000185 PARAMETER Experiment Name: At_Roots__P Parameter: Age (day) Value: 7 vs. 21
  misc_feature: MA Experiment 20000185 PARAMETER Experiment Name: At_Roots__P Parameter: Organism Value: A. thaliana
  misc_feature: MA Experiment 20000185 PARAMETER Experiment Name: At_Roots__P Parameter: Tissue Value: Roots vs. Whole Plant
  misc_feature: MA Experiment ID: 20000235 Result: Down-regulated in Transcription
  misc_feature: MA Experiment 20000235 PARAMETER Experiment Name: At_Siliques_P Parameter: Age (day) Value: 21
  misc_feature: MA Experiment 20000235 PARAMETER Experiment Name: At_Siliques_P Parameter: Organism Value: A. thaliana
  misc_feature: MA Experiment 20000235 PARAMETER Experiment Name: At_Siliques_P Parameter: Plant Line Value: WS
  misc_feature: MA Experiment 20000235 PARAMETER Experiment Name: At_Siliques_P Parameter: Tissue Value: 5-10mm Siliques vs. Whole Plant
  misc_feature: MA Experiment ID: 20000264 Result: Up-regulated in Transcription
  misc_feature: MA Experiment 20000264 PARAMETER Experiment Name: At_Open_Flower_P Parameter: Age (day) Value: 21
  misc_feature: MA Experiment 20000264 PARAMETER Experiment Name: At_Open_Flower_P Parameter: Plant Line Value: WS
  misc_feature: MA Experiment 20000264 PARAMETER Experiment Name: At_Open_Flower_P Parameter: Tissue Value: Open Flower vs. Whole Plant
  misc_feature: MA Experiment ID: 20000265 Result: Up-regulated in Transcription
  misc_feature: MA Experiment 20000265 PARAMETER Experiment Name: At_Open_Flower_P Parameter: Age (day) Value: 21
  misc_feature: MA Experiment 20000265 PARAMETER Experiment Name: At_Open_Flower_P Parameter: Plant Line Value: WS
  misc_feature: MA Experiment 20000265 PARAMETER Experiment Name: At_Open_Flower_P Parameter: Tissue Value: Closed Flower vs. Whole Plant
  misc_feature: MA Experiment ID: 20000286 Result: Up-regulated in Transcription
  misc_feature: MA Experiment 20000286 PARAMETER Experiment Name: At_Open_Flower_P Parameter: Age (day) Value: 21
  misc_feature: MA Experiment 20000286 PARAMETER Experiment Name: At_Open_Flower_P Parameter: Plant Line Value: WS
  misc_feature: MA Experiment 20000286 PARAMETER Experiment Name: At_Open_Flower_P Parameter: Tissue Value: Half Open vs. Whole Plant
  misc_feature: MA Experiment ID: 20000437 Result: Down-regulated in Transcription
  misc_feature: MA Experiment 20000437 PARAMETER Experiment Name: At_Drought_P Parameter: Age (day) Value: 8
  misc_feature: MA Experiment 20000437 PARAMETER Experiment Name: At_Drought_P Parameter: Organism Value: A. thaliana
  misc_feature: MA Experiment 20000437 PARAMETER Experiment Name: At_Drought_P Parameter: Plant Line Value: WS
  misc_feature: MA Experiment 20000437 PARAMETER Experiment Name: At_Drought_P Parameter: Timepoint (hr) Value: 24
  misc_feature: MA Experiment 20000437 PARAMETER Experiment Name: At_Drought_P Parameter: Tissue Value: Whole Plant
  misc_feature: MA Experiment 20000437 PARAMETER Experiment Name: At_Drought_P Parameter: Treatment Value: Drought vs. No Drought
  misc_feature: MA Experiment ID: 20000439 Result: Down-regulated in Transcription
  misc_feature: MA Experiment 20000439 PARAMETER Experiment Name: At_Roots__P Parameter: Age (day) Value: 14 vs. 21
  misc_feature: MA Experiment 20000439 PARAMETER Experiment Name: At_Roots__P Parameter: Organism Value: A. thaliana
  misc_feature: MA Experiment 20000439 PARAMETER Experiment Name: At_Roots__P Parameter: Tissue Value: Roots vs. Whole Plant
  misc_feature: MA Experiment ID: 20001560 Result: Up-regulated in Transcription
  misc_feature: MA Experiment 20001560 PARAMETER Experiment Name: At_Drought_Soil_Dry_P Parameter: Age (day) Value: 28
  misc_feature: MA Experiment 20001560 PARAMETER Experiment Name: At_Drought_Soil_Dry_P Parameter: Organism Value: A. thaliana
  misc_feature: MA Experiment 20001560 PARAMETER Experiment Name: At_Drought_Soil_Dry_P Parameter: Plant Line Value: WS
  misc_feature: MA Experiment 20001560 PARAMETER Experiment Name: At_Drought_Soil_Dry_P Parameter: Post Timepoint (hr) Value: None
  misc_feature: MA Experiment 20001560 PARAMETER Experiment Name: At_Drought_Soil_Dry_P Parameter: Post-Treatment Value: None
  misc_feature: MA Experiment 20001560 PARAMETER Experiment Name: At_Drought_Soil_Dry_P Parameter: Timepoint (day) Value: 14
  misc_feature: MA Experiment 20001560 PARAMETER Experiment Name: At_Drought_Soil_Dry_P Parameter: Treatment Value: Drought vs. No Drought
  misc_feature: MA Experiment ID: 20001910 Result: Down-regulated in Transcription
  misc_feature: MA Experiment 20001910 PARAMETER Experiment Name: At_Drought_Reproduction_P Parameter: Age (day) Value: 37
  misc_feature: MA Experiment 20001910 PARAMETER Experiment Name: At_Drought_Reproduction_P Parameter: Organism Value: A. thaliana
  misc_feature: MA Experiment 20001910 PARAMETER Experiment Name: At_Drought_Reproduction_P Parameter: Plant Line Value: WS
  misc_feature: MA Experiment 20001910 PARAMETER Experiment Name: At_Drought_Reproduction_P Parameter: Timepoint (day) Value: 7
  misc_feature: MA Experiment 20001910 PARAMETER Experiment Name: At_Drought_Reproduction_P Parameter: Tissue Value: Flowers
  misc_feature: MA Experiment 20001910 PARAMETER Experiment Name: At_Drought_Reproduction_P Parameter: Treatment Value: Drought vs. No Drought
cagactactcatttgtctccactccaaactttcacaacaatgagaagtcatcacagacatttttcttcatatgtttccttcatcctcttcctattcctgttcttcatctccttctcatcctcaacatcaaaactcgaacccgcaaagtctgaacctaaaagaaaacattcagtttcagctattctcgtgttcggagattcaacagtggatccgggcaataacaactacattgacacagtattcaagtgtaattttccgccctatggactcgatttcagaaacaaaactccgaccggtagattttgcaacggtcgactcgtcacagattttatcgcttcatacattggtgtgaaggagaatgtgccaccgtatttggacccaaatcttggaataaatgagttaataagtggagttagctttgcttcagctggctctggatatgatcctctcactccaaccataactaacgtgatagacattccgactcagctagagtatttcagagaatacaagagaaaattggagggtaaaatgggaaaacaagaaatggaaaaacacatagaagaagctatgttttgtgtaagtgcaggaaccaacgatttcgtcattaattatttcacaattcccatacgaaggaagacttttactatcgaagcttatcaacaattcgttatttccaatctcaagcaatttatccagggtttgtggaaagaaggagcaagaaagataacagtggcaggtttaccaccgattgggtgtttgccgattgttataacattattctccggcgaagcattgaccaaccgtcgttgcattgaccgtttctccactgtggccacaaactacaatttcctcttacaaaaacaattggccctcatgcaagtgggtttggcccatcttggatccaaaatcttttacctcgacgtctataacccagtttatgaggtcattcgtgaccctcgaaaattcgggttcgaggaagtcttcagtggatgttgtggaagtggatacctagaggcatcgtttttgtgtaatccaaagtcatatgtgtgtcccaatacatctgcttatgtcttctttgactctatccatccaagtgagaagacttacttcagtctttttagatctctccgaccaatttatgattctattctcggttctttctgaaatttttaattaatattatgatcactattagctaattgataagttaatttcaatttacatacacctctttcttccattatgagtgacgaaatgtaatgttggtctatgtgttaatatttcagtttgaaatgcaaaataattagtgtacttg

SEQ ID NO: 99949 - protein, 388 aa, Arabidopsis thaliana
  peptide (1)..(388): Ceres Seq. ID no. 13603984
  misc_feature (61)..(377): Pfam Name: GDSL-like Lipase/Acylhydrolase Pfam Description: GDSL-like Lipase/Acylhydrolase
  misc_feature (14)..(388): Homolog of NCBI NO: 15237351 NR Description: GDSL-motif lipase/hydrolase protein [Arabidopsis
  misc_feature (14)..(388): Homolog of NCBI NO: 21536954 NR Description: GDSL-motif lipase/hydrolase-like protein
  misc_feature (60)..(377): Homolog of NCBI NO: 18390708 NR Description: GDSL-motif lipase/hydrolase protein [Arabidopsis
  misc_feature (60)..(377): Homolog of NCBI NO: 25336267 NR Description: hypothetical protein [imported] - Arabidopsis
  misc_feature (22)..(370): Homolog of NCBI NO: 15217963 NR Description: GDSL-motif lipase/hydrolase protein [Arabidopsis
  misc_feature (60)..(377): Homolog of NCBI NO: 21554186 NR Description: Contains similarity to proline-rich protein APG
  misc_feature (22)..(370): Homolog of NCBI NO: 25336283 NR Description: hypothetical protein RXF26 [imported] -
  misc_feature (22)..(370): Homolog of NCBI NO: 21592974 NR Description: proline-rich protein, putative [Arabidopsis
  misc_feature (41)..(388): Homolog of NCBI NO: 15225096 NR Description: GDSL-motif lipase/hydrolase protein [Arabidopsis
  misc_feature (41)..(388): Homolog of NCBI NO: 21537117 NR Description: putative GDSL-motif lipase/hydrolase [Arabidopsis
QTTHLSPLQTFTTMRSHHRHFSSYVSFILFLFLFFISFSSSTSKLEPAKSEPKRKHSVSAILVFGDSTVDPGNNNYIDTVFKCNFPPYGLDFRNKTPTGRFCNGRLVTDFIASYIGVKENVPPYLDPNLGINELISGVSFASAGSGYDPLTPTITNVIDIPTQLEYFREYKRKLEGKMGKQEMEKHIEEAMFCVSAGTNDFVINYFTIPIRRKTFTIEAYQQFVISNLKQFIQGLWKEGARKITVAGLPPIGCLPIVITLFSGEALTNRRCIDRFSTVATNYNFLLQKQLALMQVGLAHLGSKIFYLDVYNPVYEVIRDPRKFGFEEVFSGCCGSGYLEASFLCNPKSYVCPNTSAYVFFDSIHPSEKTYFSLFRSLRPIYDSILGSF

SEQ ID NO: 99950 - protein, 375 aa, Arabidopsis thaliana
  peptide (1)..(375): Ceres Seq. ID no. 13603985
  misc_feature (48)..(364): Pfam Name: GDSL-like Lipase/Acylhydrolase Pfam Description: GDSL-like Lipase/Acylhydrolase
  misc_feature (1)..(375): Homolog of NCBI NO: 15237351 NR Description: GDSL-motif lipase/hydrolase protein [Arabidopsis
  misc_feature (1)..(375): Homolog of NCBI NO: 21536954 NR Description: GDSL-motif lipase/hydrolase-like protein
  misc_feature (47)..(364): Homolog of NCBI NO: 18390708 NR Description: GDSL-motif lipase/hydrolase protein [Arabidopsis
  misc_feature (47)..(364): Homolog of NCBI NO: 25336267 NR Description: hypothetical protein [imported] - Arabidopsis
  misc_feature (9)..(357): Homolog of NCBI NO: 15217963 NR Description: GDSL-motif lipase/hydrolase protein [Arabidopsis
  misc_feature (47)..(364): Homolog of NCBI NO: 21554186 NR Description: Contains similarity to proline-rich protein APG
  misc_feature (9)..(357): Homolog of NCBI NO: 25336283 NR Description: hypothetical protein RXF26 [imported] -
  misc_feature (9)..(357): Homolog of NCBI NO: 21592974 NR Description: proline-rich protein, putative [Arabidopsis
  misc_feature (28)..(375): Homolog of NCBI NO: 15225096 NR Description: GDSL-motif lipase/hydrolase protein [Arabidopsis
  misc_feature (28)..(375): Homolog of NCBI NO: 21537117 NR Description: putative GDSL-motif lipase/hydrolase [Arabidopsis
MRSHHRHFSSYVSFILFLFLFFISFSSSTSKLEPAKSEPKRKHSVSAILVFGDSTVDPGNNNYIDTVFKCNFPPYGLDFRNKTPTGRFCNGRLVTDFIASYIGVKENVPPYLDPNLGINELISGVSFASAGSGYDPLTPTITNVIDIPTQLEYFREYKRKLEGKMGKQEMEKHIEEAMFCVSAGTNDFVINYFTIPIRRKTFTIEAYQQFVISNLKQFIQGLWKEGARKITVAGLPPIGCLPIVITLFSGEALTNRRCIDRFSTVATNYNFLLQKQLALMQVGLAHLGSKIFYLDVYNPVYEVIRDPRKFGFEEVFSGCCGSGYLEASFLCNPKSYVCPNTSAYVFFDSIHPSEKTYFSLFRSLRPIYDSILGSF

SEQ ID NO: 99951 - protein, 211 aa, Arabidopsis thaliana
  peptide (1)..(211): Ceres Seq. ID no. 13603986
  misc_feature (1)..(200): Pfam Name: GDSL-like Lipase/Acylhydrolase Pfam Description: GDSL-like Lipase/Acylhydrolase
  misc_feature (1)..(211): Homolog of NCBI NO: 15237351 NR Description: GDSL-motif lipase/hydrolase protein [Arabidopsis
  misc_feature (1)..(211): Homolog of NCBI NO: 21536954 NR Description: GDSL-motif lipase/hydrolase-like protein
  misc_feature (1)..(200): Homolog of NCBI NO: 18390708 NR Description: GDSL-motif lipase/hydrolase protein [Arabidopsis
  misc_feature (1)..(200): Homolog of NCBI NO: 25336267 NR Description: hypothetical protein [imported] - Arabidopsis
  misc_feature (1)..(193): Homolog of NCBI NO: 15217963 NR Description: GDSL-motif lipase/hydrolase protein [Arabidopsis
  misc_feature (1)..(200): Homolog of NCBI NO: 21554186 NR Description: Contains similarity to proline-rich protein APG
  misc_feature (1)..(193): Homolog of NCBI NO: 25336283 NR Description: hypothetical protein RXF26 [imported] -
  misc_feature (1)..(193): Homolog of NCBI NO: 21592974 NR Description: proline-rich protein, putative [Arabidopsis
  misc_feature (1)..(211): Homolog of NCBI NO: 15225096 NR Description: GDSL-motif lipase/hydrolase protein [Arabidopsis
  misc_feature (1)..(211): Homolog of NCBI NO: 21537117 NR Description: putative GDSL-motif lipase/hydrolase [Arabidopsis
MGKQEMEKHIEEAMFCVSAGTNDFVINYFTIPIRRKTFTIEAYQQFVISNLKQFIQGLWKEGARKITVAGLPPIGCLPIVITLFSGEALTNRRCIDRFSTVATNYNFLLQKQLALMQVGLAHLGSKIFYLDVYNPVYEVIRDPRKFGFEEVFSGCCGSGYLEASFLCNPKSYVCPNTSAYVFFDSIHPSEKTYFSLFRSLRPIYDSILGSF

SEQ ID NO: 99952 - DNA, 889 bp, Arabidopsis thaliana
  misc_feature (1)..(889): Ceres Seq. ID no. 13603987
  misc_feature: MA Experiment ID: 108434 Result: Up-regulated in Transcription
  misc_feature: MA Experiment 108434 PARAMETER Experiment Name: At_Root_Tips_cDNA_P Parameter: Tissue Value: Root Tips
  misc_feature: MA Experiment ID: 108462 Result: Down-regulated in Transcription
  misc_feature: MA Experiment 108462 PARAMETER Experiment Name: At_Germinating_Seeds_cDNA_P Parameter: Age (day) Value: 2 vs. 0
  misc_feature: MA Experiment 108462 PARAMETER Experiment Name: At_Germinating_Seeds_cDNA_P Parameter: Tissue Value: Germinating Seeds
  misc_feature: MA Experiment ID: 108463 Result: Down-regulated in Transcription
  misc_feature: MA Experiment 108463 PARAMETER Experiment Name: At_Germinating_Seeds_cDNA_P Parameter: Age (day) Value: 3 vs. 0
  misc_feature: MA Experiment 108463 PARAMETER Experiment Name: At_Germinating_Seeds_cDNA_P Parameter: Tissue Value: Germinating Seeds
  misc_feature: MA Experiment ID: 108464 Result: Down-regulated in Transcription
  misc_feature: MA Experiment 108464 PARAMETER Experiment Name: At_Germinating_Seeds_cDNA_P Parameter: Age (day) Value: 4 vs. 0
  misc_feature: MA Experiment 108464 PARAMETER Experiment Name: At_Germinating_Seeds_cDNA_P Parameter: Tissue Value: Germinating Seeds
  misc_feature: MA Experiment ID: 20000184 Result: Down-regulated in Transcription
  misc_feature: MA Experiment 20000184 PARAMETER Experiment Name: At_Shoots__P Parameter: Age (day) Value: 7
  misc_feature: MA Experiment 20000184 PARAMETER Experiment Name: At_Shoots__P Parameter: Tissue Value: Shoots vs. Whole Plant
  misc_feature: MA Experiment ID: 20000224 Result: Up-regulated in Transcription
agggttttcgtctctttcactcgtaaccggaagagaggacaagatcctccactaatttcacaaaaagctcatctttttattcgttttcgaatcgattcgttatctgggttcaagtatcaaattctctggtttcgtttttcgtttttgatttgttctctctctttcggaaaaagtttggttttttttttgtttgaaacaatgggaagaggcaagttcaagggtaaacctaccggccaacgccgattctctagtgctgctgatattcttgctggcacatctgctgcacgtcctcgatcattcaaacagaaagaagctgagtacgaagaagatgttgaagaagagtcagaggaggaatctgaagaagaatccgaagatgaagctgatgtgaagaagaaaggagctgaagctgttatcgaagttgataaccctaacagagtaagacaaaagaccttgaaagcaaaagacctcgatgctagtaaaaccactgaactctcaaggcgtgaaagagaggagctagagaagcagcgagctcatgagcgatacatgaggttgcaagagcaaggcaaaaccgaacaagcaaggaaggacttggatcgtttggctctgattcgccaacagagagaagaagctgccaagaagcgagaagaggaaaaagccgcaagagacgctaagaaagtcgaagggcgcaaatgagaagtgatcacactcaaaagacctgcctactatgcgattaagatgtgttgtttttactttgttctttttcgattgataaaagataaaacctctgctatttactctgttatctctcgattttaagttcggtttaaaaggattggatgtagttcaaaatataaactcgtttaagatttatgcgtggaagcttcctcag

SEQ ID NO: 99953 - protein, 230 aa, Arabidopsis thaliana
  peptide (1)..(230): Ceres Seq. ID no. 13603988
  misc_feature (78)..(230): Pfam Name: Caldesmon Pfam Description: Caldesmon
  misc_feature (67)..(230): Homolog of NCBI NO: 18422620 NR Description: expressed protein [Arabidopsis thaliana] gene_id:MCL19.6~unknown protein [Arabidopsis thaliana] unknown protein [Arabidopsis thaliana]
  misc_feature (67)..(230): Homolog of NCBI NO: 34909600 NR Description: P0435B05.20 [Oryza sativa (japonica
  misc_feature (67)..(230): Homolog of NCBI NO: 31418215 NR Description: Unknown (protein for MGC:56344) [Danio rerio]
  misc_feature (67)..(230): Homolog of NCBI NO: 12018258 NR Description: kinase substrate HASPP28 [Rattus norvegicus]
  misc_feature (67)..(230): Homolog of NCBI NO: 1136586 NR Description: PDGF associated protein >gi|1589641|prf||2211382A
  misc_feature (67)..(230): Homolog of NCBI NO: 7657441 NR Description: PDGFA associated protein 1; PDGF associated
  misc_feature (67)..(230): Homolog of NCBI NO: 30584165 NR Description: Homo sapiens PDGFA associated protein 1
  misc_feature (69)..(222): Homolog of NCBI NO: 1518855 NR Description: HASPP28
  misc_feature (67)..(222): Homolog of NCBI NO: 28278503 NR Description: Similar to PDGFA associated protein 1 [Danio
  misc_feature (51)..(218): Homolog of NCBI NO: 31212553 NR Description: ENSANGP00000022311 [Anopheles gambiae]
RVFVSFTRNRKRGQDPPLISQKAHLFIRFRIDSLSGFKYQILWFRFSFLICSLSFGKSLVFFLFETMGRGKFKGKPTGQRRFSSAADILAGTSAARPRSFKQKEAEYEEDVEEESEEESEEESEDEADVKKKGAEAVIEVDNPNRVRQKTLKAKDLDASKTTELSRREREELEKQRAHERYMRLQEQGKTEQARKDLDRLALIRQQREEAAKKREEEKAARDAKKVEGRK

SEQ ID NO: 99954 - protein, 164 aa, Arabidopsis thaliana; identical to SEQ ID NO: 40513
  peptide (1)..(164): Ceres Seq. ID no. 13603989
  misc_feature (12)..(164): Pfam Name: Caldesmon Pfam Description: Caldesmon
  misc_feature (1)..(164): Homolog of NCBI NO: 18422620 NR Description: expressed protein [Arabidopsis thaliana] gene_id:MCL19.6~unknown protein [Arabidopsis thaliana] unknown protein [Arabidopsis thaliana]
  misc_feature (1)..(164): Homolog of NCBI NO: 34909600 NR Description: P0435B05.20 [Oryza sativa (japonica
  misc_feature (1)..(164): Homolog of NCBI NO: 31418215 NR Description: Unknown (protein for MGC:56344) [Danio rerio]
  misc_feature (1)..(164): Homolog of NCBI NO: 12018258 NR Description: kinase substrate HASPP28 [Rattus norvegicus]
  misc_feature (1)..(164): Homolog of NCBI NO: 1136586 NR Description: PDGF associated protein >gi|1589641|prf||2211382A
  misc_feature (1)..(164): Homolog of NCBI NO: 7657441 NR Description: PDGFA associated protein 1; PDGF associated
  misc_feature (1)..(164): Homolog of NCBI NO: 30584165 NR Description: Homo sapiens PDGFA associated protein 1
  misc_feature (3)..(156): Homolog of NCBI NO: 1518855 NR Description: HASPP28
  misc_feature (1)..(156): Homolog of NCBI NO: 28278503 NR Description: Similar to PDGFA associated protein 1 [Danio
  misc_feature (1)..(152): Homolog of NCBI NO: 31212553 NR Description: ENSANGP00000022311 [Anopheles gambiae]

SEQ ID NO: 99955 - DNA, 1430 bp, Arabidopsis thaliana
  misc_feature (1)..(1430): Ceres Seq. ID no. 13603990
  misc_feature: MA Experiment ID: 108463 Result: Up-regulated in Transcription
  misc_feature: MA Experiment 108463 PARAMETER Experiment Name: At_Germinating_Seeds_cDNA_P Parameter: Age (day) Value: 3 vs. 0
  misc_feature: MA Experiment 108463 PARAMETER Experiment Name: At_Germinating_Seeds_cDNA_P Parameter: Tissue Value: Germinating Seeds
  misc_feature: MA Experiment ID: 108579 Result: Down-regulated in Transcription
  misc_feature: MA Experiment 108579 PARAMETER Experiment Name: At_4deg_Cold_cDNA_P Parameter: Temperature (deg C) Value: 4 vs. 22
  misc_feature: MA Experiment 108579 PARAMETER Experiment Name: At_4deg_Cold_cDNA_P Parameter: Timepoint (hr) Value: 6
  misc_feature: MA Experiment 108579 PARAMETER Experiment Name: At_4deg_Cold_cDNA_P Parameter: Tissue Value: Aerial
  misc_feature: MA Experiment ID: 20001248 Result: Up-regulated in Transcription
  misc_feature: MA Experiment 20001248 PARAMETER Experiment Name: At_Far-red-induction_P Parameter: Age (day) Value: 7
  misc_feature: MA Experiment 20001248 PARAMETER Experiment Name: At_Far-red-induction_P Parameter: Light Value: Far-red vs. White
  misc_feature: MA Experiment 20001248 PARAMETER Experiment Name: At_Far-red-induction_P Parameter: Organism Value: A. thaliana
  misc_feature: MA Experiment 20001248 PARAMETER Experiment Name: At_Far-red-induction_P Parameter: Plant Line Value: Columbia
  misc_feature: MA Experiment 20001248 PARAMETER Experiment Name: At_Far-red-induction_P Parameter: Timepoint (hr) Value: 4
  misc_feature: MA Experiment 20001248 PARAMETER Experiment Name: At_Far-red-induction_P Parameter: Tissue Value: Whole Plant
aaattcaaaaaaaaatcttagatcaggtggaatctaccagagagcacgcgattctagatcgatccaccggtgagagacgccggagtttttatccccgcggcggagtaaaccatttcttcttcccgatgtatcagtgaagttaagtagtcgagagaggggataatgatggaagtggaaggatcgatgaatcgtgctcctgatcaatcatccttcttacgatcaagacgatccaaagctctgtatcagtttaagcagcagaaactcccagcttgtaagccagtcttaacaccaatatcggttataacagtgtttatgttaatgggttttgttttcattcccattggtctcattactcttcgtgcttctcgtgatgctattgaaattatagaccggtatgatgttgagtgcattcctgaagaatatagaaccaacaaactgttgtatataactgattcatctatcccaaagaattgtacgcgctacttgaaggtacaaaagtatatgaaagctcccatttttatctactaccagcttgataactactatcaaaaccatcgccggtatgtaaagagtagaagtgatcagcaactattacatggactggagtatagccacacaagttcttgtgaacccgaggagtcatctaatggtctcccaattgttccttgtgggttaattgcttggagtatgttcaatgatacatttacgttttctcgcgaaagaacaaaactgaatgtgagccggaataacattgcgtggaagagtgaccgcgagcacaagtttggaaagaatgtgtatcctatcaatttccagaacggaactttgattggtggagcaaagttggatccaaaaattccactaagtgaccaagaggactttatagtgtggatgcgagcagctgctttactaagcttccggaaattatatggaagaatcgaagaggacttggaaccaggaaaagttgttgaagtaaatttgatgaacaattacaacacttatagctttagtgggcagaagaagcttattctctccacatcaaattggttaggaggaagaaatgatttcctgggtatcacctatcttgtcgttggttcctcttccatagtcatatccatcatcttcatgttgctccatttgaaaaatccaaggccatacggtgacaattcttggaacaagaaaagcctttcaagttgagaagctgttacattctttctctaacagattcatattccaggttcatatatattcctacatactcaagagccatactttgtctatatatatatgatcatctaggtttaaggagtatataacgtatgtatgagcctatagttctagaaaactgataaggttcctctgttttctttacgatccttgtgtgttcggattgcgggttctaaagattcaacaaaaagataattgtttgaccc

SEQ ID NO: 99956 - protein, 343 aa, Arabidopsis thaliana
  peptide (1)..(343): Ceres Seq. ID no. 13603991
  misc_feature (64)..(329): Pfam Name: LEM3 (ligand-effect modulator 3) family / CDC50 family Pfam Description: LEM3 (ligand-effect modulator 3) family / CDC50
  misc_feature (1)..(343): Homolog of NCBI NO: 18422638 NR Description: membrane protein common family [Arabidopsis >gi|30694892|ref|NP_851139.1| membrane protein common family
  misc_feature (8)..(343): Homolog of NCBI NO: 21554054 NR Description: unknown [Arabidopsis thaliana]
  misc_feature (1)..(329): Homolog of NCBI NO: 9757735 NR Description: gb|AAD25612.1~gene_id:MCL19.21~similar to unknown
  misc_feature (13)..(338): Homolog of NCBI NO: 18399730 NR Description: membrane protein common family [Arabidopsis >gi|11994416|dbj|BAB02418.1| similarity to unknown protein [Arabidopsis thaliana]
  misc_feature (15)..(338): Homolog of NCBI NO: 18404877 NR Description: membrane protein common family [Arabidopsis
  misc_feature (20)..(340): Homolog of NCBI NO: 18412377 NR Description: membrane protein common family [Arabidopsis
  misc_feature (28)..(340): Homolog of NCBI NO: 25347303 NR Description: protein F3O9.16 [imported] - Arabidopsis thaliana
  misc_feature (41)..(340): Homolog of NCBI NO: 15219220 NR Description: membrane protein common family [Arabidopsis
  misc_feature (29)..(340): Homolog of NCBI NO: 25347301 NR Description: T8K14.13 [imported] - Arabidopsis thaliana
  misc_feature (3)..(207): Homolog of NCBI NO: 17391158 NR Description: RIKEN cDNA 2010200I23 [Mus musculus]
MMEVEGSMNRAPDQSSFLRSRRSKALYQFKQQKLPACKPVLTPISVITVFMLMGFVFIPIGLITLRASRDAIEIIDRYDVECIPEEYRTNKLLYITDSSIPKNCTRYLKVQKYMKAPIFIYYQLDNYYQNHRRYVKSRSDQQLLHGLEYSHTSSCEPEESSNGLPIVPCGLIAWSMFNDTFTFSRERTKLNVSRNNIAWKSDREHKFGKNVYPINFQNGTLIGGAKLDPKIPLSDQEDFIVWMRAAALLSFRKLYGRIEEDLEPGKVVEVNLMNNYNTYSFSGQKKLILSTSNWLGGRNDFLGITYLVVGSSSIVISIIFMLLHLKNPRPYGDNSWNKKSLSS

SEQ ID NO: 99957 - protein, 342 aa, Arabidopsis thaliana
  peptide (1)..(342): Ceres Seq. ID no. 13603992
  misc_feature (63)..(328): Pfam Name: LEM3 (ligand-effect modulator 3) family / CDC50 family Pfam Description: LEM3 (ligand-effect modulator 3) family / CDC50
  misc_feature (1)..(342): Homolog of NCBI NO: 18422638 NR Description: membrane protein common family [Arabidopsis >gi|30694892|ref|NP_851139.1| membrane protein common family
  misc_feature (7)..(342): Homolog of NCBI NO: 21554054 NR Description: unknown [Arabidopsis thaliana]
  misc_feature (1)..(328): Homolog of NCBI NO: 9757735 NR Description: gb|AAD25612.1~gene_id:MCL19.21~similar to unknown
  misc_feature (12)..(337): Homolog of NCBI NO: 18399730 NR Description: membrane protein common family [Arabidopsis >gi|11994416|dbj|BAB02418.1| similarity to unknown protein [Arabidopsis thaliana]
  misc_feature (14)..(337): Homolog of NCBI NO: 18404877 NR Description: membrane protein common family [Arabidopsis
  misc_feature (19)..(339): Homolog of NCBI NO: 18412377 NR Description: membrane protein common family [Arabidopsis
  misc_feature (27)..(339): Homolog of NCBI NO: 25347303 NR Description: protein F3O9.16 [imported] - Arabidopsis thaliana
  misc_feature (40)..(339): Homolog of NCBI NO: 15219220 NR Description: membrane protein common family [Arabidopsis
  misc_feature (28)..(339): Homolog of NCBI NO: 25347301 NR Description: T8K14.13 [imported] - Arabidopsis thaliana
  misc_feature (2)..(206): Homolog of NCBI NO: 17391158 NR Description: RIKEN cDNA 2010200I23 [Mus musculus]
MEVEGSMNRAPDQSSFLRSRRSKALYQFKQQKLPACKPVLTPISVITVFMLMGFVFIPIGLITLRASRDAIEIIDRYDVECIPEEYRTNKLLYITDSSIPKNCTRYLKVQKYMKAPIFIYYQLDNYYQNHRRYVKSRSDQQLLHGLEYSHTSSCEPEESSNGLPIVPCGLIAWSMFNDTFTFSRERTKLNVSRNNIAWKSDREHKFGKNVYPINFQNGTLIGGAKLDPKIPLSDQEDFIVWMRAAALLSFRKLYGRIEEDLEPGKVVEVNLMNNYNTYSFSGQKKLILSTSNWLGGRNDFLGITYLVVGSSSIVISIIFMLLHLKNPRPYGDNSWNKKSLSS

SEQ ID NO: 99958 - protein, 336 aa, Arabidopsis thaliana
  peptide (1)..(336): Ceres Seq. ID no. 13603993
  misc_feature (57)..(322): Pfam Name: LEM3 (ligand-effect modulator 3) family / CDC50 family Pfam Description: LEM3 (ligand-effect modulator 3) family / CDC50
  misc_feature (1)..(336): Homolog of NCBI NO: 18422638 NR Description: membrane protein common family [Arabidopsis >gi|30694892|ref|NP_851139.1| membrane protein common family
  misc_feature (1)..(336): Homolog of NCBI NO: 21554054 NR Description: unknown [Arabidopsis thaliana]
  misc_feature (1)..(322): Homolog of NCBI NO: 9757735 NR Description: gb|AAD25612.1~gene_id:MCL19.21~similar to unknown
  misc_feature (6)..(331): Homolog of NCBI NO: 18399730 NR Description: membrane protein common family [Arabidopsis >gi|11994416|dbj|BAB02418.1| similarity to unknown protein [Arabidopsis thaliana]
  misc_feature (8)..(331): Homolog of NCBI NO: 18404877 NR Description: membrane protein common family [Arabidopsis
  misc_feature (13)..(333): Homolog of NCBI NO: 18412377 NR Description: membrane protein common family [Arabidopsis
  misc_feature (21)..(333): Homolog of NCBI NO: 25347303 NR Description: protein F3O9.16 [imported] - Arabidopsis thaliana
  misc_feature (34)..(333): Homolog of NCBI NO: 15219220 NR Description: membrane protein common family [Arabidopsis
  misc_feature (22)..(333): Homolog of NCBI NO: 25347301 NR Description: T8K14.13 [imported] - Arabidopsis thaliana
  misc_feature (1)..(200): Homolog of NCBI NO: 17391158 NR Description: RIKEN cDNA 2010200I23 [Mus musculus]
MNRAPDQSSFLRSRRSKALYQFKQQKLPACKPVLTPISVITVFMLMGFVFIPIGLITLRASRDAIEIIDRYDVECIPEEYRTNKLLYITDSSIPKNCTRYLKVQKYMKAPIFIYYQLDNYYQNHRRYVKSRSDQQLLHGLEYSHTSSCEPEESSNGLPIVPCGLIAWSMFNDTFTFSRERTKLNVSRNNIAWKSDREHKFGKNVYPINFQNGTLIGGAKLDPKIPLSDQEDFIVWMRAAALLSFRKLYGRIEEDLEPGKVVEVNLMNNYNTYSFSGQKKLILSTSNWLGGRNDFLGITYLVVGSSSIVISIIFMLLHLKNPRPYGDNSWNKKSLSS

SEQ ID NO: 99959 - DNA, 1459 bp, Arabidopsis thaliana
  misc_feature (1)..(1459): Ceres Seq. ID no. 13603994
  misc_feature: MA Experiment ID: 20000173 Result: Down-regulated in Transcription
  misc_feature: MA Experiment 20000173 PARAMETER Experiment Name: At_42deg_Heat_P Parameter: Age (day) Value: 14
  misc_feature: MA Experiment 20000173 PARAMETER Experiment Name: At_42deg_Heat_P Parameter: Organism Value: A. thaliana
  misc_feature: MA Experiment 20000173 PARAMETER Experiment Name: At_42deg_Heat_P Parameter: Plant Line Value: WS
  misc_feature: MA Experiment 20000173 PARAMETER Experiment Name: At_42deg_Heat_P Parameter: Temperature (deg C) Value: 42 vs. 22
  misc_feature: MA Experiment 20000173 PARAMETER Experiment Name: At_42deg_Heat_P Parameter: Timepoint (hr) Value: 6
  misc_feature: MA Experiment 20000173 PARAMETER Experiment Name: At_42deg_Heat_P Parameter: Tissue Value: Aerial
  misc_feature: MA Experiment ID: 20000184 Result: Down-regulated in Transcription
  misc_feature: MA Experiment 20000184 PARAMETER Experiment Name: At_Shoots__P Parameter: Age (day) Value: 7
  misc_feature: MA Experiment 20000184 PARAMETER Experiment Name: At_Shoots__P Parameter: Tissue Value: Shoots vs. Whole Plant
  misc_feature: MA Experiment ID: 20000234 Result: Down-regulated in Transcription
  misc_feature: MA Experiment 20000234 PARAMETER Experiment Name: At_Siliques_P Parameter: Age (day) Value: 21
  misc_feature: MA Experiment 20000234 PARAMETER Experiment Name: At_Siliques_P Parameter: Organism Value: A. thaliana
  misc_feature: MA Experiment 20000234 PARAMETER Experiment Name: At_Siliques_P Parameter: Plant Line Value: WS
  misc_feature: MA Experiment 20000234 PARAMETER Experiment Name: At_Siliques_P Parameter: Tissue Value: Less Than 5mm Siliques vs. Whole Plant
  misc_feature: MA Experiment ID: 20000264 Result: Down-regulated in Transcription
  misc_feature: MA Experiment 20000264 PARAMETER Experiment Name: At_Open_Flower_P Parameter: Age (day) Value: 21
  misc_feature: MA Experiment 20000264 PARAMETER Experiment Name: At_Open_Flower_P Parameter: Plant Line Value: WS
  misc_feature: MA Experiment 20000264 PARAMETER Experiment Name: At_Open_Flower_P Parameter: Tissue Value: Open Flower vs. Whole Plant
  misc_feature: MA Experiment ID: 20000495 Result: Down-regulated in Transcription
  misc_feature: MA Experiment 20000495 PARAMETER Experiment Name: At_Guard_Cells_P Parameter: Harvest Date Value: 8/2/2002
  misc_feature: MA Experiment 20000495 PARAMETER Experiment Name: At_Guard_Cells_P Parameter: Organism Value: A. thaliana
  misc_feature: MA Experiment 20000495 PARAMETER Experiment Name: At_Guard_Cells_P Parameter: Tissue Value: Guard Cells vs. Leaves
  misc_feature: MA Experiment ID: 20000496 Result: Down-regulated in Transcription
  misc_feature: MA Experiment 20000496 PARAMETER Experiment Name: At_Guard_Cells_P Parameter: Harvest Date Value: 7/19/2002
  misc_feature: MA Experiment 20000496 PARAMETER Experiment Name: At_Guard_Cells_P Parameter: Organism Value: Canola
  misc_feature: MA Experiment 20000496 PARAMETER Experiment Name: At_Guard_Cells_P Parameter: Tissue Value: Guard Cells vs. Leaves
  misc_feature: MA Experiment ID: 20001451 Result: Down-regulated in Transcription
  misc_feature: MA Experiment 20001451 PARAMETER Experiment Name: At_Far-red-induction_P Parameter: Age (day) Value: 7
  misc_feature: MA Experiment 20001451 PARAMETER Experiment Name: At_Far-red-induction_P Parameter: Light Value: Far-red vs. White
  misc_feature: MA Experiment 20001451 PARAMETER Experiment Name: At_Far-red-induction_P Parameter: Organism Value: A. thaliana
  misc_feature: MA Experiment 20001451 PARAMETER Experiment Name: At_Far-red-induction_P Parameter: Plant Line Value: Columbia
  misc_feature: MA Experiment 20001451 PARAMETER Experiment Name: At_Far-red-induction_P Parameter: Timepoint (hr) Value: 24
  misc_feature: MA Experiment 20001451 PARAMETER Experiment Name: At_Far-red-induction_P Parameter: Tissue Value: Whole Plant
  misc_feature: MA Experiment ID: 20001560 Result: Down-regulated in Transcription
  misc_feature: MA Experiment 20001560 PARAMETER Experiment Name: At_Drought_Soil_Dry_P Parameter: Age (day) Value: 28
  misc_feature: MA Experiment 20001560 PARAMETER Experiment Name: At_Drought_Soil_Dry_P Parameter: Organism Value: A. thaliana
  misc_feature: MA Experiment 20001560 PARAMETER Experiment Name: At_Drought_Soil_Dry_P Parameter: Plant Line Value: WS
  misc_feature: MA Experiment 20001560 PARAMETER Experiment Name: At_Drought_Soil_Dry_P Parameter: Post Timepoint (hr) Value: None
  misc_feature: MA Experiment 20001560 PARAMETER Experiment Name: At_Drought_Soil_Dry_P Parameter: Post-Treatment Value: None
  misc_feature: MA Experiment 20001560 PARAMETER Experiment Name: At_Drought_Soil_Dry_P Parameter: Timepoint (day) Value: 14
  misc_feature: MA Experiment 20001560 PARAMETER Experiment Name: At_Drought_Soil_Dry_P Parameter: Treatment Value: Drought vs. No Drought
atcgcatttcagttgttcaacttcttcgtcgtcgtcttcttcctttgctccgtcgtcgagatctcgtcgaacctcaaatctcaaatctcctgtaaccagatcgtctaattatccgatctgcgtttcgaatctcagatcgaagatgccggtggctgcttccgccatctattttctgaatctccgtggcgatgtactcataaatcgcacctaccgagatgacgtcgggggaaacatggtggatgcatttcgtacgcatataatgcagacgaaagagttagggaattgtcctgtgcgtcagattggtggctgctcctttgtttatatgcgaatcagcaatgtctacatcgtcattgttgtcagtagcaatgctaatgttgcttgtggattcaaatttgttgttgaggctgtagctttgttcaaatcatactttggtggagcttttgatgaagacgctattagaaataactttgttctgatttatgaattgttggatgagattatggactttggctatccacaaaatctctcacctgaaattttaaaactttatatcactcaggaaggtgtacggtcaccattttcatcgaagccaaaagacaaacctgttccaaatgcaacattacaagttacaggtgctgttggttggagaagagagggccttgcttacaaaaagaatgaggtgtttctggatattgtggaaagtgtaaaccttctgatgtcctctaaaggcaatgttcttcggtgtgatgtgacggggaaggttttaatgaaatgtttcctttcgggaatgcctgatttgaagttggggttgaatgataaaattggtcttgagaaggaatcagaaatgaaatctcgcccagctaagagtggtaaaaccattgagcttgatgatgtcacatttcaccagtgtgtgaacctgaccagattcaactccgagaagactgttagttttgtaccaccggatggagagtttgaactgatgaagtatcgaataacagagggtgtaaatctgcctttccgtgtattaccaacaatcaaagaacttggtcgtacacgtatggaagtaaatgtcaaggtcaaaagtgtgtttggtgctaaaatgtttgcccttggggtcgtggttaaaattccagtgccaaaacaaacagccaagaccaatttccaagtgacaactggtcgcgctaaatacaatccatcaatcgattgcttggtttggaagataagaaaattcccagggcaaacagagtccacgctaagtgcagaaattgagttgatctcaacaatgggagagaagaaatcttggacaaggccaccgatccaaatggaatttcaggtgccaatgttcacagcatctggtctgcgagttcgttttctcaaggtttgggagaagagcggttacaacacggtcgagtgggttcgatacataacgaaagcgggatcttacgagatcagatgctga

SEQ ID NO: 99960 - protein, 485 aa, Arabidopsis thaliana
  peptide (1)..(485): Ceres Seq. ID no. 13603995
  misc_feature (55)..(485): Pfam Name: Adaptor complexes medium subunit family Pfam Description: Adaptor complexes medium subunit family
  misc_feature (48)..(485): Homolog of NCBI NO: 15237475 NR Description: AP47/50p (gb|AAB88283.1) [Arabidopsis thaliana] AP47/50p [Arabidopsis thaliana] >gi|9758499|dbj|BAB08907.1|
  misc_feature (47)..(484): Homolog of NCBI NO: 28828638 NR Description: similar to Dictyostelium discoideum (Slime mold). coat assembly protein AP50 (Clathrin coat associated protein
  misc_feature (53)..(484): Homolog of NCBI NO: 1703328 NR Description: CLATHRIN COAT ASSEMBLY PROTEIN AP50 (CLATHRIN COAT
  misc_feature (55)..(485): Homolog of NCBI NO: 6753074 NR Description: adaptor protein complex AP-2, mu1;
  misc_feature (55)..(485): Homolog of NCBI NO: 40788880 NR Description: KIAA0109 [Homo sapiens]
  misc_feature (55)..(485): Homolog of NCBI NO: 22219429 NR Description: Chain M, Ap2 Clathrin Adaptor Core
  misc_feature (55)..(485): Homolog of NCBI NO: 7448828 NR Description: assembly protein 50 - human
  misc_feature (55)..(485): Homolog of NCBI NO: 38174423 NR Description: Unknown (protein for MGC:75936) [Silurana
  misc_feature (55)..(485): Homolog of NCBI NO: 28839636 NR Description: Unknown (protein for MGC:53076) [Xenopus laevis]
  misc_feature (53)..(484): Homolog of NCBI NO: 32419759 NR Description: hypothetical protein [Neurospora crassa]
SHFSCSTSSSSSSSFAPSSRSRRTSNLKSPVTRSSNYPICVSNLRSKMPVAASAIYFLNLRGDVLINRTYRDDVGGNMVDAFRTHIMQTKELGNCPVRQIGGCSFVYMRISNVYIVIVVSSNANVACGFKFVVEAVALFKSYFGGAFDEDAIRNNFVLIYELLDEIMDFGYPQNLSPEILKLYITQEGVRSPFSSKPKDKPVPNATLQVTGAVGWRREGLAYKKNEVFLDIVESVNLLMSSKGNVLRCDVTGKVLMKCFLSGMPDLKLGLNDKIGLEKESEMKSRPAKSGKTIELDDVTFHQCVNLTRFNSEKTVSFVPPDGEFELMKYRITEGVNLPFRVLPTIKELGRTRMEVNVKVKSVFGAKMFALGVVVKIPVPKQTAKTNFQVTTGRAKYNPSIDCLVWKIRKFPGQTESTLSAEIELISTMGEKKSWTRPPIQMEFQVPMFTASGLRVRFLKVWEKSGYNTVEWVRYITKAGSYEIRC

SEQ ID NO: 99961 - protein, 438 aa, Arabidopsis thaliana; identical to SEQ ID NO: 76506
  peptide (1)..(438): Ceres Seq. ID no. 13603996
  misc_feature (8)..(438): Pfam Name: Adaptor complexes medium subunit family Pfam Description: Adaptor complexes medium subunit family
  misc_feature (1)..(438): Homolog of NCBI NO: 15237475 NR Description: AP47/50p (gb|AAB88283.1) [Arabidopsis thaliana] AP47/50p [Arabidopsis thaliana] >gi|9758499|dbj|BAB08907.1|
  misc_feature (1)..(437): Homolog of NCBI NO: 28828638 NR Description: similar to Dictyostelium discoideum (Slime mold). coat assembly protein AP50 (Clathrin coat associated protein
  misc_feature (6)..(437): Homolog of NCBI NO: 1703328 NR Description: CLATHRIN COAT ASSEMBLY PROTEIN AP50 (CLATHRIN COAT
  misc_feature (8)..(438): Homolog of NCBI NO: 6753074 NR Description: adaptor protein complex AP-2, mu1;
  misc_feature (8)..(438): Homolog of NCBI NO: 40788880 NR Description: KIAA0109 [Homo sapiens]
  misc_feature (8)..(438): Homolog of NCBI NO: 22219429 NR Description: Chain M, Ap2 Clathrin Adaptor Core
  misc_feature (8)..(438): Homolog of NCBI NO: 7448828 NR Description: assembly protein 50 - human
  misc_feature (8)..(438): Homolog of NCBI NO: 38174423 NR Description: Unknown (protein for MGC:75936) [Silurana
  misc_feature (8)..(438): Homolog of NCBI NO: 28839636 NR Description: Unknown (protein for MGC:53076) [Xenopus laevis]
  misc_feature (6)..(437): Homolog of NCBI NO: 32419759 NR Description: hypothetical protein [Neurospora crassa]

SEQ ID NO: 99962 - protein, 408 aa, Arabidopsis thaliana; identical to SEQ ID NO: 76507
  peptide (1)..(408): Ceres Seq. ID no. 13603997
  misc_feature (1)..(408): Pfam Name: Adaptor complexes medium subunit family Pfam Description: Adaptor complexes medium subunit family
  misc_feature (1)..(408): Homolog of NCBI NO: 15237475 NR Description: AP47/50p (gb|AAB88283.1) [Arabidopsis thaliana] AP47/50p [Arabidopsis thaliana] >gi|9758499|dbj|BAB08907.1|
  misc_feature (1)..(407): Homolog of NCBI NO: 28828638 NR Description: similar to Dictyostelium discoideum (Slime mold). coat assembly protein AP50 (Clathrin coat associated protein
  misc_feature (1)..(407): Homolog of NCBI NO: 1703328 NR Description: CLATHRIN COAT ASSEMBLY PROTEIN AP50 (CLATHRIN COAT
  misc_feature (1)..(408): Homolog of NCBI NO: 6753074 NR Description: adaptor protein complex AP-2, mu1;
  misc_feature (1)..(408): Homolog of NCBI NO: 40788880 NR Description: KIAA0109 [Homo sapiens]
  misc_feature (1)..(408): Homolog of NCBI NO: 22219429 NR Description: Chain M, Ap2 Clathrin Adaptor Core
  misc_feature (1)..(408): Homolog of NCBI NO: 7448828 NR Description: assembly protein 50 - human
  misc_feature (1)..(408): Homolog of NCBI NO: 38174423 NR Description: Unknown (protein for MGC:75936) [Silurana
  misc_feature (1)..(408): Homolog of NCBI NO: 28839636 NR Description: Unknown (protein for MGC:53076) [Xenopus laevis]
  misc_feature (1)..(407): Homolog of NCBI NO: 32419759 NR Description: hypothetical protein [Neurospora crassa]

SEQ ID NO: 99963 - DNA, 1209 bp, Arabidopsis thaliana
  misc_feature (1)..(1209): Ceres Seq. ID no. 13603998
  misc_feature: MA Experiment ID: 108577 Result: Down-regulated in Transcription
  misc_feature: MA Experiment 108577 PARAMETER Experiment Name: At_42deg_Heat_cDNA_P Parameter: Temperature (deg C) Value: 42 vs. 22
  misc_feature: MA Experiment 108577 PARAMETER Experiment Name: At_42deg_Heat_cDNA_P Parameter: Timepoint (hr) Value: 6
  misc_feature: MA Experiment 108577 PARAMETER Experiment Name: At_42deg_Heat_cDNA_P Parameter: Tissue Value: Aerial
  misc_feature: MA Experiment ID: 108668 Result: Down-regulated in Transcription
  misc_feature: MA Experiment 108668 PARAMETER Experiment Name: At_2mM_SA_cDNA_P Parameter: Plant Line Value: WS
  misc_feature: MA Experiment 108668 PARAMETER Experiment Name: At_2mM_SA_cDNA_P Parameter: Timepoint (hr) Value: 6
  misc_feature: MA Experiment 108668 PARAMETER Experiment Name: At_2mM_SA_cDNA_P Parameter: Treatment Value: 2mM SA vs. No Treatment
  misc_feature: MA Experiment ID: 20000111 Result: Down-regulated in Transcription
  misc_feature: MA Experiment 20000111 PARAMETER Experiment Name: At_42deg_Heat_cDNA_P Parameter: Temperature (deg C) Value: 42 vs. 22
  misc_feature: MA Experiment 20000111 PARAMETER Experiment Name: At_42deg_Heat_cDNA_P Parameter: Timepoint (hr) Value: 6
  misc_feature: MA Experiment 20000111 PARAMETER Experiment Name: At_42deg_Heat_cDNA_P Parameter: Tissue Value: Aerial
  misc_feature: MA Experiment ID: 20000173 Result: Down-regulated in Transcription
  misc_feature: MA Experiment 20000173 PARAMETER Experiment Name: At_42deg_Heat_P Parameter: Age (day) Value: 14
  misc_feature: MA Experiment 20000173 PARAMETER Experiment Name: At_42deg_Heat_P Parameter: Organism Value: A. thaliana
  misc_feature: MA Experiment 20000173 PARAMETER Experiment Name: At_42deg_Heat_P Parameter: Plant Line Value: WS
  misc_feature: MA Experiment 20000173 PARAMETER Experiment Name: At_42deg_Heat_P Parameter: Temperature (deg C) Value: 42 vs. 22
  misc_feature: MA Experiment 20000173 PARAMETER Experiment Name: At_42deg_Heat_P Parameter: Timepoint (hr) Value: 6
  misc_feature: MA Experiment 20000173 PARAMETER Experiment Name: At_42deg_Heat_P Parameter: Tissue Value: Aerial
  misc_feature: MA Experiment ID: 20000265 Result: Up-regulated in Transcription
  misc_feature: MA Experiment 20000265 PARAMETER Experiment Name: At_Open_Flower_P Parameter: Age (day) Value: 21
  misc_feature: MA Experiment 20000265 PARAMETER Experiment Name: At_Open_Flower_P Parameter: Plant Line Value: WS
  misc_feature: MA Experiment 20000265 PARAMETER Experiment Name: At_Open_Flower_P Parameter: Tissue Value: Closed Flower vs. Whole Plant
  misc_feature: MA Experiment ID: 20000286 Result: Up-regulated in Transcription
  misc_feature: MA Experiment 20000286 PARAMETER Experiment Name: At_Open_Flower_P Parameter: Age (day) Value: 21
  misc_feature: MA Experiment 20000286 PARAMETER Experiment Name: At_Open_Flower_P Parameter: Plant Line Value: WS
  misc_feature: MA Experiment 20000286 PARAMETER Experiment Name: At_Open_Flower_P Parameter: Tissue Value: Half Open vs. Whole Plant
  misc_feature: MA Experiment ID: 20000437 Result: Down-regulated in Transcription
  misc_feature: MA Experiment 20000437 PARAMETER Experiment Name: At_Drought_P Parameter: Age (day) Value: 8
  misc_feature: MA Experiment 20000437 PARAMETER Experiment Name: At_Drought_P Parameter: Organism Value: A. thaliana
  misc_feature: MA Experiment 20000437 PARAMETER Experiment Name: At_Drought_P Parameter: Plant Line Value: WS
  misc_feature: MA Experiment 20000437 PARAMETER Experiment Name: At_Drought_P Parameter: Timepoint (hr) Value: 24
  misc_feature: MA Experiment 20000437 PARAMETER Experiment Name: At_Drought_P Parameter: Tissue Value: Whole Plant
  misc_feature: MA Experiment 20000437 PARAMETER Experiment Name: At_Drought_P Parameter: Treatment Value: Drought vs. No Drought
  misc_feature: MA Experiment ID: 20000438 Result: Up-regulated in Transcription
  misc_feature: MA Experiment 20000438 PARAMETER Experiment Name: At_Shoots__P Parameter: Age (day) Value: 14
  misc_feature: MA Experiment 20000438 PARAMETER Experiment Name: At_Shoots__P Parameter: Tissue Value: Shoots vs. Whole Plant
  misc_feature: MA Experiment ID: 20000573 Result: Down-regulated in Transcription
  misc_feature: MA Experiment 20000573 PARAMETER Experiment Name: At_100uM_ABA_Mutants__P Parameter: Organism Value: A. thaliana
  misc_feature: MA Experiment 20000573 PARAMETER Experiment Name: At_100uM_ABA_Mutants__P Parameter: Plant Line Value: CS22 vs. Ler wt
  misc_feature: MA Experiment 20000573 PARAMETER Experiment Name: At_100uM_ABA_Mutants__P Parameter: Timepoint (hr) Value: N/A
  misc_feature: MA Experiment 20000573 PARAMETER Experiment Name: At_100uM_ABA_Mutants__P Parameter: Tissue Value: Whole Plant
  misc_feature: MA Experiment 20000573 PARAMETER Experiment Name: At_100uM_ABA_Mutants__P Parameter: Treatment Value: None
  misc_feature: MA Experiment ID: 20000794 Result: Up-regulated in Transcription
  misc_feature: MA Experiment 20000794 PARAMETER Experiment Name: At_Petals_P Parameter: Age (day) Value: 23-25 days
  misc_feature: MA Experiment 20000794 PARAMETER Experiment Name: At_Petals_P Parameter: Plant Line Value: WS
  misc_feature: MA Experiment 20000794 PARAMETER Experiment Name: At_Petals_P Parameter: Tissue Value: Petals vs. Whole plant
  misc_feature: MA Experiment ID: 20001248 Result: Down-regulated in Transcription
  misc_feature: MA Experiment 20001248 PARAMETER Experiment Name: At_Far-red-induction_P Parameter: Age (day) Value: 7
  misc_feature: MA Experiment 20001248 PARAMETER Experiment Name: At_Far-red-induction_P Parameter: Light Value: Far-red vs. White
  misc_feature: MA Experiment 20001248 PARAMETER Experiment Name: At_Far-red-induction_P Parameter: Organism Value: A. thaliana
  misc_feature: MA Experiment 20001248 PARAMETER Experiment Name: At_Far-red-induction_P Parameter: Plant Line Value: Columbia
  misc_feature: MA Experiment 20001248 PARAMETER Experiment Name: At_Far-red-induction_P Parameter: Timepoint (hr) Value: 4
  misc_feature: MA Experiment 20001248 PARAMETER Experiment Name: At_Far-red-induction_P Parameter: Tissue Value: Whole Plant
  misc_feature: MA Experiment ID: 20001450 Result: Down-regulated in Transcription
  misc_feature: MA Experiment 20001450 PARAMETER Experiment Name: At_Far-red-induction_P Parameter: Age (day) Value: 7
  misc_feature: MA Experiment 20001450 PARAMETER Experiment Name: At_Far-red-induction_P Parameter: Light Value: Far-red vs. White
  misc_feature: MA Experiment 20001450 PARAMETER Experiment Name: At_Far-red-induction_P Parameter: Organism Value: A. thaliana
  misc_feature: MA Experiment 20001450 PARAMETER Experiment Name: At_Far-red-induction_P Parameter: Plant Line Value: Columbia
  misc_feature: MA Experiment 20001450 PARAMETER Experiment Name: At_Far-red-induction_P Parameter: Timepoint (hr) Value: 8
  misc_feature: MA Experiment 20001450 PARAMETER Experiment Name: At_Far-red-induction_P Parameter: Tissue Value: Whole Plant
  misc_feature: MA Experiment ID: 20001451 Result: Down-regulated in Transcription
  misc_feature: MA Experiment 20001451 PARAMETER Experiment Name: At_Far-red-induction_P Parameter: Age (day) Value: 7
  misc_feature: MA Experiment 20001451 PARAMETER Experiment Name: At_Far-red-induction_P Parameter: Light Value: Far-red vs. White
  misc_feature: MA Experiment 20001451 PARAMETER Experiment Name: At_Far-red-induction_P Parameter: Organism Value: A. thaliana
  misc_feature: MA Experiment 20001451 PARAMETER Experiment Name: At_Far-red-induction_P Parameter: Plant Line Value: Columbia
  misc_feature: MA Experiment 20001451 PARAMETER Experiment Name: At_Far-red-induction_P Parameter: Timepoint (hr) Value: 24
  misc_feature: MA Experiment 20001451 PARAMETER Experiment Name: At_Far-red-induction_P Parameter: Tissue Value: Whole Plant
aaggaataaacttcgtgaagagaaatgactctagaagctttatcatcaaacggtcttttaaactttttgctctctgaaactctttcaccaactccattcaagtctctcgtcgatctcgagccattgccggaaaatgatgtcatcatatcgaagaacacaatttcggagatatctaatcaagaaccgccaccacagcgacaaccaccagctacgaatcgagggaagaagcggcggaggaggaagcctagggtttgcaaaaacgaggaagaagctgagaatcaacgaatgactcacattgccgtcgaaagaaatcgaagaagacaaatgaatcaacatctctctgtcttgcgatctctcatgcctcaaccttttgctcacaagggtgatcaagcttcaatagttggtggagccatagatttcatcaaagaacttgaacacaaattactatctcttgaagctcaaaaacatcataatgctaaattaaaccagtcggttacttcttcaacaagtcaagactcaaatggtgaacaagagaatcctcatcaaccatcttcactatctctatcgcagttctttcttcattcatacgatccgagccaagagaataggaacggctcaacaagctcggtgaaaacccctatggaagatcttgaggtgactctaatcgaaactcatgctaacatcagaatcttgtcgagaagaagaggtttccggtggagcacgttggccaccaccaaaccgccgcagctttcgaagctggtggcttctctacaatcgctgtccctctccattcttcaccttagtgtcacaacattggacaattatgctatttactccatcagcgctaaggtggaagagagttgccagctaagttcagtagatgacattgcaggagcagttcaccacatgctaagtatcattgaagaggagcctttttgttgctcatcaatgtcagaattaccatttgacttctctttgaatcactcaaatgtcactcattctctctgagaaatctcttttttgttgttgttattccttcttttaattttatcacatagcacatctttagtttttttttttcagaatgaagaaacacataagctttcttttaaaatcctaggttctttttctgactttgtaaaggctaaatgtgaatttataatggcacataacatattagttgttttactcttaattttatgcattttc

SEQ ID NO: 99964 - protein, 327 aa, Arabidopsis thaliana
  peptide (1)..(327): Ceres Seq. ID no. 13603999
  misc_feature (86)..(137): Pfam Name: Helix-loop-helix DNA-binding domain Pfam Description: Helix-loop-helix DNA-binding domain
  misc_feature (1)..(327): Homolog of NCBI NO: 18422702 NR Description: bHLH protein family [Arabidopsis thaliana]
  misc_feature (1)..(327): Homolog of NCBI NO: 21593074 NR Description: bHLH DNA-binding protein-like protein
  misc_feature (1)..(276): Homolog of NCBI NO: 9758505 NR Description: contains similarity to bHLH DNA-binding
  misc_feature (62)..(275): Homolog of NCBI NO: 38346722 NR Description: OSJNBa0086O06.20 [Oryza sativa (japonica
  misc_feature (267)..(302): Homolog of NCBI NO: 38346722 NR Description: OSJNBa0086O06.20 [Oryza sativa (japonica
  misc_feature (36)..(302): Homolog of NCBI NO: 34902426 NR Description: Unknown protein [Oryza sativa (japonica
  misc_feature (59)..(302): Homolog of NCBI NO: 37533680 NR Description: putative helix-loop-helix DNA-binding protein
  misc_feature (55)..(276): Homolog of NCBI NO: 28558779 NR Description: helix-loop-helix-like protein [Cucumis melo]
  misc_feature (29)..(299): Homolog of NCBI NO: 30687365 NR Description: bHLH protein family [Arabidopsis thaliana]
  misc_feature (67)..(225): Homolog of NCBI NO: 15238424 NR Description: bHLH protein family [Arabidopsis thaliana]
MTLEALSSNGLLNFLLSETLSPTPFKSLVDLEPLPENDVIISKNTISEISNQEPPPQRQPPATNRGKKRRRRKPRVCKNEEEAENQRMTHIAVERNRRRQMNQHLSVLRSLMPQPFAHKGDQASIVGGAIDFIKELEHKLLSLEAQKHHNAKLNQSVTSSTSQDSNGEQENPHQPSSLSLSQFFLHSYDPSQENRNGSTSSVKTPMEDLEVTLIETHANIRILSRRRGFRWSTLATTKPPQLSKLVASLQSLSLSILHLSVTTLDNYAIYSISAKVEESCQLSSVDDIAGAVHHMLSIIEEEPFCCSSMSELPFDFSLNHSNVTHSL

SEQ ID NO: 99965 - protein, 240 aa, Arabidopsis thaliana
  peptide (1)..(240): Ceres Seq. ID no. 13604000
  misc_feature (1)..(50): Pfam Name: Helix-loop-helix DNA-binding domain Pfam Description: Helix-loop-helix DNA-binding domain
  misc_feature (1)..(240): Homolog of NCBI NO: 18422702 NR Description: bHLH protein family [Arabidopsis thaliana]
  misc_feature (1)..(240): Homolog of NCBI NO: 21593074 NR Description: bHLH DNA-binding protein-like protein
  misc_feature (1)..(189): Homolog of NCBI NO: 9758505 NR Description: contains similarity to bHLH DNA-binding
  misc_feature (1)..(188): Homolog of NCBI NO: 38346722 NR Description: OSJNBa0086O06.20 [Oryza sativa (japonica
  misc_feature (180)..(215): Homolog of NCBI NO: 38346722 NR Description: OSJNBa0086O06.20 [Oryza sativa (japonica
  misc_feature (1)..(215): Homolog of NCBI NO: 34902426 NR Description: Unknown protein [Oryza sativa (japonica
  misc_feature (1)..(215): Homolog of NCBI NO: 37533680 NR Description: putative helix-loop-helix DNA-binding protein
  misc_feature (1)..(189): Homolog of NCBI NO: 28558779 NR Description: helix-loop-helix-like protein [Cucumis melo]
  misc_feature (1)..(212): Homolog of NCBI NO: 30687365 NR Description: bHLH protein family [Arabidopsis thaliana]
  misc_feature (1)..(138): Homolog of NCBI NO: 15238424 NR Description: bHLH protein family [Arabidopsis thaliana]
MTHIAVERNRRRQMNQHLSVLRSLMPQPFAHKGDQASIVGGAIDFIKELEHKLLSLEAQKHHNAKLNQSVTSSTSQDSNGEQENPHQPSSLSLSQFFLHSYDPSQENRNGSTSSVKTPMEDLEVTLIETHANIRILSRRRGFRWSTLATTKPPQLSKLVASLQSLSLSILHLSVTTLDNYAIYSISAKVEESCQLSSVDDIAGAVHHMLSIIEEEPFCCSSMSELPFDFSLNHSNVTHSL

SEQ ID NO: 99966 - protein, 227 aa, Arabidopsis thaliana
  peptide (1)..(227): Ceres Seq. ID no. 13604001
  misc_feature (1)..(37): Pfam Name: Helix-loop-helix DNA-binding domain Pfam Description: Helix-loop-helix DNA-binding domain
  misc_feature (1)..(227): Homolog of NCBI NO: 18422702 NR Description: bHLH protein family [Arabidopsis thaliana]
  misc_feature (1)..(227): Homolog of NCBI NO: 21593074 NR Description: bHLH DNA-binding protein-like protein
  misc_feature (1)..(176): Homolog of NCBI NO: 9758505 NR Description: contains similarity to bHLH DNA-binding
  misc_feature (1)..(175): Homolog of NCBI NO: 38346722 NR Description: OSJNBa0086O06.20 [Oryza sativa (japonica
  misc_feature (167)..(202): Homolog of NCBI NO: 38346722 NR Description: OSJNBa0086O06.20 [Oryza sativa (japonica
  misc_feature (1)..(202): Homolog of NCBI NO: 34902426 NR Description: Unknown protein [Oryza sativa (japonica
  misc_feature (1)..(202): Homolog of NCBI NO: 37533680 NR Description: putative helix-loop-helix DNA-binding protein
  misc_feature (1)..(176): Homolog of NCBI NO: 28558779 NR Description: helix-loop-helix-like protein [Cucumis melo]
  misc_feature (1)..(199): Homolog of NCBI NO: 30687365 NR Description: bHLH protein family [Arabidopsis thaliana]
  misc_feature (1)..(125): Homolog of NCBI NO: 15238424 NR Description: bHLH protein family [Arabidopsis thaliana]
MNQHLSVLRSLMPQPFAHKGDQASIVGGAIDFIKELEHKLLSLEAQKHHNAKLNQSVTSSTSQDSNGEQENPHQPSSLSLSQFFLHSYDPSQENRNGSTSSVKTPMEDLEVTLIETHANIRILSRRRGFRWSTLATTKPPQLSKLVASLQSLSLSILHLSVTTLDNYAIYSISAKVEESCQLSSVDDIAGAVHHMLSIIEEEPFCCSSMSELPFDFSLNHSNVTHSL

SEQ ID NO: 99967 - DNA, 1109 bp, Arabidopsis thaliana
  misc_feature (1)..(1109): Ceres Seq. ID no. 13604002
  misc_feature: MA Experiment ID: 108433 Result: Down-regulated in Transcription
  misc_feature: MA Experiment 108433 PARAMETER Experiment Name: At_rhl_Mutant2_cDNA_P Parameter: Age (day) Value: 7
  misc_feature: MA Experiment 108433 PARAMETER Experiment Name: At_rhl_Mutant2_cDNA_P Parameter: Organism Value: A. thaliana
  misc_feature: MA Experiment 108433 PARAMETER Experiment Name: At_rhl_Mutant2_cDNA_P Parameter: Plant Line Value: rhl Mutant vs. wt landsburg
  misc_feature: MA Experiment 108433 PARAMETER Experiment Name: At_rhl_Mutant2_cDNA_P Parameter: Tissue Value: Roots
  misc_feature: MA Experiment ID: 108435 Result: Down-regulated in Transcription
  misc_feature: MA Experiment 108435 PARAMETER Experiment Name: At_stm_Mutants_cDNA_P Parameter: Plant Line Value: wt Landsburg vs stm
  misc_feature: MA Experiment 108435 PARAMETER Experiment Name: At_stm_Mutants_cDNA_P Parameter: Tissue Value: Shoot Apical Meristem Region
  misc_feature: MA Experiment ID: 108462 Result: Down-regulated in Transcription
  misc_feature: MA Experiment 108462 PARAMETER Experiment Name: At_Germinating_Seeds_cDNA_P Parameter: Age (day) Value: 2 vs. 0
  misc_feature: MA Experiment 108462 PARAMETER Experiment Name: At_Germinating_Seeds_cDNA_P Parameter: Tissue Value: Germinating Seeds
  misc_feature: MA Experiment ID: 108501 Result: Down-regulated in Transcription
  misc_feature: MA Experiment 108501 PARAMETER Experiment Name: At_ap2_floral_buds_cDNA_P Parameter: Plant Line Value: ap2 (Ler.)
  misc_feature: MA Experiment 108501 PARAMETER Experiment Name: At_ap2_floral_buds_cDNA_P Parameter: Tissue Value: Closed Flower
  misc_feature: MA Experiment ID: 20000069 Result: Up-regulated in Transcription
  misc_feature: MA Experiment 20000069 PARAMETER Experiment Name: At_100uM_ABA_Mutants_cDNA_P Parameter: Plant Line Value: CS23
  misc_feature: MA Experiment 20000069 PARAMETER Experiment Name: At_100uM_ABA_Mutants_cDNA_P Parameter: Timepoint (hr) Value: 6
  misc_feature: MA Experiment 20000069 PARAMETER Experiment Name: At_100uM_ABA_Mutants_cDNA_P Parameter: Tissue Value: Aerial
  misc_feature: MA Experiment 20000069 PARAMETER Experiment Name: At_100uM_ABA_Mutants_cDNA_P Parameter: Treatment Value: 100uM ABA vs. No Treatment
  misc_feature: MA Experiment ID: 20000071 Result: Up-regulated in Transcription
  misc_feature: MA Experiment 20000071 PARAMETER Experiment Name: At_100uM_ABA_Mutants_cDNA_P Parameter: Plant Line Value: CS8104
  misc_feature: MA Experiment 20000071 PARAMETER Experiment Name: At_100uM_ABA_Mutants_cDNA_P Parameter: Timepoint (hr) Value: 6
  misc_feature: MA Experiment 20000071 PARAMETER Experiment Name: At_100uM_ABA_Mutants_cDNA_P Parameter: Tissue Value: Aerial
  misc_feature: MA Experiment 20000071 PARAMETER Experiment Name: At_100uM_ABA_Mutants_cDNA_P Parameter: Treatment Value: 100uM ABA vs. No Treatment
  misc_feature: MA Experiment ID: 20000072 Result: Up-regulated in Transcription
  misc_feature: MA Experiment 20000072 PARAMETER Experiment Name: At_100uM_ABA_Mutants_cDNA_P Parameter: Plant Line Value: CS8105
  misc_feature: MA Experiment 20000072 PARAMETER Experiment Name: At_100uM_ABA_Mutants_cDNA_P Parameter: Timepoint (hr) Value: 6
  misc_feature: MA Experiment 20000072 PARAMETER Experiment Name: At_100uM_ABA_Mutants_cDNA_P Parameter: Tissue Value: Aerial
  misc_feature: MA Experiment 20000072 PARAMETER Experiment Name: At_100uM_ABA_Mutants_cDNA_P Parameter: Treatment Value: 100uM ABA vs. No Treatment
  misc_feature: MA Experiment ID: 20000086 Result: Up-regulated in Transcription
  misc_feature: MA Experiment 20000086 PARAMETER Experiment Name: At_100uM_ABA_Mutants_cDNA_P Parameter: Plant Line Value: CS22
  misc_feature: MA Experiment 20000086 PARAMETER Experiment Name: At_100uM_ABA_Mutants_cDNA_P Parameter: Timepoint (hr) Value: 6
  misc_feature: MA Experiment 20000086 PARAMETER Experiment Name: At_100uM_ABA_Mutants_cDNA_P Parameter: Tissue Value: Aerial
  misc_feature: MA Experiment 20000086 PARAMETER Experiment Name: At_100uM_ABA_Mutants_cDNA_P Parameter: Treatment Value: 100uM ABA vs. No Treatment
  misc_feature: MA Experiment ID: 20000087 Result: Up-regulated in Transcription
  misc_feature: MA Experiment 20000087 PARAMETER Experiment Name: At_100uM_ABA_Mutants_cDNA_P Parameter: Plant Line Value: WS
  misc_feature: MA Experiment 20000087 PARAMETER Experiment Name: At_100uM_ABA_Mutants_cDNA_P Parameter: Timepoint (hr) Value: 6
  misc_feature: MA Experiment 20000087 PARAMETER Experiment Name: At_100uM_ABA_Mutants_cDNA_P Parameter: Tissue Value: Aerial
  misc_feature: MA Experiment 20000087 PARAMETER Experiment Name: At_100uM_ABA_Mutants_cDNA_P Parameter: Treatment Value: 100uM ABA vs. No Treatment
  misc_feature: MA Experiment ID: 20000088 Result: Up-regulated in Transcription
  misc_feature: MA Experiment 20000088 PARAMETER Experiment Name: At_100uM_ABA_Mutants_cDNA_P Parameter: Plant Line Value: Landsberg
  misc_feature: MA Experiment 20000088 PARAMETER Experiment Name: At_100uM_ABA_Mutants_cDNA_P Parameter: Timepoint (hr) Value: 6
  misc_feature: MA Experiment 20000088 PARAMETER Experiment Name: At_100uM_ABA_Mutants_cDNA_P Parameter: Tissue Value: Aerial
  misc_feature: MA Experiment 20000088 PARAMETER Experiment Name: At_100uM_ABA_Mutants_cDNA_P Parameter: Treatment Value: 100uM ABA vs. No Treatment
  misc_feature: MA Experiment ID: 20000089 Result: Up-regulated in Transcription
  misc_feature: MA Experiment ID: 20000090 Result: Up-regulated in Transcription
  misc_feature: MA Experiment ID: 20000144 Result: Up-regulated in Transcription
  misc_feature: MA Experiment 20000144 PARAMETER Experiment Name: At_42deg_Heat_cDNA_P Parameter: Temperature (deg C) Value: 42 vs. 22
  misc_feature: MA Experiment 20000144 PARAMETER Experiment Name: At_42deg_Heat_cDNA_P Parameter: Timepoint (hr) Value: 1
  misc_feature: MA Experiment 20000144 PARAMETER Experiment Name: At_42deg_Heat_cDNA_P Parameter: Tissue Value: Aerial
  misc_feature: MA Experiment ID: 20000179 Result: Down-regulated in Transcription
  misc_feature: MA Experiment 20000179 PARAMETER Experiment Name: At_Germinating_Seeds_P Parameter: Age (hr) Value: 6 vs. 0
  misc_feature: MA Experiment 20000179 PARAMETER Experiment Name: At_Germinating_Seeds_P Parameter: Tissue Value: Germinating Seeds
  misc_feature: MA Experiment ID: 20000185 Result: Down-regulated in Transcription
  misc_feature: MA Experiment 20000185 PARAMETER Experiment Name: At_Roots__P Parameter: Age (day) Value: 7 vs. 21
  misc_feature: MA Experiment 20000185 PARAMETER Experiment Name: At_Roots__P Parameter: Organism Value: A. thaliana
  misc_feature: MA Experiment 20000185 PARAMETER Experiment Name: At_Roots__P Parameter: Tissue Value: Roots vs. Whole Plant
  misc_feature: MA Experiment ID: 20000224 Result: Down-regulated in Transcription
  misc_feature: MA Experiment ID: 20000234 Result: Down-regulated in Transcription
  misc_feature: MA Experiment 20000234 PARAMETER Experiment Name: At_Siliques_P Parameter: Age (day) Value: 21
  misc_feature: MA Experiment 20000234 PARAMETER Experiment Name: At_Siliques_P Parameter: Organism Value: A. thaliana
  misc_feature: MA Experiment 20000234 PARAMETER Experiment Name: At_Siliques_P Parameter: Plant Line Value: WS
  misc_feature: MA Experiment 20000234 PARAMETER Experiment Name: At_Siliques_P Parameter: Tissue Value: Less Than 5mm Siliques vs. Whole Plant
  misc_feature: MA Experiment ID: 20000264 Result: Down-regulated in Transcription
  misc_feature: MA Experiment 20000264 PARAMETER Experiment Name: At_Open_Flower_P Parameter: Age (day) Value: 21
  misc_feature: MA Experiment 20000264 PARAMETER Experiment Name: At_Open_Flower_P Parameter: Plant Line Value: WS
  misc_feature: MA Experiment 20000264 PARAMETER Experiment Name: At_Open_Flower_P Parameter: Tissue Value: Open Flower vs. Whole Plant
  misc_feature: MA Experiment ID: 20000265 Result: Down-regulated in Transcription
  misc_feature: MA Experiment 20000265 PARAMETER Experiment Name: At_Open_Flower_P Parameter: Age (day) Value: 21
  misc_feature: MA Experiment 20000265 PARAMETER Experiment Name: At_Open_Flower_P Parameter: Plant Line Value: WS
  misc_feature: MA Experiment 20000265 PARAMETER Experiment Name: At_Open_Flower_P Parameter: Tissue Value: Closed Flower vs. Whole Plant
  misc_feature: MA Experiment ID: 20000286 Result: Down-regulated in Transcription
  misc_feature: MA Experiment 20000286 PARAMETER Experiment Name: At_Open_Flower_P Parameter: Age (day) Value: 21
  misc_feature: MA Experiment 20000286 PARAMETER Experiment Name: At_Open_Flower_P Parameter: Plant Line Value: WS
  misc_feature: MA Experiment 20000286 PARAMETER Experiment Name: At_Open_Flower_P Parameter: Tissue Value: Half Open vs. Whole Plant
  misc_feature: MA Experiment ID: 20000437 Result: Down-regulated in Transcription
  misc_feature: MA Experiment 20000437 PARAMETER Experiment Name: At_Drought_P Parameter: Age (day) Value: 8
  misc_feature: MA Experiment 20000437 PARAMETER Experiment Name: At_Drought_P Parameter: Organism Value: A. thaliana
  misc_feature: MA Experiment 20000437 PARAMETER Experiment Name: At_Drought_P Parameter: Plant Line Value: WS
  misc_feature: MA Experiment 20000437 PARAMETER Experiment Name: At_Drought_P Parameter: Timepoint (hr) Value: 24
  misc_feature: MA Experiment 20000437 PARAMETER Experiment Name: At_Drought_P Parameter: Tissue Value: Whole Plant
  misc_feature: MA Experiment 20000437 PARAMETER Experiment Name: At_Drought_P Parameter: Treatment Value: Drought vs. No Drought
  misc_feature: MA Experiment ID: 20000439 Result: Down-regulated in Transcription
  misc_feature: MA Experiment 20000439 PARAMETER Experiment Name: At_Roots__P Parameter: Age (day) Value: 14 vs. 21
  misc_feature: MA Experiment 20000439 PARAMETER Experiment Name: At_Roots__P Parameter: Organism Value: A. thaliana
  misc_feature: MA Experiment 20000439 PARAMETER Experiment Name: At_Roots__P Parameter: Tissue Value: Roots vs. Whole Plant
  misc_feature: MA Experiment ID: 20000441 Result: Up-regulated in Transcription
  misc_feature: MA Experiment 20000441 PARAMETER Experiment Name: At_1uM_BR-BRZ__P Parameter: Tissue Value: Shoot Apices
  misc_feature: MA Experiment 20000441 PARAMETER Experiment Name: At_1uM_BR-BRZ__P Parameter: Treatment Value: 1uM BR vs. No Treatment
  misc_feature: MA Experiment ID: 20000460 Result: Up-regulated in Transcription
  misc_feature: MA Experiment 20000460 PARAMETER Experiment Name: At_10percent_PEG_P Parameter: Age (day) Value: 12
  misc_feature: MA Experiment 20000460 PARAMETER Experiment Name: At_10percent_PEG_P Parameter: Organism Value: A. thaliana
  misc_feature: MA Experiment 20000460 PARAMETER Experiment Name: At_10percent_PEG_P Parameter: Plant Line Value: WS
  misc_feature: MA Experiment 20000460 PARAMETER Experiment Name: At_10percent_PEG_P Parameter: Timepoint (day) Value: 12
  misc_feature: MA Experiment 20000460 PARAMETER Experiment Name: At_10percent_PEG_P Parameter: Tissue Value: Whole Plant
  misc_feature: MA Experiment 20000460 PARAMETER Experiment Name: At_10percent_PEG_P Parameter: Treatment Value: 10percent PEG vs. No Treatment
  misc_feature: MA Experiment ID: 20000527 Result: Up-regulated in Transcription
  misc_feature: MA Experiment 20000527 PARAMETER Experiment Name: At_10percent_PEG_P Parameter: Age (day) Value: 20
  misc_feature: MA Experiment 20000527 PARAMETER Experiment Name: At_10percent_PEG_P Parameter: Organism Value: A. thaliana
  misc_feature: MA Experiment 20000527 PARAMETER Experiment Name: At_10percent_PEG_P Parameter: Plant Line Value: WS
  misc_feature: MA Experiment 20000527 PARAMETER Experiment Name: At_10percent_PEG_P Parameter: Timepoint (day) Value: 20
  misc_feature: MA Experiment 20000527 PARAMETER Experiment Name: At_10percent_PEG_P Parameter: Tissue Value: Whole Plant
  misc_feature: MA Experiment 20000527 PARAMETER Experiment Name: At_10percent_PEG_P Parameter: Treatment Value: 10percent PEG vs. No Treatment
  misc_feature: MA Experiment ID: 20001248 Result: Up-regulated in Transcription
  misc_feature: MA Experiment 20001248 PARAMETER Experiment Name: At_Far-red-induction_P Parameter: Age (day) Value: 7
  misc_feature: MA Experiment 20001248 PARAMETER Experiment Name: At_Far-red-induction_P Parameter: Light Value: Far-red vs. White
  misc_feature: MA Experiment 20001248 PARAMETER Experiment Name: At_Far-red-induction_P Parameter: Organism Value: A. thaliana
  misc_feature: MA Experiment 20001248 PARAMETER Experiment Name: At_Far-red-induction_P Parameter: Plant Line Value: Columbia
  misc_feature: MA Experiment 20001248 PARAMETER Experiment Name: At_Far-red-induction_P Parameter: Timepoint (hr) Value: 4
  misc_feature: MA Experiment 20001248 PARAMETER Experiment Name: At_Far-red-induction_P Parameter: Tissue Value: Whole Plant
  misc_feature: MA Experiment ID: 20001911 Result: Down-regulated in Transcription
  misc_feature: MA Experiment 20001911 PARAMETER Experiment Name: At_Drought_Reproduction_P Parameter: Age (day) Value: 40
  misc_feature: MA Experiment 20001911 PARAMETER Experiment Name: At_Drought_Reproduction_P Parameter: Organism Value: A. thaliana
  misc_feature: MA Experiment 20001911 PARAMETER Experiment Name: At_Drought_Reproduction_P Parameter: Plant Line Value: WS
  misc_feature: MA Experiment 20001911 PARAMETER Experiment Name: At_Drought_Reproduction_P Parameter: Timepoint (day) Value: 10
  misc_feature: MA Experiment 20001911 PARAMETER Experiment Name: At_Drought_Reproduction_P Parameter: Tissue Value: Flowers
  misc_feature: MA Experiment 20001911 PARAMETER Experiment Name: At_Drought_Reproduction_P Parameter: Treatment Value: Drought vs. No Drought
tacattgtcgacattggtaggataagtaggactctttctcattgcttttcgcttcgtcttcttctctctaaaactctttctctgcaagaaaaccaatctctctctctttcactttcttaaaccctttatctctctaaaaccctcctttttaggtaaaaaagttttggtgctgactcaaaaaaggttgggtcttttactgcattttgaaatggcgattgaagattacgagaacccaaatcgagaaatcaaacctaagaacagaagattcatggaaggagagaatcagtggcctatatggctcaaacctttactaaaccaacacttttttgctcaatgcaagtttcatggacacttacctagaaccgaatgcaaaatgtattgcttagactgtaccaatgactcgttttgttctctctgtctttctgaacacgagaatcatcgtaccattcagataaggatatcatcttatcataatgtgacaaaggtcgatgagatacagaaatacttagacatatcaagcattcagacatatgtgatcaatagctcaaaggttttgttcttgaatgagaggcctcagtctaagcctggtaaaggttttactaatgcctgcatggtctgttatcgtggccttgccgaaaactgcttccgcttctgctctattggctgcaaggttgcaggaacatctggagtcttccagaagagagtgaagcatacaacgaatgactcagataattcaaacaacagttctggagtggagaataacagttctggagcagagaatggtaattcaaatctgcagagtctcagtccacctacacctcaatttcctcctcgttctctgcgaaagcgactaaggaagggaattcctcaccgagctccatttagttgagattgtgatcaagaaaaagaagaagaagcttgtgttacgtagtgctatggattagtcaaacaactagtaagtgtatatatatatatacaatatcttcttgtaaagttttggtgtgatgcaatgagactagacagtgagtggtttatggtgtttttatgactatttccttgttctaaattttgtttttgattagattatatgacaaaaatagataattagt

SEQ ID NO: 99968 - protein, 226 aa, Arabidopsis thaliana; identical to SEQ ID NO: 37799
  peptide (1)..(226): Ceres Seq. ID no. 13604003
  misc_feature (25)..(219): Pfam Name: Protein of unknown function, DUF597 Pfam Description: Protein of unknown function, DUF597
  misc_feature (1)..(226): Homolog of NCBI NO: 15237491 NR Description: expressed protein [Arabidopsis thaliana] gene_id:MZA15.12~pir||T05076~similar to unknown protein thaliana] >gi|21593766|gb|AAM65733.1| unknown [Arabidopsis
  misc_feature (1)..(196): Homolog of NCBI NO: 15236696 NR Description: expressed protein [Arabidopsis thaliana]
  misc_feature (1)..(225): Homolog of NCBI NO: 6714272 NR Description: F6N18.8 [Arabidopsis thaliana]
  misc_feature (22)..(225): Homolog of NCBI NO: 18398555 NR Description: expressed protein [Arabidopsis thaliana]
  misc_feature (22)..(225): Homolog of NCBI NO: 21554139 NR Description: unknown [Arabidopsis thaliana]
  misc_feature (24)..(225): Homolog of NCBI NO: 38346725 NR Description: OSJNBa0086O06.23 [Oryza sativa (japonica
  misc_feature (14)..(225): Homolog of NCBI NO: 37537092 NR Description: unknown protein [Oryza sativa (japonica
  misc_feature (21)..(225): Homolog of NCBI NO: 15217560 NR Description: hypothetical protein [Arabidopsis thaliana]
  misc_feature (28)..(168): Homolog of NCBI NO: 18411153 NR Description: expressed protein [Arabidopsis thaliana]
  misc_feature (28)..(168): Homolog of NCBI NO: 25337904 NR Description: unknown protein F14G6.19 [imported] - Arabidopsis

SEQ ID NO: 99969 - protein, 206 aa, Arabidopsis thaliana; identical to SEQ ID NO: 37800
  peptide (1)..(206): Ceres Seq. ID no. 13604004
  misc_feature (5)..(199): Pfam Name: Protein of unknown function, DUF597 Pfam Description: Protein of unknown function, DUF597
  misc_feature (1)..(206): Homolog of NCBI NO: 15237491 NR Description: expressed protein [Arabidopsis thaliana] gene_id:MZA15.12~pir||T05076~similar to unknown protein thaliana] >gi|21593766|gb|AAM65733.1| unknown [Arabidopsis
  misc_feature (1)..(176): Homolog of NCBI NO: 15236696 NR Description: expressed protein [Arabidopsis thaliana]
  misc_feature (1)..(205): Homolog of NCBI NO: 6714272 NR Description: F6N18.8 [Arabidopsis thaliana]
  misc_feature (2)..(205): Homolog of NCBI NO: 18398555 NR Description: expressed protein [Arabidopsis thaliana]
  misc_feature (2)..(205): Homolog of NCBI NO: 21554139 NR Description: unknown [Arabidopsis thaliana]
  misc_feature (4)..(205): Homolog of NCBI NO: 38346725 NR Description: OSJNBa0086O06.23 [Oryza sativa (japonica
  misc_feature (1)..(205): Homolog of NCBI NO: 37537092 NR Description: unknown protein [Oryza sativa (japonica
  misc_feature (1)..(205): Homolog of NCBI NO: 15217560 NR Description: hypothetical protein [Arabidopsis thaliana]
  misc_feature (8)..(148): Homolog of NCBI NO: 18411153 NR Description: expressed protein [Arabidopsis thaliana]
  misc_feature (8)..(148): Homolog of NCBI NO: 25337904 NR Description: unknown protein F14G6.19 [imported] - Arabidopsis

SEQ ID NO: 99970 - protein, 171 aa, Arabidopsis thaliana; identical to SEQ ID NO: 37801
  peptide (1)..(171): Ceres Seq. ID no. 13604005
  misc_feature (1)..(164): Pfam Name: Protein of unknown function, DUF597 Pfam Description: Protein of unknown function, DUF597
  misc_feature (1)..(171): Homolog of NCBI NO: 15237491 NR Description: expressed protein [Arabidopsis thaliana] gene_id:MZA15.12~pir||T05076~similar to unknown protein thaliana] >gi|21593766|gb|AAM65733.1| unknown [Arabidopsis
  misc_feature (1)..(141): Homolog of NCBI NO: 15236696 NR Description: expressed protein [Arabidopsis thaliana]
  misc_feature (1)..(170): Homolog of NCBI NO: 6714272 NR Description: F6N18.8 [Arabidopsis thaliana]
  misc_feature (1)..(170): Homolog of NCBI NO: 18398555 NR Description: expressed protein [Arabidopsis thaliana]
  misc_feature (1)..(170): Homolog of NCBI NO: 21554139 NR Description: unknown [Arabidopsis thaliana]
  misc_feature (1)..(170): Homolog of NCBI NO: 38346725 NR Description: OSJNBa0086O06.23 [Oryza sativa (japonica
  misc_feature (1)..(170): Homolog of NCBI NO: 37537092 NR Description: unknown protein [Oryza sativa (japonica
  misc_feature (1)..(170): Homolog of NCBI NO: 15217560 NR Description: hypothetical protein [Arabidopsis thaliana]
  misc_feature (1)..(113): Homolog of NCBI NO: 18411153 NR Description: expressed protein [Arabidopsis thaliana]
  misc_feature (1)..(113): Homolog of NCBI NO: 25337904 NR Description: unknown protein F14G6.19 [imported] - Arabidopsis

SEQ ID NO: 99971 - DNA, 783 bp, Arabidopsis thaliana
  misc_feature (1)..(783): Ceres Seq. ID no. 13604010
  misc_feature: MA Experiment ID: 20000113 Result: Down-regulated in Transcription
  misc_feature: MA Experiment 20000113 PARAMETER Experiment Name: At_42deg_Heat_cDNA_P Parameter: Temperature (deg C) Value: 42 vs. 22
  misc_feature: MA Experiment 20000113 PARAMETER Experiment Name: At_42deg_Heat_cDNA_P Parameter: Timepoint (hr) Value: 8
  misc_feature: MA Experiment 20000113 PARAMETER Experiment Name: At_42deg_Heat_cDNA_P Parameter: Tissue Value: Aerial
aaagaaaagatgttgtgtagaatggtggtggtgactggccggaaaaagaaacccggttcggttccggtttatctgaatgtatacgatctcacacccatcaatggctacgcttactggttaggacttgggatctatcactctggtgttgaagttcatggagttgaatatggttttggagctcacgatcattcgactaccgggatattcgaggtggaaccgaagcaatgtccgggtttcacatttaggaagtctatattgattggaagaactgatttagatcctgaaaacgttcgtgtctttatggagaaacttgcggaagaatatagtggaaacagttatcatttgattactaagaattgcaatcacttttgcaatgatgtttgtgtgcaactgactcgaagatcgatccctagttgggttaaccgtcttgctcgctttggtttgttttgcaactgtgttctgccggcggagttgaatgagactaaggtgaggcaggtgagatcaaaggaagagaagattccggaagtagagaagaagaaacttcggagtagatcaagtaggtttccacctggtccttcgctttcttcgtcgggttctttaaaccgaagcagaagaggagaaaggagaagacaatgtcttcctccatcaccaactgtgagtgtttagctctagtcctagtaaaattatacctttttgtttcgcaatttgattcggtagtaatgtttaagctacaagatatggattgaacaaacattttcttgatagtaatggtataagattttc

SEQ ID NO: 99972 - protein, 221 aa, Arabidopsis thaliana
  peptide (1)..(221): Ceres Seq. ID no. 13604011
  misc_feature (21)..(144): Pfam Name: Eukaryotic protein of unknown function (DUF862) Pfam Description: Eukaryotic protein of unknown function (DUF862)
  misc_feature (4)..(221): Homolog of NCBI NO: 18420889 NR Description: expressed protein [Arabidopsis thaliana]
  misc_feature (4)..(220): Homolog of NCBI NO: 18400749 NR Description: expressed protein [Arabidopsis thaliana]
  misc_feature (4)..(220): Homolog of NCBI NO: 15236618 NR Description: expressed protein [Arabidopsis thaliana]
  misc_feature (4)..(220): Homolog of NCBI NO: 17529024 NR Description: unknown protein [Arabidopsis thaliana]
  misc_feature (4)..(221): Homolog of NCBI NO: 18412886 NR Description: expressed protein [Arabidopsis thaliana]
  misc_feature (4)..(221): Homolog of NCBI NO: 25354458 NR Description: hypothetical protein F23A5.4 [imported] - thaliana >gi|6503281|gb|AAF14657.1|AC011713_5 Contains similarity
  misc_feature (1)..(215): Homolog of NCBI NO: 18401869 NR Description: expressed protein [Arabidopsis thaliana] unknown protein [Arabidopsis thaliana]
  misc_feature (1)..(215): Homolog of NCBI NO: 21593644 NR Description: unknown [Arabidopsis thaliana]
  misc_feature (1)..(215): Homolog of NCBI NO: 9802596 NR Description: T2E6.19 [Arabidopsis thaliana]
  misc_feature (19)..(170): Homolog of NCBI NO: 15238059 NR Description: expressed protein [Arabidopsis thaliana]
KEKMLCRMVVVTGRKKKPGSVPVYLNVYDLTPINGYAYWLGLGIYHSGVEVHGVEYGFGAHDHSTTGIFEVEPKQCPGFTFRKSILIGRTDLDPENVRVFMEKLAEEYSGNSYHLITKNCNHFCNDVCVQLTRRSIPSWVNRLARFGLFCNCVLPAELNETKVRQVRSKEEKIPEVEKKKLRSRSSRFPPGPSLSSSGSLNRSRRGERRRQCLPPSPTVSV

SEQ ID NO: 99973 - protein, 218 aa, Arabidopsis thaliana
  peptide (1)..(218): Ceres Seq. ID no. 13604012
  misc_feature (18)..(141): Pfam Name: Eukaryotic protein of unknown function (DUF862) Pfam Description: Eukaryotic protein of unknown function (DUF862)
  misc_feature (1)..(218): Homolog of NCBI NO: 18420889 NR Description: expressed protein [Arabidopsis thaliana]
  misc_feature (1)..(217): Homolog of NCBI NO: 18400749 NR Description: expressed protein [Arabidopsis thaliana]
  misc_feature (1)..(217): Homolog of NCBI NO: 15236618 NR Description: expressed protein [Arabidopsis thaliana]
  misc_feature (1)..(217): Homolog of NCBI NO: 17529024 NR Description: unknown protein [Arabidopsis thaliana]
  misc_feature (1)..(218): Homolog of NCBI NO: 18412886 NR Description: expressed protein [Arabidopsis thaliana]
  misc_feature (1)..(218): Homolog of NCBI NO: 25354458 NR Description: hypothetical protein F23A5.4 [imported] - thaliana >gi|6503281|gb|AAF14657.1|AC011713_5 Contains similarity
  misc_feature (1)..(212): Homolog of NCBI NO: 18401869 NR Description: expressed protein [Arabidopsis thaliana] unknown protein [Arabidopsis thaliana]
  misc_feature (1)..(212): Homolog of NCBI NO: 21593644 NR Description: unknown [Arabidopsis thaliana]
  misc_feature (1)..(212): Homolog of NCBI NO: 9802596 NR Description: T2E6.19 [Arabidopsis thaliana]
  misc_feature (16)..(167): Homolog of NCBI NO: 15238059 NR Description: expressed protein [Arabidopsis thaliana]
MLCRMVVVTGRKKKPGSVPVYLNVYDLTPINGYAYWLGLGIYHSGVEVHGVEYGFGAHDHSTTGIFEVEPKQCPGFTFRKSILIGRTDLDPENVRVFMEKLAEEYSGNSYHLITKNCNHFCNDVCVQLTRRSIPSWVNRLARFGLFCNCVLPAELNETKVRQVRSKEEKIPEVEKKKLRSRSSRFPPGPSLSSSGSLNRSRRGERRRQCLPPSPTVSV

SEQ ID NO: 99974 - protein, 214 aa, Arabidopsis thaliana
  peptide (1)..(214): Ceres Seq. ID no. 13604013
  misc_feature (14)..(137): Pfam Name: Eukaryotic protein of unknown function (DUF862) Pfam Description: Eukaryotic protein of unknown function (DUF862)
  misc_feature (1)..(214): Homolog of NCBI NO: 18420889 NR Description: expressed protein [Arabidopsis thaliana]
  misc_feature (1)..(213): Homolog of NCBI NO: 18400749 NR Description: expressed protein [Arabidopsis thaliana]
  misc_feature (1)..(213): Homolog of NCBI NO: 15236618 NR Description: expressed protein [Arabidopsis thaliana]
  misc_feature (1)..(213): Homolog of NCBI NO: 17529024 NR Description: unknown protein [Arabidopsis thaliana]
  misc_feature (1)..(214): Homolog of NCBI NO: 18412886 NR Description: expressed protein [Arabidopsis thaliana]
  misc_feature (1)..(214): Homolog of NCBI NO: 25354458 NR Description: hypothetical protein F23A5.4 [imported] - thaliana >gi|6503281|gb|AAF14657.1|AC011713_5 Contains similarity
  misc_feature (1)..(208): Homolog of NCBI NO: 18401869 NR Description: expressed protein [Arabidopsis thaliana] unknown protein [Arabidopsis thaliana]
  misc_feature (1)..(208): Homolog of NCBI NO: 21593644 NR Description: unknown [Arabidopsis thaliana]
  misc_feature (1)..(208): Homolog of NCBI NO: 9802596 NR Description: T2E6.19 [Arabidopsis thaliana]
  misc_feature (12)..(163): Homolog of NCBI NO: 15238059 NR Description: expressed protein [Arabidopsis thaliana]
MVVVTGRKKKPGSVPVYLNVYDLTPINGYAYWLGLGIYHSGVEVHGVEYGFGAHDHSTTGIFEVEPKQCPGFTFRKSILIGRTDLDPENVRVFMEKLAEEYSGNSYHLITKNCNHFCNDVCVQLTRRSIPSWVNRLARFGLFCNCVLPAELNETKVRQVRSKEEKIPEVEKKKLRSRSSRFPPGPSLSSSGSLNRSRRGERRRQCLPPSPTVSV

SEQ ID NO: 99975 - DNA, 1727 bp, Arabidopsis thaliana
  misc_feature (1)..(1727): Ceres Seq. ID no. 13604018
  misc_feature: MA Experiment ID: 108433 Result: Down-regulated in Transcription
  misc_feature: MA Experiment 108433 PARAMETER Experiment Name: At_rhl_Mutant2_cDNA_P Parameter: Age (day) Value: 7
  misc_feature: MA Experiment 108433 PARAMETER Experiment Name: At_rhl_Mutant2_cDNA_P Parameter: Organism Value: A. thaliana
  misc_feature: MA Experiment 108433 PARAMETER Experiment Name: At_rhl_Mutant2_cDNA_P Parameter: Plant Line Value: rhl Mutant vs. wt landsburg
  misc_feature: MA Experiment 108433 PARAMETER Experiment Name: At_rhl_Mutant2_cDNA_P Parameter: Tissue Value: Roots
  misc_feature: MA Experiment ID: 108561 Result: Up-regulated in Transcription
  misc_feature: MA Experiment 108561 PARAMETER Experiment Name: At_100uM_ABA_cDNA_P Parameter: Timepoint (hr) Value: 6
  misc_feature: MA Experiment 108561 PARAMETER Experiment Name: At_100uM_ABA_cDNA_P Parameter: Tissue Value: Aerial
  misc_feature: MA Experiment 108561 PARAMETER Experiment Name: At_100uM_ABA_cDNA_P Parameter: Treatment Value: 100uM ABA vs. No Treatment
  misc_feature: MA Experiment ID: 108572 Result: Up-regulated in Transcription
  misc_feature: MA Experiment 108572 PARAMETER Experiment Name: At_Drought_cDNA_P Parameter: Timepoint (hr) Value: 1
  misc_feature: MA Experiment 108572 PARAMETER Experiment Name: At_Drought_cDNA_P Parameter: Tissue Value: Aerial
  misc_feature: MA Experiment 108572 PARAMETER Experiment Name: At_Drought_cDNA_P Parameter: Treatment Value: Drought vs. No Drought
  misc_feature: MA Experiment ID: 108573 Result: Up-regulated in Transcription
  misc_feature: MA Experiment 108573 PARAMETER Experiment Name: At_Drought_cDNA_P Parameter: Timepoint (hr) Value: 6
  misc_feature: MA Experiment 108573 PARAMETER Experiment Name: At_Drought_cDNA_P Parameter: Tissue Value: Aerial
  misc_feature: MA Experiment 108573 PARAMETER Experiment Name: At_Drought_cDNA_P Parameter: Treatment Value: Drought vs. No Drought
  misc_feature: MA Experiment ID: 108577 Result: Down-regulated in Transcription
  misc_feature: MA Experiment 108577 PARAMETER Experiment Name: At_42deg_Heat_cDNA_P Parameter: Temperature (deg C) Value: 42 vs. 22
  misc_feature: MA Experiment 108577 PARAMETER Experiment Name: At_42deg_Heat_cDNA_P Parameter: Timepoint (hr) Value: 6
  misc_feature: MA Experiment 108577 PARAMETER Experiment Name: At_42deg_Heat_cDNA_P Parameter: Tissue Value: Aerial
  misc_feature: MA Experiment ID: 20000166 Result: Up-regulated in Transcription
  misc_feature: MA Experiment 20000166 PARAMETER Experiment Name: At_100uM_ABA_P Parameter: Age (day) Value: 14
  misc_feature: MA Experiment 20000166 PARAMETER Experiment Name: At_100uM_ABA_P Parameter: Organism Value: A. thaliana
  misc_feature: MA Experiment 20000166 PARAMETER Experiment Name: At_100uM_ABA_P Parameter: Plant Line Value: WS
  misc_feature: MA Experiment 20000166 PARAMETER Experiment Name: At_100uM_ABA_P Parameter: Timepoint (hr) Value: 1
  misc_feature: MA Experiment 20000166 PARAMETER Experiment Name: At_100uM_ABA_P Parameter: Tissue Value: Aerial
  misc_feature: MA Experiment 20000166 PARAMETER Experiment Name: At_100uM_ABA_P Parameter: Treatment Value: 100uM ABA vs. No Treatment
  misc_feature: MA Experiment ID: 20000185 Result: Down-regulated in Transcription
  misc_feature: MA Experiment 20000185 PARAMETER Experiment Name: At_Roots__P Parameter: Age (day) Value: 7 vs. 21
  misc_feature: MA Experiment 20000185 PARAMETER Experiment Name: At_Roots__P Parameter: Organism Value: A. thaliana
  misc_feature: MA Experiment 20000185 PARAMETER Experiment Name: At_Roots__P Parameter: Tissue Value: Roots vs. Whole Plant
  misc_feature: MA Experiment ID: 20000224 Result: Up-regulated in Transcription
  misc_feature: MA Experiment ID: 20000439 Result: Down-regulated in Transcription
  misc_feature: MA Experiment 20000439 PARAMETER Experiment Name: At_Roots__P Parameter: Age (day) Value: 14 vs. 21
  misc_feature: MA Experiment 20000439 PARAMETER Experiment Name: At_Roots__P Parameter: Organism Value: A. thaliana
  misc_feature: MA Experiment 20000439 PARAMETER Experiment Name: At_Roots__P Parameter: Tissue Value: Roots vs. Whole Plant
  misc_feature: MA Experiment ID: 20000794 Result: Up-regulated in Transcription
  misc_feature: MA Experiment 20000794 PARAMETER Experiment Name: At_Petals_P Parameter: Age (day) Value: 23-25 days
  misc_feature: MA Experiment 20000794 PARAMETER Experiment Name: At_Petals_P Parameter: Plant Line Value: WS
  misc_feature: MA Experiment 20000794 PARAMETER Experiment Name: At_Petals_P Parameter: Tissue Value: Petals vs. Whole plant
tctgtgtctttttttttttttttggtgataattgaaacatatgaaacaatcgtcgtcatagaagcagcagagattcaccttctttctttatctttccctctcagaaacaggaaacaaaattcaaaaagaacaaaaaaaaaaaggtcaaaccaaaacgatggcgtttcatcacaatcatctctcacaagacctctccttcaatcatttcaccgaccaacaccaacctccacctccgcaaccgcctcctcctcctccgcaacagcaacaacatttccaagaagcaccgcctcctaattggttaaacacagcgcttcttcgttcctcagataacaacaataacttcctcaacctccacacagccaccgctaacaccacaaccgcaagcagctccgattctccttcctccgccgccgccgccgccgctgctaaccagtggctatctcgctcctcctctttcctccaacgaaacaacaacaacaacgcttccatagtcggagatgggatcgatgatgtcaccggaggagcagacactatgattcagggagagatgaaaaccggcggtggagaaaacaaaaacgacggcggaggagctacggcggcggatggagtagtgagctggcagaatgcgagacacaaggcggagatcctttcgcatcctctttacgagcagcttttgtcggcgcacgttgcttgtttgagaatcgcgactccggttgatcagcttccgagaatcgatgctcagcttgctcagtctcaacacgtcgtcgctaaatactcagctttaggcgccgccgctcaaggtctcgtcggcgacgataaagaacttgaccagttcatgacacattatgtgttgctactgtgttcatttaaagagcaattgcaacaacatgtgcgtgttcatgcaatggaagctgtgatggcttgttgggagattgagcagtctcttcaaagcttaacaggagtgtctcctggagaagggatgggagcaacaatgtctgacgatgaagatgaacaagtagagagtgatgctaatatgttcgatgggggattagatgtgttgggttttggtcctttgattcctactgagagtgagaggtcgttgatggaaagagttagacaagaacttaaacatgaactcaaacagggttacaaggagaagatagtagacataagagaggagatattaaggaagagaagagctgggaagttaccaggagataccacctctgttctcaaagcttggtggcaatctcattccaaatggccttaccctactgaggaagataaggcgaggttggtgcaagagacaggtttgcagctaaaacagataaacaattggttcatcaatcagagaaagaggaactggcatagcaatccatcttcttccactgtattgaagaacaaacgcaaaagcaatgcaggtgacaatagcggaagagagcggttcgcgtagaaacaacaaacatatgatgtgaattggggaggtggaagatgggatttgaaagcagggttttagggatttaaagttgagaattttatggaggagtttggattatacagagagaggggacagtattagaaagtaactttttgtgcaattacatagtaacgtagtttggttatgtgattatgcccatatattttattaagtagcacacaaaccaaaaagaaaatatgaaaactgaagatgcaggcttttgtttaatgttttttgtttgtttgtctgc

SEQ ID NO: 99976 - protein, 431 aa, Arabidopsis thaliana; identical to SEQ ID NO: 34946
  peptide (1)..(431): Ceres Seq. ID no. 13604019
  misc_feature (213)..(268): Pfam Name: KNOX2 domain Pfam Description: KNOX2 domain
  misc_feature (1)..(431): Homolog of NCBI NO: 15238743 NR Description: KNAT3 homeodomain protein [Arabidopsis thaliana]
  misc_feature (1)..(431): Homolog of NCBI NO: 21554222 NR Description: KNAT3 homeodomain protein [Arabidopsis thaliana]
  misc_feature (126)..(431): Homolog of NCBI NO: 21539535 NR Description: KNAT3 homeodomain protein [Arabidopsis thaliana]
  misc_feature (1)..(418): Homolog of NCBI NO: 3023961 NR Description: Homeobox protein knotted-1 like 3 (KNAP3)
  misc_feature (35)..(429): Homolog of NCBI NO: 30683467 NR Description: HOMEOBOX PROTEIN KNOTTED-1 LIKE 4 (KNAT4)
  misc_feature (35)..(429): Homolog of NCBI NO: 1045044 NR Description: KNAT4 homeobox protein [Arabidopsis thaliana]
  misc_feature (35)..(418): Homolog of NCBI NO: 20141566 NR Description: Homeobox protein knotted-1 like 4 (KNAT4)
  misc_feature (1)..(418): Homolog of NCBI NO: 7446245 NR Description: homeobox protein NTH23 - common tobacco
  misc_feature (1)..(416): Homolog of NCBI NO: 6016226 NR Description: Homeobox protein knotted-1 like LET12
  misc_feature (44)..(423): Homolog of NCBI NO: 4098244 NR Description: homeobox 1 protein [Lycopersicon esculentum]

SEQ ID NO: 99977 - protein, 306 aa, Arabidopsis thaliana; identical to SEQ ID NO: 34947
  peptide (1)..(306): Ceres Seq. ID no. 13604020
  misc_feature (88)..(143): Pfam Name: KNOX2 domain Pfam Description: KNOX2 domain
  misc_feature (1)..(306): Homolog of NCBI NO: 15238743 NR Description: KNAT3 homeodomain protein [Arabidopsis thaliana]
  misc_feature (1)..(306): Homolog of NCBI NO: 21554222 NR Description: KNAT3 homeodomain protein [Arabidopsis thaliana]
  misc_feature (1)..(306): Homolog of NCBI NO: 21539535 NR Description: KNAT3 homeodomain protein [Arabidopsis thaliana]
  misc_feature (1)..(293): Homolog of NCBI NO: 3023961 NR Description: Homeobox protein knotted-1 like 3 (KNAP3)
  misc_feature (1)..(304): Homolog of NCBI NO: 30683467 NR Description: HOMEOBOX PROTEIN KNOTTED-1 LIKE 4 (KNAT4)
  misc_feature (1)..(304): Homolog of NCBI NO: 1045044 NR Description: KNAT4 homeobox protein [Arabidopsis thaliana]
  misc_feature (1)..(293): Homolog of NCBI NO: 20141566 NR Description: Homeobox protein knotted-1 like 4 (KNAT4)
  misc_feature (1)..(293): Homolog of NCBI NO: 7446245 NR Description: homeobox protein NTH23 - common tobacco
  misc_feature (1)..(291): Homolog of NCBI NO: 6016226 NR Description: Homeobox protein knotted-1 like LET12
  misc_feature (1)..(298): Homolog of NCBI NO: 4098244 NR Description: homeobox 1 protein [Lycopersicon esculentum]

SEQ ID NO: 99978 - protein, 301 aa, Arabidopsis thaliana; identical to SEQ ID NO: 34948
  peptide (1)..(301): Ceres Seq. ID no. 13604021
  misc_feature (83)..(138): Pfam Name: KNOX2 domain Pfam Description: KNOX2 domain
  misc_feature (1)..(301): Homolog of NCBI NO: 15238743 NR Description: KNAT3 homeodomain protein [Arabidopsis thaliana]
  misc_feature (1)..(301): Homolog of NCBI NO: 21554222 NR Description: KNAT3 homeodomain protein [Arabidopsis thaliana]
  misc_feature (1)..(301): Homolog of NCBI NO: 21539535 NR Description: KNAT3 homeodomain protein [Arabidopsis thaliana]
  misc_feature (1)..(288): Homolog of NCBI NO: 3023961 NR Description: Homeobox protein knotted-1 like 3 (KNAP3)
  misc_feature (1)..(299): Homolog of NCBI NO: 30683467 NR Description: HOMEOBOX PROTEIN KNOTTED-1 LIKE 4 (KNAT4)
  misc_feature (1)..(299): Homolog of NCBI NO: 1045044 NR Description: KNAT4 homeobox protein [Arabidopsis thaliana]
  misc_feature (1)..(288): Homolog of NCBI NO: 20141566 NR Description: Homeobox protein knotted-1 like 4 (KNAT4)
  misc_feature (1)..(288): Homolog of NCBI NO: 7446245 NR Description: homeobox protein NTH23 - common tobacco
  misc_feature (1)..(286): Homolog of NCBI NO: 6016226 NR Description: Homeobox protein knotted-1 like LET12
  misc_feature (1)..(293): Homolog of NCBI NO: 4098244 NR Description: homeobox 1 protein [Lycopersicon esculentum]

SEQ ID NO: 99979 - DNA, 1433 bp, Arabidopsis thaliana
  misc_feature (1)..(1433): Ceres Seq. ID no. 13604025
  misc_feature: MA Experiment ID: 108434 Result: Up-regulated in Transcription
  misc_feature: MA Experiment 108434 PARAMETER Experiment Name: At_Root_Tips_cDNA_P Parameter: Tissue Value: Root Tips
  misc_feature: MA Experiment ID: 108461 Result: Down-regulated in Transcription
  misc_feature: MA Experiment 108461 PARAMETER Experiment Name: At_Germinating_Seeds_cDNA_P Parameter: Age (day) Value: 1 vs. 0
  misc_feature: MA Experiment 108461 PARAMETER Experiment Name: At_Germinating_Seeds_cDNA_P Parameter: Tissue Value: Germinating Seeds
  misc_feature: MA Experiment ID: 108462 Result: Down-regulated in Transcription
  misc_feature: MA Experiment 108462 PARAMETER Experiment Name: At_Germinating_Seeds_cDNA_P Parameter: Age (day) Value: 2 vs. 0
  misc_feature: MA Experiment 108462 PARAMETER Experiment Name: At_Germinating_Seeds_cDNA_P Parameter: Tissue Value: Germinating Seeds
  misc_feature: MA Experiment ID: 108463 Result: Down-regulated in Transcription
  misc_feature: MA Experiment 108463 PARAMETER Experiment Name: At_Germinating_Seeds_cDNA_P Parameter: Age (day) Value: 3 vs. 0
  misc_feature: MA Experiment 108463 PARAMETER Experiment Name: At_Germinating_Seeds_cDNA_P Parameter: Tissue Value: Germinating Seeds
  misc_feature: MA Experiment ID: 108464 Result: Down-regulated in Transcription
  misc_feature: MA Experiment 108464 PARAMETER Experiment Name: At_Germinating_Seeds_cDNA_P Parameter: Age (day) Value: 4 vs. 0
  misc_feature: MA Experiment 108464 PARAMETER Experiment Name: At_Germinating_Seeds_cDNA_P Parameter: Tissue Value: Germinating Seeds
  misc_feature: MA Experiment ID: 108474 Result: Down-regulated in Transcription
  misc_feature: MA Experiment 108474 PARAMETER Experiment Name: At_Drought_Flowers_cDNA_P Parameter: Timepoint (hr) Value: null
  misc_feature: MA Experiment 108474 PARAMETER Experiment Name: At_Drought_Flowers_cDNA_P Parameter: Treatment Value: Drought vs. No Drought
  misc_feature: MA Experiment ID: 108561 Result: Down-regulated in Transcription
  misc_feature: MA Experiment 108561 PARAMETER Experiment Name: At_100uM_ABA_cDNA_P Parameter: Timepoint (hr) Value: 6
  misc_feature: MA Experiment 108561 PARAMETER Experiment Name: At_100uM_ABA_cDNA_P Parameter: Tissue Value: Aerial
  misc_feature: MA Experiment 108561 PARAMETER Experiment Name: At_100uM_ABA_cDNA_P Parameter: Treatment Value: 100uM ABA vs. No Treatment
  misc_feature: MA Experiment ID: 108569 Result: Up-regulated in Transcription
  misc_feature: MA Experiment 108569 PARAMETER Experiment Name: At_0.001%_MeJA__cDNA_P Parameter: Timepoint (hr) Value: 6
  misc_feature: MA Experiment 108569 PARAMETER Experiment Name: At_0.001%_MeJA__cDNA_P Parameter: Tissue Value: Aerial
  misc_feature: MA Experiment 108569 PARAMETER Experiment Name: At_0.001%_MeJA__cDNA_P Parameter: Treatment Value: 0.001% MeJA vs. No Treatment
  misc_feature: MA Experiment ID: 108572 Result: Down-regulated in Transcription
  misc_feature: MA Experiment 108572 PARAMETER Experiment Name: At_Drought_cDNA_P Parameter: Timepoint (hr) Value: 1
  misc_feature: MA Experiment 108572 PARAMETER Experiment Name: At_Drought_cDNA_P Parameter: Tissue Value: Aerial
  misc_feature: MA Experiment 108572 PARAMETER Experiment Name: At_Drought_cDNA_P Parameter: Treatment Value: Drought vs. No Drought
  misc_feature: MA Experiment ID: 108573 Result: Down-regulated in Transcription
  misc_feature: MA Experiment 108573 PARAMETER Experiment Name: At_Drought_cDNA_P Parameter: Timepoint (hr) Value: 6
  misc_feature: MA Experiment 108573 PARAMETER Experiment Name: At_Drought_cDNA_P Parameter: Tissue Value: Aerial
  misc_feature: MA Experiment 108573 PARAMETER Experiment Name: At_Drought_cDNA_P Parameter: Treatment Value: Drought vs. No Drought
  misc_feature: MA Experiment ID: 108577 Result: Down-regulated in Transcription
  misc_feature: MA Experiment 108577 PARAMETER Experiment Name: At_42deg_Heat_cDNA_P Parameter: Temperature (deg C) Value: 42 vs. 22
  misc_feature: MA Experiment 108577 PARAMETER Experiment Name: At_42deg_Heat_cDNA_P Parameter: Timepoint (hr) Value: 6
  misc_feature: MA Experiment 108577 PARAMETER Experiment Name: At_42deg_Heat_cDNA_P Parameter: Tissue Value: Aerial
  misc_feature: MA Experiment ID: 108579 Result: Down-regulated in Transcription
  misc_feature: MA Experiment 108579 PARAMETER Experiment Name: At_4deg_Cold_cDNA_P Parameter: Temperature (deg C) Value: 4 vs. 22
  misc_feature: MA Experiment 108579 PARAMETER Experiment Name: At_4deg_Cold_cDNA_P Parameter: Timepoint (hr) Value: 6
  misc_feature: MA Experiment 108579 PARAMETER Experiment Name: At_4deg_Cold_cDNA_P Parameter: Tissue Value: Aerial
  misc_feature: MA Experiment ID: 108585 Result: Down-regulated in Transcription
  misc_feature: MA Experiment 108585 PARAMETER Experiment Name: At_5mM_NaNP_cDNA_P Parameter: Timepoint (hr) Value: 6
  misc_feature: MA Experiment 108585 PARAMETER Experiment Name: At_5mM_NaNP_cDNA_P Parameter: Tissue Value: Aerial
  misc_feature: MA Experiment 108585 PARAMETER Experiment Name: At_5mM_NaNP_cDNA_P Parameter: Treatment Value: null
  misc_feature: MA Experiment ID: 108595 Result: Down-regulated in Transcription
  misc_feature: MA Experiment 108595 PARAMETER Experiment Name: At_Ler-pi_Ovule_cDNA_P Parameter: Plant Line Value: null
  misc_feature: MA Experiment ID: 108605 Result: Down-regulated in Transcription
  misc_feature: MA Experiment 108605 PARAMETER Experiment Name: At_100uM_ABA_cDNA_P Parameter: Timepoint (hr) Value: 6
  misc_feature: MA Experiment 108605 PARAMETER Experiment Name: At_100uM_ABA_cDNA_P Parameter: Tissue Value: Aerial
  misc_feature: MA Experiment 108605 PARAMETER Experiment Name: At_100uM_ABA_cDNA_P Parameter: Treatment Value: 100uM ABA vs. No Treatment
  misc_feature: MA Experiment ID: 108607 Result: Down-regulated in Transcription
  misc_feature: MA Experiment 108607 PARAMETER Experiment Name: At_100uM_ABA_cDNA_P Parameter: Timepoint (hr) Value: 4
  misc_feature: MA Experiment 108607 PARAMETER Experiment Name: At_100uM_ABA_cDNA_P Parameter: Tissue Value: Aerial
  misc_feature: MA Experiment 108607 PARAMETER Experiment Name: At_100uM_ABA_cDNA_P Parameter: Treatment Value: 100uM ABA vs. No Treatment
  misc_feature: MA Experiment ID: 108609 Result: Down-regulated in Transcription
  misc_feature: MA Experiment 108609 PARAMETER Experiment Name: At_100uM_ABA_cDNA_P Parameter: Timepoint (hr) Value: 24
  misc_feature: MA Experiment 108609 PARAMETER Experiment Name: At_100uM_ABA_cDNA_P Parameter: Tissue Value: Aerial
  misc_feature: MA Experiment 108609 PARAMETER Experiment Name: At_100uM_ABA_cDNA_P Parameter: Treatment Value: 100uM ABA vs. No Treatment
  misc_feature: MA Experiment ID: 20000069 Result: Down-regulated in Transcription
  misc_feature: MA Experiment 20000069 PARAMETER Experiment Name: At_100uM_ABA_Mutants_cDNA_P Parameter: Plant Line Value: CS23
  misc_feature: MA Experiment 20000069 PARAMETER Experiment Name: At_100uM_ABA_Mutants_cDNA_P Parameter: Timepoint (hr) Value: 6
  misc_feature: MA Experiment 20000069 PARAMETER Experiment Name: At_100uM_ABA_Mutants_cDNA_P Parameter: Tissue Value: Aerial
  misc_feature: MA Experiment 20000069 PARAMETER Experiment Name: At_100uM_ABA_Mutants_cDNA_P Parameter: Treatment Value: 100uM ABA vs. No Treatment
  misc_feature: MA Experiment ID: 20000086 Result: Down-regulated in Transcription
  misc_feature: MA Experiment 20000086 PARAMETER Experiment Name: At_100uM_ABA_Mutants_cDNA_P Parameter: Plant Line Value: CS22
  misc_feature: MA Experiment 20000086 PARAMETER Experiment Name: At_100uM_ABA_Mutants_cDNA_P Parameter: Timepoint (hr) Value: 6
  misc_feature: MA Experiment 20000086 PARAMETER Experiment Name: At_100uM_ABA_Mutants_cDNA_P Parameter: Tissue Value: Aerial
  misc_feature: MA Experiment 20000086 PARAMETER Experiment Name: At_100uM_ABA_Mutants_cDNA_P Parameter: Treatment Value: 100uM ABA vs. No Treatment
  misc_feature: MA Experiment ID: 20000087 Result: Down-regulated in Transcription
  misc_feature: MA Experiment 20000087 PARAMETER Experiment Name: At_100uM_ABA_Mutants_cDNA_P Parameter: Plant Line Value: WS
  misc_feature: MA Experiment 20000087 PARAMETER Experiment Name: At_100uM_ABA_Mutants_cDNA_P Parameter: Timepoint (hr) Value: 6
  misc_feature: MA Experiment 20000087 PARAMETER Experiment Name: At_100uM_ABA_Mutants_cDNA_P Parameter: Tissue Value: Aerial
  misc_feature: MA Experiment 20000087 PARAMETER Experiment Name: At_100uM_ABA_Mutants_cDNA_P Parameter: Treatment Value: 100uM ABA vs. No Treatment
  misc_feature: MA Experiment ID: 20000088 Result: Down-regulated in Transcription
  misc_feature: MA Experiment 20000088 PARAMETER Experiment Name: At_100uM_ABA_Mutants_cDNA_P Parameter: Plant Line Value: Landsberg
  misc_feature: MA Experiment 20000088 PARAMETER Experiment Name: At_100uM_ABA_Mutants_cDNA_P Parameter: Timepoint (hr) Value: 6
  misc_feature: MA Experiment 20000088 PARAMETER Experiment Name: At_100uM_ABA_Mutants_cDNA_P Parameter: Tissue Value: Aerial
  misc_feature: MA Experiment 20000088 PARAMETER Experiment Name: At_100uM_ABA_Mutants_cDNA_P Parameter: Treatment Value: 100uM ABA vs. No Treatment
  misc_feature: MA Experiment ID: 20000112 Result: Down-regulated in Transcription
  misc_feature: MA Experiment 20000112 PARAMETER Experiment Name: At_42deg_Heat_cDNA_P Parameter: Temperature (deg C) Value: 42 vs. 22
  misc_feature: MA Experiment 20000112 PARAMETER Experiment Name: At_42deg_Heat_cDNA_P Parameter: Timepoint (hr) Value: 2
  misc_feature: MA Experiment 20000112 PARAMETER Experiment Name: At_42deg_Heat_cDNA_P Parameter: Tissue Value: Aerial
  misc_feature: MA Experiment ID: 20000117 Result: Down-regulated in Transcription
  misc_feature: MA Experiment 20000117 PARAMETER Experiment Name: At_100uM_ABA_Mutants_cDNA_P Parameter: Plant Line Value: Columbia
  misc_feature: MA Experiment 20000117 PARAMETER Experiment Name: At_100uM_ABA_Mutants_cDNA_P Parameter: Timepoint (hr) Value: 6
  misc_feature: MA Experiment 20000117 PARAMETER Experiment Name: At_100uM_ABA_Mutants_cDNA_P Parameter: Tissue Value: Aerial
  misc_feature: MA Experiment 20000117 PARAMETER Experiment Name: At_100uM_ABA_Mutants_cDNA_P Parameter: Treatment Value: 100uM ABA vs. No Treatment
  misc_feature: MA Experiment ID: 20000169 Result: Down-regulated in Transcription
  misc_feature: MA Experiment 20000169 PARAMETER Experiment Name: At_100uM_ABA_P Parameter: Age (day) Value: 14
  misc_feature: MA Experiment 20000169 PARAMETER Experiment Name: At_100uM_ABA_P Parameter: Organism Value: A. thaliana
  misc_feature: MA Experiment 20000169 PARAMETER Experiment Name: At_100uM_ABA_P Parameter: Plant Line Value: WS
  misc_feature: MA Experiment 20000169 PARAMETER Experiment Name: At_100uM_ABA_P Parameter: Timepoint (hr) Value: 6
  misc_feature: MA Experiment 20000169 PARAMETER Experiment Name: At_100uM_ABA_P Parameter: Tissue Value: Aerial
  misc_feature: MA Experiment 20000169 PARAMETER Experiment Name: At_100uM_ABA_P Parameter: Treatment Value: 100uM ABA vs. No Treatment
  misc_feature: MA Experiment ID: 20000180 Result: Down-regulated in Transcription
  misc_feature: MA Experiment 20000180 PARAMETER Experiment Name: At_Germinating_Seeds_P Parameter: Age (hr) Value: 24 vs. 0
  misc_feature: MA Experiment 20000180 PARAMETER Experiment Name: At_Germinating_Seeds_P Parameter: Tissue Value: Germinating Seeds
  misc_feature: MA Experiment ID: 20000184 Result: Up-regulated in Transcription
  misc_feature: MA Experiment 20000184 PARAMETER Experiment Name: At_Shoots__P Parameter: Age (day) Value: 7
  misc_feature: MA Experiment 20000184 PARAMETER Experiment Name: At_Shoots__P Parameter: Tissue Value: Shoots vs. Whole Plant
  misc_feature: MA Experiment ID: 20000267 Result: Down-regulated in Transcription
  misc_feature: MA Experiment 20000267 PARAMETER Experiment Name: At_Drought_P Parameter: Age (day) Value: 7
  misc_feature: MA Experiment 20000267 PARAMETER Experiment Name: At_Drought_P Parameter: Organism Value: A. thaliana
  misc_feature: MA Experiment 20000267 PARAMETER Experiment Name: At_Drought_P Parameter: Plant Line Value: WS
  misc_feature: MA Experiment 20000267 PARAMETER Experiment Name: At_Drought_P Parameter: Timepoint (hr) Value: 6
  misc_feature: MA Experiment 20000267 PARAMETER Experiment Name: At_Drought_P Parameter: Tissue Value: Whole Plant
  misc_feature: MA Experiment 20000267 PARAMETER Experiment Name: At_Drought_P Parameter: Treatment Value: Drought vs. No Drought
  misc_feature: MA Experiment ID: 20000286 Result: Up-regulated in Transcription
  misc_feature: MA Experiment 20000286 PARAMETER Experiment Name: At_Open_Flower_P Parameter: Age (day) Value: 21
  misc_feature: MA Experiment 20000286 PARAMETER Experiment Name: At_Open_Flower_P Parameter: Plant Line Value: WS
  misc_feature: MA Experiment 20000286 PARAMETER Experiment Name: At_Open_Flower_P Parameter: Tissue Value: Half Open vs. Whole Plant
  misc_feature: MA Experiment ID: 20000436 Result: Down-regulated in Transcription
  misc_feature: MA Experiment 20000436 PARAMETER Experiment Name: At_Drought_P Parameter: Age (day) Value: 7
  misc_feature: MA Experiment 20000436 PARAMETER Experiment Name: At_Drought_P Parameter: Organism Value: A. thaliana
  misc_feature: MA Experiment 20000436 PARAMETER Experiment Name: At_Drought_P Parameter: Plant Line Value: WS
  misc_feature: MA Experiment 20000436 PARAMETER Experiment Name: At_Drought_P Parameter: Timepoint (hr) Value: 12
  misc_feature: MA Experiment 20000436 PARAMETER Experiment Name: At_Drought_P Parameter: Tissue Value: Whole Plant
  misc_feature: MA Experiment 20000436 PARAMETER Experiment Name: At_Drought_P Parameter: Treatment Value: Drought vs. No Drought
  misc_feature: MA Experiment ID: 20000437 Result: Down-regulated in Transcription
  misc_feature: MA Experiment 20000437 PARAMETER Experiment Name: At_Drought_P Parameter: Age (day) Value: 8
  misc_feature: MA Experiment 20000437 PARAMETER Experiment Name: At_Drought_P Parameter: Organism Value: A. thaliana
  misc_feature: MA Experiment 20000437 PARAMETER Experiment Name: At_Drought_P Parameter: Plant Line Value: WS
  misc_feature: MA Experiment 20000437 PARAMETER Experiment Name: At_Drought_P Parameter: Timepoint (hr) Value: 24
  misc_feature: MA Experiment 20000437 PARAMETER Experiment Name: At_Drought_P Parameter: Tissue Value: Whole Plant
  misc_feature: MA Experiment 20000437 PARAMETER Experiment Name: At_Drought_P Parameter: Treatment Value: Drought vs. No Drought
  misc_feature: MA Experiment ID: 20000438 Result: Up-regulated in Transcription
  misc_feature: MA Experiment 20000438 PARAMETER Experiment Name: At_Shoots__P Parameter: Age (day) Value: 14
  misc_feature: MA Experiment 20000438 PARAMETER Experiment Name: At_Shoots__P Parameter: Tissue Value: Shoots vs. Whole Plant
  misc_feature: MA Experiment ID: 20000451 Result: Up-regulated in Transcription
  misc_feature: MA Experiment 20000451 PARAMETER Experiment Name: At_CS6879_Shoots-Roots_P Parameter: Age (day) Value: 14
  misc_feature: MA Experiment 20000451 PARAMETER Experiment Name: At_CS6879_Shoots-Roots_P Parameter: Organism Value: A. thaliana
  misc_feature: MA Experiment 20000451 PARAMETER Experiment Name: At_CS6879_Shoots-Roots_P Parameter: Plant Line Value: CS6879 vs. WS
  misc_feature: MA Experiment 20000451 PARAMETER Experiment Name: At_CS6879_Shoots-Roots_P Parameter: Tissue Value: Roots
  misc_feature: MA Experiment ID: 20000453 Result: Down-regulated in Transcription
  misc_feature: MA Experiment 20000453 PARAMETER Experiment Name: At_100uM_ABA_P Parameter: Age (day) Value: 15
  misc_feature: MA Experiment 20000453 PARAMETER Experiment Name: At_100uM_ABA_P Parameter: Organism Value: A. thaliana
  misc_feature: MA Experiment 20000453 PARAMETER Experiment Name: At_100uM_ABA_P Parameter: Plant Line Value: WS
  misc_feature: MA Experiment 20000453 PARAMETER Experiment Name: At_100uM_ABA_P Parameter: Timepoint (hr) Value: 24
  misc_feature: MA Experiment 20000453 PARAMETER Experiment Name: At_100uM_ABA_P Parameter: Tissue Value: Aerial
  misc_feature: MA Experiment 20000453 PARAMETER Experiment Name: At_100uM_ABA_P Parameter: Treatment Value: 100uM ABA vs. No Treatment
  misc_feature: MA Experiment ID: 20000573 Result: Down-regulated in Transcription
  misc_feature: MA Experiment 20000573 PARAMETER Experiment Name: At_100uM_ABA_Mutants__P Parameter: Organism Value: A. thaliana
  misc_feature: MA Experiment 20000573 PARAMETER Experiment Name: At_100uM_ABA_Mutants__P Parameter: Plant Line Value: CS22 vs. Ler wt
  misc_feature: MA Experiment 20000573 PARAMETER Experiment Name: At_100uM_ABA_Mutants__P Parameter: Timepoint (hr) Value: N/A
  misc_feature: MA Experiment 20000573 PARAMETER Experiment Name: At_100uM_ABA_Mutants__P Parameter: Tissue Value: Whole Plant
  misc_feature: MA Experiment 20000573 PARAMETER Experiment Name: At_100uM_ABA_Mutants__P Parameter: Treatment Value: None
  misc_feature: MA Experiment ID: 20001248 Result: Up-regulated in Transcription
  misc_feature: MA Experiment 20001248 PARAMETER Experiment Name: At_Far-red-induction_P Parameter: Age (day) Value: 7
  misc_feature: MA Experiment 20001248 PARAMETER Experiment Name: At_Far-red-induction_P Parameter: Light Value: Far-red vs. White
  misc_feature: MA Experiment 20001248 PARAMETER Experiment Name: At_Far-red-induction_P Parameter: Organism Value: A. thaliana
  misc_feature: MA Experiment 20001248 PARAMETER Experiment Name: At_Far-red-induction_P Parameter: Plant Line Value: Columbia
  misc_feature: MA Experiment 20001248 PARAMETER Experiment Name: At_Far-red-induction_P Parameter: Timepoint (hr) Value: 4
  misc_feature: MA Experiment 20001248 PARAMETER Experiment Name: At_Far-red-induction_P Parameter: Tissue Value: Whole Plant
  misc_feature: MA Experiment ID: 20001450 Result: Up-regulated in Transcription
  misc_feature: MA Experiment 20001450 PARAMETER Experiment Name: At_Far-red-induction_P Parameter: Age (day) Value: 7
  misc_feature: MA Experiment 20001450 PARAMETER Experiment Name: At_Far-red-induction_P Parameter: Light Value: Far-red vs. White
  misc_feature: MA Experiment 20001450 PARAMETER Experiment Name: At_Far-red-induction_P Parameter: Organism Value: A. thaliana
  misc_feature: MA Experiment 20001450 PARAMETER Experiment Name: At_Far-red-induction_P Parameter: Plant Line Value: Columbia
  misc_feature: MA Experiment 20001450 PARAMETER Experiment Name: At_Far-red-induction_P Parameter: Timepoint (hr) Value: 8
  misc_feature: MA Experiment 20001450 PARAMETER Experiment Name: At_Far-red-induction_P Parameter: Tissue Value: Whole Plant
  misc_feature: MA Experiment ID: 20001554 Result: Down-regulated in Transcription
  misc_feature: MA Experiment 20001554 PARAMETER Experiment Name: At_Drought_Soil_Dry_P Parameter: Age (day) Value: 21
  misc_feature: MA Experiment 20001554 PARAMETER Experiment Name: At_Drought_Soil_Dry_P Parameter: Organism Value: A. thaliana
  misc_feature: MA Experiment 20001554 PARAMETER Experiment Name: At_Drought_Soil_Dry_P Parameter: Plant Line Value: WS
  misc_feature: MA Experiment 20001554 PARAMETER Experiment Name: At_Drought_Soil_Dry_P Parameter: Post Timepoint (hr) Value: None
  misc_feature: MA Experiment 20001554 PARAMETER Experiment Name: At_Drought_Soil_Dry_P Parameter: Post-Treatment Value: None
  misc_feature: MA Experiment 20001554 PARAMETER Experiment Name: At_Drought_Soil_Dry_P Parameter: Timepoint (day) Value: 7
  misc_feature: MA Experiment 20001554 PARAMETER Experiment Name: At_Drought_Soil_Dry_P Parameter: Treatment Value: Drought vs. No Drought
  misc_feature: MA Experiment ID: 20001555 Result: Down-regulated in Transcription
  misc_feature: MA Experiment 20001555 PARAMETER Experiment Name: At_Drought_Soil_Dry_P Parameter: Age (day) Value: 24
  misc_feature: MA Experiment 20001555 PARAMETER Experiment Name: At_Drought_Soil_Dry_P Parameter: Organism Value: A. thaliana
  misc_feature: MA Experiment 20001555 PARAMETER Experiment Name: At_Drought_Soil_Dry_P Parameter: Plant Line Value: WS
  misc_feature: MA Experiment 20001555 PARAMETER Experiment Name: At_Drought_Soil_Dry_P Parameter: Post Timepoint (hr) Value: None
  misc_feature: MA Experiment 20001555 PARAMETER Experiment Name: At_Drought_Soil_Dry_P Parameter: Post-Treatment Value: None
  misc_feature: MA Experiment 20001555 PARAMETER Experiment Name: At_Drought_Soil_Dry_P Parameter: Timepoint (day) Value: 10
  misc_feature: MA Experiment 20001555 PARAMETER Experiment Name: At_Drought_Soil_Dry_P Parameter: Treatment Value: Drought vs. No Drought
  misc_feature: MA Experiment ID: 20001556 Result: Down-regulated in Transcription
  misc_feature: MA Experiment 20001556 PARAMETER Experiment Name: At_Drought_Soil_Dry_P Parameter: Age (day) Value: 26
  misc_feature: MA Experiment 20001556 PARAMETER Experiment Name: At_Drought_Soil_Dry_P Parameter: Organism Value: A. thaliana
  misc_feature: MA Experiment 20001556 PARAMETER Experiment Name: At_Drought_Soil_Dry_P Parameter: Plant Line Value: WS
  misc_feature: MA Experiment 20001556 PARAMETER Experiment Name: At_Drought_Soil_Dry_P Parameter: Post Timepoint (hr) Value: None
  misc_feature: MA Experiment 20001556 PARAMETER Experiment Name: At_Drought_Soil_Dry_P Parameter: Post-Treatment Value: None
  misc_feature: MA Experiment 20001556 PARAMETER Experiment Name: At_Drought_Soil_Dry_P Parameter: Timepoint (day) Value: 12
  misc_feature: MA Experiment 20001556 PARAMETER Experiment Name: At_Drought_Soil_Dry_P Parameter: Treatment Value: Drought vs. No Drought
  misc_feature: MA Experiment ID: 20001557 Result: Up-regulated in Transcription
  misc_feature: MA Experiment 20001557 PARAMETER Experiment Name: At_Drought_Soil_Dry_P Parameter: Age (day) Value: 27
  misc_feature: MA Experiment 20001557 PARAMETER Experiment Name: At_Drought_Soil_Dry_P Parameter: Organism Value: A. thaliana
  misc_feature: MA Experiment 20001557 PARAMETER Experiment Name: At_Drought_Soil_Dry_P Parameter: Plant Line Value: WS
  misc_feature: MA Experiment 20001557 PARAMETER Experiment Name: At_Drought_Soil_Dry_P Parameter: Post Timepoint (hr) Value: 3
  misc_feature: MA Experiment 20001557 PARAMETER Experiment Name: At_Drought_Soil_Dry_P Parameter: Post-Treatment Value: Re-Water vs. No Drought
  misc_feature: MA Experiment 20001557 PARAMETER Experiment Name: At_Drought_Soil_Dry_P Parameter: Timepoint (day) Value: 13
  misc_feature: MA Experiment 20001557 PARAMETER Experiment Name: At_Drought_Soil_Dry_P Parameter: Treatment Value: Drought vs. No Drought
  misc_feature: MA Experiment ID: 20001558 Result: Up-regulated in Transcription
  misc_feature: MA Experiment 20001558 PARAMETER Experiment Name: At_Drought_Soil_Dry_P Parameter: Age (day) Value: 27
  misc_feature: MA Experiment 20001558 PARAMETER Experiment Name: At_Drought_Soil_Dry_P Parameter: Organism Value: A. thaliana
  misc_feature: MA Experiment 20001558 PARAMETER Experiment Name: At_Drought_Soil_Dry_P Parameter: Plant Line Value: WS
  misc_feature: MA Experiment 20001558 PARAMETER Experiment Name: At_Drought_Soil_Dry_P Parameter: Post Timepoint (hr) Value: 6
  misc_feature: MA Experiment 20001558 PARAMETER Experiment Name: At_Drought_Soil_Dry_P Parameter: Post-Treatment Value: Re-Water vs. No Drought
  misc_feature: MA Experiment 20001558 PARAMETER Experiment Name: At_Drought_Soil_Dry_P Parameter: Timepoint (day) Value: 13
  misc_feature: MA Experiment 20001558 PARAMETER Experiment Name: At_Drought_Soil_Dry_P Parameter: Treatment Value: Drought vs. No Drought
  misc_feature: MA Experiment ID: 20001559 Result: Down-regulated in Transcription
  misc_feature: MA Experiment 20001559 PARAMETER Experiment Name: At_Drought_Soil_Dry_P Parameter: Age (day) Value: 28
  misc_feature: MA Experiment 20001559 PARAMETER Experiment Name: At_Drought_Soil_Dry_P Parameter: Organism Value: A. thaliana
  misc_feature: MA Experiment 20001559 PARAMETER Experiment Name: At_Drought_Soil_Dry_P Parameter: Plant Line Value: WS
  misc_feature: MA Experiment 20001559 PARAMETER Experiment Name: At_Drought_Soil_Dry_P Parameter: Post Timepoint (hr) Value: 29
  misc_feature: MA Experiment 20001559 PARAMETER Experiment Name: At_Drought_Soil_Dry_P Parameter: Post-Treatment Value: Re-Water vs. No Drought
  misc_feature: MA Experiment 20001559 PARAMETER Experiment Name: At_Drought_Soil_Dry_P Parameter: Timepoint (day) Value: 14
  misc_feature: MA Experiment 20001559 PARAMETER Experiment Name: At_Drought_Soil_Dry_P Parameter: Treatment Value: Drought vs. No Drought
  misc_feature: MA Experiment ID: 20001757 Result: Up-regulated in Transcription
  misc_feature: MA Experiment 20001757 PARAMETER Experiment Name: At_50mM_NH4NO3_L-to-H_P Parameter: Timepoint (hr) Value: 6
  misc_feature: MA Experiment 20001757 PARAMETER Experiment Name: At_50mM_NH4NO3_L-to-H_P Parameter: Tissue Value: Leaf
  misc_feature: MA Experiment 20001757 PARAMETER Experiment Name: At_50mM_NH4NO3_L-to-H_P Parameter: Treatment Value: 50mM NH4NO3 vs 100mM Mannitol
  misc_feature: MA Experiment ID: 20001905 Result: Down-regulated in Transcription
  misc_feature: MA Experiment 20001905 PARAMETER Experiment Name: At_Drought_Reproduction_P Parameter: Age (day) Value: 40
  misc_feature: MA Experiment 20001905 PARAMETER Experiment Name: At_Drought_Reproduction_P Parameter: Organism Value: A. thaliana
  misc_feature: MA Experiment 20001905 PARAMETER Experiment Name: At_Drought_Reproduction_P Parameter: Plant Line Value: WS
  misc_feature: MA Experiment 20001905 PARAMETER Experiment Name: At_Drought_Reproduction_P Parameter: Timepoint (day) Value: 10
  misc_feature: MA Experiment 20001905 PARAMETER Experiment Name: At_Drought_Reproduction_P Parameter: Tissue Value: Rosettes
  misc_feature: MA Experiment 20001905 PARAMETER Experiment Name: At_Drought_Reproduction_P Parameter: Treatment Value: Drought vs. No Drought
  misc_feature: MA Experiment ID: 20001906 Result: Down-regulated in Transcription
  misc_feature: MA Experiment 20001906 PARAMETER Experiment Name: At_Drought_Reproduction_P Parameter: Age (day) Value: 35
  misc_feature: MA Experiment 20001906 PARAMETER Experiment Name: At_Drought_Reproduction_P Parameter: Organism Value: A. thaliana
  misc_feature: MA Experiment 20001906 PARAMETER Experiment Name: At_Drought_Reproduction_P Parameter: Plant Line Value: WS
  misc_feature: MA Experiment 20001906 PARAMETER Experiment Name: At_Drought_Reproduction_P Parameter: Timepoint (day) Value: 5
  misc_feature: MA Experiment 20001906 PARAMETER Experiment Name: At_Drought_Reproduction_P Parameter: Tissue Value: Siliques
  misc_feature: MA Experiment 20001906 PARAMETER Experiment Name: At_Drought_Reproduction_P Parameter: Treatment Value: Drought vs. No Drought
  misc_feature: MA Experiment ID: 20001908 Result: Down-regulated in Transcription
  misc_feature: MA Experiment 20001908 PARAMETER Experiment Name: At_Drought_Reproduction_P Parameter: Age (day) Value: 40
  misc_feature: MA Experiment 20001908 PARAMETER Experiment Name: At_Drought_Reproduction_P Parameter: Organism Value: A. thaliana
  misc_feature: MA Experiment 20001908 PARAMETER Experiment Name: At_Drought_Reproduction_P Parameter: Plant Line Value: WS
  misc_feature: MA Experiment 20001908 PARAMETER Experiment Name: At_Drought_Reproduction_P Parameter: Timepoint (day) Value: 10
  misc_feature: MA Experiment 20001908 PARAMETER Experiment Name: At_Drought_Reproduction_P Parameter: Tissue Value: Siliques
  misc_feature: MA Experiment 20001908 PARAMETER Experiment Name: At_Drought_Reproduction_P Parameter: Treatment Value: Drought vs. No Drought
  misc_feature: MA Experiment ID: 20001911 Result: Down-regulated in Transcription
  misc_feature: MA Experiment 20001911 PARAMETER Experiment Name: At_Drought_Reproduction_P Parameter: Age (day) Value: 40
  misc_feature: MA Experiment 20001911 PARAMETER Experiment Name: At_Drought_Reproduction_P Parameter: Organism Value: A. thaliana
  misc_feature: MA Experiment 20001911 PARAMETER Experiment Name: At_Drought_Reproduction_P Parameter: Plant Line Value: WS
  misc_feature: MA Experiment 20001911 PARAMETER Experiment Name: At_Drought_Reproduction_P Parameter: Timepoint (day) Value: 10
  misc_feature: MA Experiment 20001911 PARAMETER Experiment Name: At_Drought_Reproduction_P Parameter: Tissue Value: Flowers
  misc_feature: MA Experiment 20001911 PARAMETER Experiment Name: At_Drought_Reproduction_P Parameter: Treatment Value: Drought vs. No Drought
aattacattttacactcatctcgttctctcttccgtcaatatggaaggcgtcaccgtcgtgtctttcttccttcttttcatcgccaccgccatggccgccaagtccaccgtctccttccgtgacggcatgttaccaaacggagacttcgagctaggaccaaaaccatcagacatgaaaggaacagaaatactaaacaaactagcaataccaaactgggaagtcacaggattcgtcgaatacattaaatcaggacataaacaaggagacatgcttctcgttgttcccgccggtaaattcgctgtaagacttgggaacgaagcatcgatcaaacaaagacttaaagtggttaaaggaatgtattactcactcacttttagtgctgctagaacttgtgcacaagacgagagacttaacatatctgtagcacctgactccggtgtgattccgattcagacggtttatagtagtagtggttgggatttatatgcttgggcgtttcaagctgagagtgatgttgctgaagttgtgattcataatcctggtgttgaggaagatccagcttgtggtccacttattgatggtgttgctatgagatctctttaccctcctagaccaactaataagaacattttgaaaaacggaggatttgaagaaggtccattagtattacccggctcgacaactggagttttgatcccaccgtttatagaagacgaccactctcctttacctggatggatggtggagtctctcaaagctgtcaagtacgtagacgttgaacatttctcagtcccacagggtcgcagagctattgagcttgtagcgggtaaagagagtgccatcgctcaagtggttcggactgtcattgggaagacttacgtgctgtcttttgcggttggagacgccaacaatgcttgcaaaggatcaatggtggttgaggcttttgcaggaaaagatacacttaaggtcccttacgagtcgaaaggcacaggagggtttaaacgagcttctattcgatttgtggcggtttcgacccgatcaagaattatgttctacagcactttctatgccatgaggagcgatgatttctcgtcattgtgtgggcctgtgatcgatgatgtcaagcttataagcgttcgtaaaccatagatgaatcaccaatcctattacaagaaaatgcatcgtgtggtcttcttttattttccttaaactgtctttggtgtgtgttggattttattgaaacgagaaggtgaaaaaaacagagttttatttacgagagttagggttttatataggcagatgggcctttgcttatattgtattttcttgtatgagaaggcaaaagaaacgttgcctatatcttatgtatctaggccttttaatttttatggaagagttacaaaacttacaataaagttgtatgcatatttta

SEQ ID NO: 99980 - protein, 382 aa, Arabidopsis thaliana; identical to SEQ ID NO: 25994
  peptide (1)..(382): Ceres Seq. ID no. 13604026
  misc_feature (58)..(380): Pfam Name: Protein of unknown function, DUF642 Pfam Description: Protein of unknown function, DUF642
  misc_feature (14)..(382): Homolog of NCBI NO: 15239438 NR Description: expressed protein [Arabidopsis thaliana] Unknown protein [Arabidopsis thaliana]
  misc_feature (14)..(382): Homolog of NCBI NO: 15809822 NR Description: AT5g25460/F18G18_200 [Arabidopsis thaliana]
  misc_feature (14)..(382): Homolog of NCBI NO: 21537379 NR Description: unknown [Arabidopsis thaliana]
  misc_feature (14)..(382): Homolog of NCBI NO: 15239049 NR Description: expressed protein [Arabidopsis thaliana]
  misc_feature (14)..(382): Homolog of NCBI NO: 23397043 NR Description: unknown protein [Arabidopsis thaliana]
  misc_feature (14)..(382): Homolog of NCBI NO: 21554402 NR Description: unknown [Arabidopsis thaliana]
  misc_feature (24)..(382): Homolog of NCBI NO: 7488898 NR Description: hypothetical protein - castor bean
  misc_feature (39)..(382): Homolog of NCBI NO: 18418018 NR Description: expressed protein [Arabidopsis thaliana]
  misc_feature (58)..(382): Homolog of NCBI NO: 7486632 NR Description: hypothetical protein F8B4.160 - Arabidopsis >gi|4049348|emb|CAA22573.1| putative protein [Arabidopsis >gi|7270150|emb|CAB79963.1| putative protein [Arabidopsis
  misc_feature (13)..(381): Homolog of NCBI NO: 7488741 NR Description: hypothetical protein precursor - alfalfa

SEQ ID NO: 99981 - protein, 369 aa, Arabidopsis thaliana; identical to SEQ ID NO: 25995
  peptide (1)..(369): Ceres Seq. ID no. 13604027
  misc_feature (45)..(367): Pfam Name: Protein of unknown function, DUF642 Pfam Description: Protein of unknown function, DUF642
  misc_feature (1)..(369): Homolog of NCBI NO: 15239438 NR Description: expressed protein [Arabidopsis thaliana] Unknown protein [Arabidopsis thaliana]
  misc_feature (1)..(369): Homolog of NCBI NO: 15809822 NR Description: AT5g25460/F18G18_200 [Arabidopsis thaliana]
  misc_feature (1)..(369): Homolog of NCBI NO: 21537379 NR Description: unknown [Arabidopsis thaliana]
  misc_feature (1)..(369): Homolog of NCBI NO: 15239049 NR Description: expressed protein [Arabidopsis thaliana]
  misc_feature (1)..(369): Homolog of NCBI NO: 23397043 NR Description: unknown protein [Arabidopsis thaliana]
  misc_feature (1)..(369): Homolog of NCBI NO: 21554402 NR Description: unknown [Arabidopsis thaliana]
  misc_feature (11)..(369): Homolog of NCBI NO: 7488898 NR Description: hypothetical protein - castor bean
  misc_feature (26)..(369): Homolog of NCBI NO: 18418018 NR Description: expressed protein [Arabidopsis thaliana]
  misc_feature (45)..(369): Homolog of NCBI NO: 7486632 NR Description: hypothetical protein F8B4.160 - Arabidopsis >gi|4049348|emb|CAA22573.1| putative protein [Arabidopsis >gi|7270150|emb|CAB79963.1| putative protein [Arabidopsis
  misc_feature (1)..(368): Homolog of NCBI NO: 7488741 NR Description: hypothetical protein precursor - alfalfa

SEQ ID NO: 99982 - protein, 352 aa, Arabidopsis thaliana; identical to SEQ ID NO: 25996
  peptide (1)..(352): Ceres Seq. ID no. 13604028
  misc_feature (28)..(350): Pfam Name: Protein of unknown function, DUF642 Pfam Description: Protein of unknown function, DUF642
  misc_feature (1)..(352): Homolog of NCBI NO: 15239438 NR Description: expressed protein [Arabidopsis thaliana] Unknown protein [Arabidopsis thaliana]
  misc_feature (1)..(352): Homolog of NCBI NO: 15809822 NR Description: AT5g25460/F18G18_200 [Arabidopsis thaliana]
  misc_feature (1)..(352): Homolog of NCBI NO: 21537379 NR Description: unknown [Arabidopsis thaliana]
  misc_feature (1)..(352): Homolog of NCBI NO: 15239049 NR Description: expressed protein [Arabidopsis thaliana]
  misc_feature (1)..(352): Homolog of NCBI NO: 23397043 NR Description: unknown protein [Arabidopsis thaliana]
  misc_feature (1)..(352): Homolog of NCBI NO: 21554402 NR Description: unknown [Arabidopsis thaliana]
  misc_feature (1)..(352): Homolog of NCBI NO: 7488898 NR Description: hypothetical protein - castor bean
  misc_feature (9)..(352): Homolog of NCBI NO: 18418018 NR Description: expressed protein [Arabidopsis thaliana]
  misc_feature (28)..(352): Homolog of NCBI NO: 7486632 NR Description: hypothetical protein F8B4.160 - Arabidopsis >gi|4049348|emb|CAA22573.1| putative protein [Arabidopsis >gi|7270150|emb|CAB79963.1| putative protein [Arabidopsis
  misc_feature (1)..(351): Homolog of NCBI NO: 7488741 NR Description: hypothetical protein precursor - alfalfa

SEQ ID NO: 99983 - DNA, 1390 bp, Arabidopsis thaliana
  misc_feature (1)..(1390): Ceres Seq. ID no. 13604029
  misc_feature: MA Experiment ID: 108462 Result: Down-regulated in Transcription
  misc_feature: MA Experiment 108462 PARAMETER Experiment Name: At_Germinating_Seeds_cDNA_P Parameter: Age (day) Value: 2 vs. 0
  misc_feature: MA Experiment 108462 PARAMETER Experiment Name: At_Germinating_Seeds_cDNA_P Parameter: Tissue Value: Germinating Seeds
  misc_feature: MA Experiment ID: 108464 Result: Down-regulated in Transcription
  misc_feature: MA Experiment 108464 PARAMETER Experiment Name: At_Germinating_Seeds_cDNA_P Parameter: Age (day) Value: 4 vs. 0
  misc_feature: MA Experiment 108464 PARAMETER Experiment Name: At_Germinating_Seeds_cDNA_P Parameter: Tissue Value: Germinating Seeds
  misc_feature: MA Experiment ID: 20001451 Result: Down-regulated in Transcription
  misc_feature: MA Experiment 20001451 PARAMETER Experiment Name: At_Far-red-induction_P Parameter: Age (day) Value: 7
  misc_feature: MA Experiment 20001451 PARAMETER Experiment Name: At_Far-red-induction_P Parameter: Light Value: Far-red vs. White
  misc_feature: MA Experiment 20001451 PARAMETER Experiment Name: At_Far-red-induction_P Parameter: Organism Value: A. thaliana
  misc_feature: MA Experiment 20001451 PARAMETER Experiment Name: At_Far-red-induction_P Parameter: Plant Line Value: Columbia
  misc_feature: MA Experiment 20001451 PARAMETER Experiment Name: At_Far-red-induction_P Parameter: Timepoint (hr) Value: 24
  misc_feature: MA Experiment 20001451 PARAMETER Experiment Name: At_Far-red-induction_P Parameter: Tissue Value: Whole Plant
aataagaacaataaccaaaaactcccaaattaattttgcttaagcagcagcagaagaagaagcatggcggaacaagaattacagagaatcaatgagaagaagccatggcaagttctcgagttctacagtggaatcggtggaatgagatactctttaatggcgtcaggcatcgtctcagaagtagtagaagcttttgagatcaatgattctgctaatgatgtttatcaacataatttcaaacatcgtccctatcaggggaatattcagagtctcactgctgctgatttagataagtataatgcagatgcttggcttctttctcctccttgtcaaccttatactagacaaggccttcagaaacactctggtgatgctcgggctttttcgtttctcaggattcttgagcttataccgcatacaacaaagcctccacaaatgttatttgtagagaatgttgttggatttgagacttcggatacacatatggaaatgattggtacattaacaaaattagattatgtcacacaagagtttatattgagtccgctgcagtttggtgtgccgtattcaagaccacgttatttctgcctggccaaaagaaaacctctgccatttaagtcccaacacagtaataacaaactactctggtctccagacccgttatatgggcgtgatgatcaggttgagtttggaaaatgtcaagcagaagaaggattggataaattacttgagttttgcaaaccagtagagaagtttctcgagttagctgcacatgttgatggcgagccaagtagtgttgatgactctgaaaatgggtccaaagattgttgtggacaagaaggcgattctgtcccagactctgtacatcagtatctagtaccagttagtttgatagagagatggggaaacgcaatggacattgtttaccctgattcaaagagatgttgttgtttcacaaagagttattatcgatacgtgaagggcacaggttccctattggcaactgtccagccaaaaatcaagggtaaggaatcttgtttgaaggagcaacggcttagatacttcacccctagagaggtagctaactttcactcattccctgaagattttgagttccccaagcacataagccttcgacaaagatacgcaatgcttggaaacagtttaagtgtagcagtggtggctcctctgcttcggtatctattcgattcttgactacacaatttgatgcactaagtgacgcgaccaattaccggaatcagttattctcctgaacaagcttctactacttttttgtttactgataaagttcaaactgatgaacttacgttttgttatcgatccttaactttatgggccagtattttaaatgggccttattcggcccgtt

SEQ ID NO: 99984 - protein, 383 aa, Arabidopsis thaliana
  peptide (1)..(383): Ceres Seq. ID no. 13604030
  misc_feature (15)..(382): Pfam Name: C-5 cytosine-specific DNA methylase Pfam Description: C-5 cytosine-specific DNA methylase
  misc_feature (1)..(383): Homolog of NCBI NO: 18420929 NR Description: DNA methyltransferase PMT1 - like protein
  misc_feature (1)..(383): Homolog of NCBI NO: 21553420 NR Description: DNA methyltransferase PMT1-like protein
  misc_feature (14)..(232): Homolog of NCBI NO: 13936240 NR Description: DNA methyltransferase ZMET4 [Zea mays]
  misc_feature (253)..(381): Homolog of NCBI NO: 13936240 NR Description: DNA methyltransferase ZMET4 [Zea mays]
  misc_feature (14)..(245): Homolog of NCBI NO: 34912588 NR Description: putative DNA methyltransferase [Oryza sativa
  misc_feature (211)..(381): Homolog of NCBI NO: 34912588 NR Description: putative DNA methyltransferase [Oryza sativa
  misc_feature (13)..(186): Homolog of NCBI NO: 13096616 NR Description: Chain A, Structure Of Human Dnmt2, An Enigmatic
  misc_feature (267)..(382): Homolog of NCBI NO: 13096616 NR Description: Chain A, Structure Of Human Dnmt2, An Enigmatic
  misc_feature (13)..(197): Homolog of NCBI NO: 26341152 NR Description: unnamed protein product [Mus musculus]
  misc_feature (269)..(380): Homolog of NCBI NO: 26341152 NR Description: unnamed protein product [Mus musculus]
MAEQELQRINEKKPWQVLEFYSGIGGMRYSLMASGIVSEVVEAFEINDSANDVYQHNFKHRPYQGNIQSLTAADLDKYNADAWLLSPPCQPYTRQGLQKHSGDARAFSFLRILELIPHTTKPPQMLFVENVVGFETSDTHMEMIGTLTKLDYVTQEFILSPLQFGVPYSRPRYFCLAKRKPLPFKSQHSNNKLLWSPDPLYGRDDQVEFGKCQAEEGLDKLLEFCKPVEKFLELAAHVDGEPSSVDDSENGSKDCCGQEGDSVPDSVHQYLVPVSLIERWGNAMDIVYPDSKRCCCFTKSYYRYVKGTGSLLATVQPKIKGKESCLKEQRLRYFTPREVANFHSFPEDFEFPKHISLRQRYAMLGNSLSVAVVAPLLRYLFDS

SEQ ID NO: 99985 - protein, 357 aa, Arabidopsis thaliana
  peptide (1)..(357): Ceres Seq. ID no. 13604031
  misc_feature (1)..(356): Pfam Name: C-5 cytosine-specific DNA methylase Pfam Description: C-5 cytosine-specific DNA methylase
  misc_feature (1)..(357): Homolog of NCBI NO: 18420929 NR Description: DNA methyltransferase PMT1 - like protein
  misc_feature (1)..(357): Homolog of NCBI NO: 21553420 NR Description: DNA methyltransferase PMT1-like protein
  misc_feature (1)..(206): Homolog of NCBI NO: 13936240 NR Description: DNA methyltransferase ZMET4 [Zea mays]
  misc_feature (227)..(355): Homolog of NCBI NO: 13936240 NR Description: DNA methyltransferase ZMET4 [Zea mays]
  misc_feature (1)..(219): Homolog of NCBI NO: 34912588 NR Description: putative DNA methyltransferase [Oryza sativa
  misc_feature (185)..(355): Homolog of NCBI NO: 34912588 NR Description: putative DNA methyltransferase [Oryza sativa
  misc_feature (1)..(160): Homolog of NCBI NO: 13096616 NR Description: Chain A, Structure Of Human Dnmt2, An Enigmatic
  misc_feature (241)..(356): Homolog of NCBI NO: 13096616 NR Description: Chain A, Structure Of Human Dnmt2, An Enigmatic
  misc_feature (1)..(171): Homolog of NCBI NO: 26341152 NR Description: unnamed protein product [Mus musculus]
  misc_feature (243)..(354): Homolog of NCBI NO: 26341152 NR Description: unnamed protein product [Mus musculus]
MRYSLMASGIVSEVVEAFEINDSANDVYQHNFKHRPYQGNIQSLTAADLDKYNADAWLLSPPCQPYTRQGLQKHSGDARAFSFLRILELIPHTTKPPQMLFVENVVGFETSDTHMEMIGTLTKLDYVTQEFILSPLQFGVPYSRPRYFCLAKRKPLPFKSQHSNNKLLWSPDPLYGRDDQVEFGKCQAEEGLDKLLEFCKPVEKFLELAAHVDGEPSSVDDSENGSKDCCGQEGDSVPDSVHQYLVPVSLIERWGNAMDIVYPDSKRCCCFTKSYYRYVKGTGSLLATVQPKIKGKESCLKEQRLRYFTPREVANFHSFPEDFEFPKHISLRQRYAMLGNSLSVAVVAPLLRYLFDS

SEQ ID NO: 99986 - protein, 352 aa, Arabidopsis thaliana
  peptide (1)..(352): Ceres Seq. ID no. 13604032
  misc_feature (1)..(351): Pfam Name: C-5 cytosine-specific DNA methylase Pfam Description: C-5 cytosine-specific DNA methylase
  misc_feature (1)..(352): Homolog of NCBI NO: 18420929 NR Description: DNA methyltransferase PMT1 - like protein
  misc_feature (1)..(352): Homolog of NCBI NO: 21553420 NR Description: DNA methyltransferase PMT1-like protein
  misc_feature (1)..(201): Homolog of NCBI NO: 13936240 NR Description: DNA methyltransferase ZMET4 [Zea mays]
  misc_feature (222)..(350): Homolog of NCBI NO: 13936240 NR Description: DNA methyltransferase ZMET4 [Zea mays]
  misc_feature (1)..(214): Homolog of NCBI NO: 34912588 NR Description: putative DNA methyltransferase [Oryza sativa
  misc_feature (180)..(350): Homolog of NCBI NO: 34912588 NR Description: putative DNA methyltransferase [Oryza sativa
  misc_feature (1)..(155): Homolog of NCBI NO: 13096616 NR Description: Chain A, Structure Of Human Dnmt2, An Enigmatic
  misc_feature (236)..(351): Homolog of NCBI NO: 13096616 NR Description: Chain A, Structure Of Human Dnmt2, An Enigmatic
  misc_feature (1)..(166): Homolog of NCBI NO: 26341152 NR Description: unnamed protein product [Mus musculus]
  misc_feature (238)..(349): Homolog of NCBI NO: 26341152 NR Description: unnamed protein product [Mus musculus]
MASGIVSEVVEAFEINDSANDVYQHNFKHRPYQGNIQSLTAADLDKYNADAWLLSPPCQPYTRQGLQKHSGDARAFSFLRILELIPHTTKPPQMLFVENVVGFETSDTHMEMIGTLTKLDYVTQEFILSPLQFGVPYSRPRYFCLAKRKPLPFKSQHSNNKLLWSPDPLYGRDDQVEFGKCQAEEGLDKLLEFCKPVEKFLELAAHVDGEPSSVDDSENGSKDCCGQEGDSVPDSVHQYLVPVSLIERWGNAMDIVYPDSKRCCCFTKSYYRYVKGTGSLLATVQPKIKGKESCLKEQRLRYFTPREVANFHSFPEDFEFPKHISLRQRYAMLGNSLSVAVVAPLLRYLFDS

SEQ ID NO: 99987 - DNA, 2153 bp, Arabidopsis thaliana
  misc_feature (1)..(2153): Ceres Seq. ID no. 13604033
  misc_feature: MA Experiment ID: 108434 Result: Up-regulated in Transcription
  misc_feature: MA Experiment 108434 PARAMETER Experiment Name: At_Root_Tips_cDNA_P Parameter: Tissue Value: Root Tips
  misc_feature: MA Experiment ID: 108576 Result: Down-regulated in Transcription
  misc_feature: MA Experiment 108576 PARAMETER Experiment Name: At_42deg_Heat_cDNA_P Parameter: Temperature (deg C) Value: 42 vs. 22
  misc_feature: MA Experiment 108576 PARAMETER Experiment Name: At_42deg_Heat_cDNA_P Parameter: Timepoint (hr) Value: 1
  misc_feature: MA Experiment 108576 PARAMETER Experiment Name: At_42deg_Heat_cDNA_P Parameter: Tissue Value: Aerial
  misc_feature: MA Experiment ID: 108577 Result: Down-regulated in Transcription
  misc_feature: MA Experiment 108577 PARAMETER Experiment Name: At_42deg_Heat_cDNA_P Parameter: Temperature (deg C) Value: 42 vs. 22
  misc_feature: MA Experiment 108577 PARAMETER Experiment Name: At_42deg_Heat_cDNA_P Parameter: Timepoint (hr) Value: 6
  misc_feature: MA Experiment 108577 PARAMETER Experiment Name: At_42deg_Heat_cDNA_P Parameter: Tissue Value: Aerial
  misc_feature: MA Experiment ID: 20000113 Result: Down-regulated in Transcription
  misc_feature: MA Experiment 20000113 PARAMETER Experiment Name: At_42deg_Heat_cDNA_P Parameter: Temperature (deg C) Value: 42 vs. 22
  misc_feature: MA Experiment 20000113 PARAMETER Experiment Name: At_42deg_Heat_cDNA_P Parameter: Timepoint (hr) Value: 8
  misc_feature: MA Experiment 20000113 PARAMETER Experiment Name: At_42deg_Heat_cDNA_P Parameter: Tissue Value: Aerial
  misc_feature: MA Experiment ID: 20000235 Result: Up-regulated in Transcription
  misc_feature: MA Experiment 20000235 PARAMETER Experiment Name: At_Siliques_P Parameter: Age (day) Value: 21
  misc_feature: MA Experiment 20000235 PARAMETER Experiment Name: At_Siliques_P Parameter: Organism Value: A. thaliana
  misc_feature: MA Experiment 20000235 PARAMETER Experiment Name: At_Siliques_P Parameter: Plant Line Value: WS
  misc_feature: MA Experiment 20000235 PARAMETER Experiment Name: At_Siliques_P Parameter: Tissue Value: 5-10mm Siliques vs. Whole Plant
gagacaaaaaggaaaaaaacaaaattaaaattaggaaagttaaaataattttcctgcaaatttcttctttctcagaaatctaaaaaaaaacaatgaagaaaacaccgtaacgaatcataaaatttctcaaaatccaaactctgttttttgttcttcctcttccagatttggtttctttttttgaaaaactctctagcttcagttttttttttctctctctctctctctctaggaatgtttttgttcgtggatactggaatcatgagaataagattttgaaggagaaagcaagatccatgttctttgtcggagaatttagggctaatatgtggatttgagcttctttgattcccaatttgtgaaagttttgaaatttttgggaaagagagaatgtttaagcagtttctgagtaaacttccgaggaagtcttcaaaatctgattcaggagagctgaatcgttcgagttcgggtccggtatcgtctccggttcagagatccggtactagtggtggtggttcgggtccggttcgatctaactcagggaagcgtatgtcatctgctgtgttcccagctagtgttgttgctggtattgagcctttggtaccgtttaaggatgtaccaagctctgagaagttgaatctctttgtgagtaaagttagtctctgttgtgtgacatttgatttctctgaccctggtaaaaactctatagagaaagatgttaaaaggcagacattgttggagcttttggattttgtagcttcagggtctgttaagttcactgagccagctattcttgcaatgtgtagaatgtgtgctgttaatctctttagggtctttcctccgaattatcggtctagttctggtggcgaaaacgatgatgatgaaccgatgtttgaccctgcttggcctcatttgcagattgtgtatgatttgttgcttaagtttatcacttctccgtgtcttgatgctaaagtggcaaaaaagtatttagatcatgctttcattgtgaggttgcttgacttgtttgattcggaggatcctagagaacgggagtgtttgaagacgattctgcatcgggtatatgggaagttcatggttcataggccatttgtacgcaagtccatgagcaatatattctaccggtttgtgtttgagacagagaagcatagcggaatcgctgagcttttggagattttcgggagtatagtgagtggatttgcgttgcctttgaaagaagagcataagatcttcttgtggagagtgttgattccattgcacaagcctaaatctgttggaaactactttcagcagctttcttattgtatcactcagttcatagataaagagccgaaactaggcagtgttgtgataaagggtttgttgaagttctggcctatcacgaatagtcagaaggaagtgatgtttctcggggaggtcgaagaaattgtagaagcaatgagtgtgatggagtttcaaaagatcatggtccctttgttcttgcggattgcttgttgtgtcaccagttcccactttcaggtttctgaaagagctttattcttgtggaacaacgatcaaattgtaaacttgattggacataaccggcaagccatcctaccaatcatgttcactgctttagaaaagaatgctcagaaccactggaaccaatccgtgctaaacttaaccttaaacgtacgaaaaatgttctgcgaaatggacgaggctctgttcatgtcttgccacgcccgctttaaggaggacgaagcaaagcaatgttctgctgcggaaaagaggaaagaagtatgggcaaggctagagaatgcagcaagtatgaagccgataacaggaaagactgctgttctggtaactcctcgagcaacctccatcgcctgctaaatagcgtttaaaccaattcacagacagtttatccaaagcaacaacatcgagaagatgatggagtggctgttgcttaagctatagtcttgggaacttttcatcgaggttgatctctgtaatattatataactttgatgttgttagctgtgtgggttttaatgctaattctattgctttcttttaaagcaatgaaaccatgctgcagatttttatcaaactctttgtatcaatcaattaagtttatatatcctttttctttc

SEQ ID NO: 99988 - protein, 500 aa, Arabidopsis thaliana; identical to SEQ ID NO: 40478
  peptide (1)..(500): Ceres Seq. ID no. 13604034
  misc_feature (73)..(475): Pfam Name: Protein phosphatase 2A regulatory B subunit (B56 Pfam Description: Protein phosphatase 2A regulatory B subunit
  misc_feature (1)..(500): Homolog of NCBI NO: 15239451 NR Description: AtBgamma - like protein [Arabidopsis thaliana] putative AtBgamma protein [Arabidopsis thaliana]
  misc_feature (1)..(499): Homolog of NCBI NO: 21530782 NR Description: protein phosphatase 2A B'kappa subunit [Oryza
  misc_feature (1)..(497): Homolog of NCBI NO: 7485149 NR Description: hypothetical protein - Arabidopsis thaliana phosphatase like protein [Arabidopsis thaliana]
  misc_feature (1)..(497): Homolog of NCBI NO: 18414444 NR Description: B' regulatory subunit of PP2A (AtB'gamma) thaliana] >gi|30683249|ref|NP_849390.1| B' regulatory subunit of (AtB'gamma) [Arabidopsis thaliana] >gi|2160694|gb|AAB58902.1| B'
  misc_feature (1)..(497): Homolog of NCBI NO: 20147343 NR Description: AT4g15410/dl3750w [Arabidopsis thaliana]
  misc_feature (1)..(497): Homolog of NCBI NO: 21530784 NR Description: putative protein phosphatase 2A B'zeta subunit
  misc_feature (1)..(481): Homolog of NCBI NO: 15222851 NR Description: B regulatory subunit of protein phosphatase 2A [Arabidopsis thaliana] >gi|9958073|gb|AAG09562.1|AC011810_21 protein phosphatase 2A regulatory subunit B [Arabidopsis
  misc_feature (1)..(481): Homolog of NCBI NO: 21537284 NR Description: B regulatory subunit of protein phosphatase 2A,
  misc_feature (1)..(497): Homolog of NCBI NO: 11994401 NR Description: protein phosphatase 2A B' regulatory subunit
  misc_feature (6)..(497): Homolog of NCBI NO: 15233119 NR Description: B regulatory subunit of PP2A -related

SEQ ID NO: 99989 - protein, 447 aa, Arabidopsis thaliana; identical to SEQ ID NO: 40479
  peptide (1)..(447): Ceres Seq. ID no. 13604035
  misc_feature (20)..(422): Pfam Name: Protein phosphatase 2A regulatory B subunit (B56 Pfam Description: Protein phosphatase 2A regulatory B subunit
  misc_feature (1)..(447): Homolog of NCBI NO: 15239451 NR Description: AtBgamma - like protein [Arabidopsis thaliana] putative AtBgamma protein [Arabidopsis thaliana]
  misc_feature (1)..(446): Homolog of NCBI NO: 21530782 NR Description: protein phosphatase 2A B'kappa subunit [Oryza
  misc_feature (1)..(444): Homolog of NCBI NO: 7485149 NR Description: hypothetical protein - Arabidopsis thaliana phosphatase like protein [Arabidopsis thaliana]
  misc_feature (1)..(444): Homolog of NCBI NO: 18414444 NR Description: B' regulatory subunit of PP2A (AtB'gamma) thaliana] >gi|30683249|ref|NP_849390.1| B' regulatory subunit of (AtB'gamma) [Arabidopsis thaliana] >gi|2160694|gb|AAB58902.1| B'
  misc_feature (1)..(444): Homolog of NCBI NO: 20147343 NR Description: AT4g15410/dl3750w [Arabidopsis thaliana]
  misc_feature (1)..(444): Homolog of NCBI NO: 21530784 NR Description: putative protein phosphatase 2A B'zeta subunit
  misc_feature (1)..(428): Homolog of NCBI NO: 15222851 NR Description: B regulatory subunit of protein phosphatase 2A [Arabidopsis thaliana] >gi|9958073|gb|AAG09562.1|AC011810_21 protein phosphatase 2A regulatory subunit B [Arabidopsis
  misc_feature (1)..(428): Homolog of NCBI NO: 21537284 NR Description: B regulatory subunit of protein phosphatase 2A,
  misc_feature (1)..(444): Homolog of NCBI NO: 11994401 NR Description: protein phosphatase 2A B' regulatory subunit
  misc_feature (1)..(444): Homolog of NCBI NO: 15233119 NR Description: B regulatory subunit of PP2A -related

SEQ ID NO: 99990 - protein, 364 aa, Arabidopsis thaliana; identical to SEQ ID NO: 40480
  peptide (1)..(364): Ceres Seq. ID no. 13604036
  misc_feature (1)..(339): Pfam Name: Protein phosphatase 2A regulatory B subunit (B56 Pfam Description: Protein phosphatase 2A regulatory B subunit
  misc_feature (1)..(364): Homolog of NCBI NO: 15239451 NR Description: AtBgamma - like protein [Arabidopsis thaliana] putative AtBgamma protein [Arabidopsis thaliana]
  misc_feature (1)..(363): Homolog of NCBI NO: 21530782 NR Description: protein phosphatase 2A B'kappa subunit [Oryza
  misc_feature (1)..(361): Homolog of NCBI NO: 7485149 NR Description: hypothetical protein - Arabidopsis thaliana phosphatase like protein [Arabidopsis thaliana]
  misc_feature (1)..(361): Homolog of NCBI NO: 18414444 NR Description: B' regulatory subunit of PP2A (AtB'gamma) thaliana] >gi|30683249|ref|NP_849390.1| B' regulatory subunit of (AtB'gamma) [Arabidopsis thaliana] >gi|2160694|gb|AAB58902.1| B'
  misc_feature (1)..(361): Homolog of NCBI NO: 20147343 NR Description: AT4g15410/dl3750w [Arabidopsis thaliana]
  misc_feature (1)..(361): Homolog of NCBI NO: 21530784 NR Description: putative protein phosphatase 2A B'zeta subunit
  misc_feature (1)..(345): Homolog of NCBI NO: 15222851 NR Description: B regulatory subunit of protein phosphatase 2A [Arabidopsis thaliana] >gi|9958073|gb|AAG09562.1|AC011810_21 protein phosphatase 2A regulatory subunit B [Arabidopsis
  misc_feature (1)..(345): Homolog of NCBI NO: 21537284 NR Description: B regulatory subunit of protein phosphatase 2A,
  misc_feature (1)..(361): Homolog of NCBI NO: 11994401 NR Description: protein phosphatase 2A B' regulatory subunit
  misc_feature (1)..(361): Homolog of NCBI NO: 15233119 NR Description: B regulatory subunit of PP2A -related

SEQ ID NO: 99991 - DNA, 1937 bp, Arabidopsis thaliana
  misc_feature (1)..(1937): Ceres Seq. ID no. 13604041
  misc_feature: MA Experiment ID: 20000184 Result: Down-regulated in Transcription
  misc_feature: MA Experiment 20000184 PARAMETER Experiment Name: At_Shoots__P Parameter: Age (day) Value: 7
  misc_feature: MA Experiment 20000184 PARAMETER Experiment Name: At_Shoots__P Parameter: Tissue Value: Shoots vs. Whole Plant
  misc_feature: MA Experiment ID: 20000185 Result: Down-regulated in Transcription
  misc_feature: MA Experiment 20000185 PARAMETER Experiment Name: At_Roots__P Parameter: Age (day) Value: 7 vs. 21
  misc_feature: MA Experiment 20000185 PARAMETER Experiment Name: At_Roots__P Parameter: Organism Value: A. thaliana
  misc_feature: MA Experiment 20000185 PARAMETER Experiment Name: At_Roots__P Parameter: Tissue Value: Roots vs. Whole Plant
  misc_feature: MA Experiment ID: 20000439 Result: Down-regulated in Transcription
  misc_feature: MA Experiment 20000439 PARAMETER Experiment Name: At_Roots__P Parameter: Age (day) Value: 14 vs. 21
  misc_feature: MA Experiment 20000439 PARAMETER Experiment Name: At_Roots__P Parameter: Organism Value: A. thaliana
  misc_feature: MA Experiment 20000439 PARAMETER Experiment Name: At_Roots__P Parameter: Tissue Value: Roots vs. Whole Plant
  misc_feature: MA Experiment ID: 20001248 Result: Down-regulated in Transcription
  misc_feature: MA Experiment 20001248 PARAMETER Experiment Name: At_Far-red-induction_P Parameter: Age (day) Value: 7
  misc_feature: MA Experiment 20001248 PARAMETER Experiment Name: At_Far-red-induction_P Parameter: Light Value: Far-red vs. White
  misc_feature: MA Experiment 20001248 PARAMETER Experiment Name: At_Far-red-induction_P Parameter: Organism Value: A. thaliana
  misc_feature: MA Experiment 20001248 PARAMETER Experiment Name: At_Far-red-induction_P Parameter: Plant Line Value: Columbia
  misc_feature: MA Experiment 20001248 PARAMETER Experiment Name: At_Far-red-induction_P Parameter: Timepoint (hr) Value: 4
  misc_feature: MA Experiment 20001248 PARAMETER Experiment Name: At_Far-red-induction_P Parameter: Tissue Value: Whole Plant
  misc_feature: MA Experiment ID: 20001557 Result: Down-regulated in Transcription
  misc_feature: MA Experiment 20001557 PARAMETER Experiment Name: At_Drought_Soil_Dry_P Parameter: Age (day) Value: 27
  misc_feature: MA Experiment 20001557 PARAMETER Experiment Name: At_Drought_Soil_Dry_P Parameter: Organism Value: A. thaliana
  misc_feature: MA Experiment 20001557 PARAMETER Experiment Name: At_Drought_Soil_Dry_P Parameter: Plant Line Value: WS
  misc_feature: MA Experiment 20001557 PARAMETER Experiment Name: At_Drought_Soil_Dry_P Parameter: Post Timepoint (hr) Value: 3
  misc_feature: MA Experiment 20001557 PARAMETER Experiment Name: At_Drought_Soil_Dry_P Parameter: Post-Treatment Value: Re-Water vs. No Drought
  misc_feature: MA Experiment 20001557 PARAMETER Experiment Name: At_Drought_Soil_Dry_P Parameter: Timepoint (day) Value: 13
  misc_feature: MA Experiment 20001557 PARAMETER Experiment Name: At_Drought_Soil_Dry_P Parameter: Treatment Value: Drought vs. No Drought
atttcgttgcagaaaacatatacttttccgacaaaacatggaagatgttaatcaggagaagaagaaagtacctccaatgtctgaaccagaaagatccacaccgattaagactacaggaggacagtatcgtttctgcaagtcatgtgttgaaggaagtagttgcaggacagtgaggtcaagaaccaagcttatgaacgttttgatagaacgtggaagacctcacgaggctcaaactgttttcaaaacattggcagagacgggacatagaccgtctttgatcagttacacaactcttttagctgcaatgacggttcagaaacagtatggttccataagctctatagtctctgaggtggaacagagcggaaccaaacttgattctatattcttcaatgctgttattaacgctttctctgagtccggtaacatggaagatgcggtgcaagctctgttgaaaatgaaagaacttggtctaaatccgactacgagtacttacaacactttgattaaagggtatgggattgcaggtaagcctgagagatcatctgagttactggatcttatgttggaagagggcaacgtcgatgttggaccgaatataaggacgtttaatgtgttggtgcaagcctggtgcaagaagaagaaggtggaggaggcgtgggaagtggtgaagaagatggaggagtgtggagttaggccggatacggtgacttataacacgattgcaacttgttatgtgcagaaaggagagaccgtgagagctgagagtgaggtggttgagaagatggttatgaaggagaaggcgaaaccgaacggaagaacgtgtgggattgttgtgggagggtattgcagagaagggagagtgagagatggtttgaggtttgtgcggagaatgaaggaaatgagagtggaagcgaatcttgtggtcttcaattctttgatcaatggctttgttgaagtcatggaccgtgatggtatcgatgaggttcttaccttgatgaaggagtgtaacgtgaaggcagatgtaatcacgtacagtactgtgatgaacgcttggagctcagctggatacatggagaaagctgcacaagtgtttaaagaaatggttaaagcaggagtcaaaccagacgctcacgcgtacagcattttagctaaagggtacgttagagcaaaagagccaaagaaagcagaggagcttcttgagacattgatagttgaatccaggcctaacgttgtgatcttcaccactgtgattagcgggtggtgtagcaatggaagtatggatgatgcaatgagggttttcaacaagatgtgcaagttcggggtttcgccaaatataaagacgtttgagactctgatgtggggttacctagaggtgaagcaaccatggaaagcagaagaagttttgcagatgatgagaggatgtggtgtaaagcctgagaattctaccttcttgctgttagcagaagcttggcgtgtcgcgggactcactgatgagtcgaacaaagctatcaatgcattgaaatgtaaagacatagagatcgcaaagttagagaagctgtaccaaaaacagtcctctggtagtagttttaacctattgcagattccagtcgggaaacgggagcttccaaccgcaaaagcgatgaatctttctgcttgtaaactcggagctcgagtgccaatcatatgccagaagcagtcccaagcacagtttgggatcagtggacagtttgtacattcttgtacagtgttcttgagctgaaaggacaaaactgaagccagagatttggtttttctattcttctgttgaaatttgagagtcaatactttgagaactctcactatgtgtaaattacaacagaatagtcttgtatataagaaaaagtattgtacagttgctgttttcaataactgcagactcatagatttggagaaag

SEQ ID NO: 99992 - protein, 586 aa, Arabidopsis thaliana
  peptide (1)..(586): Ceres Seq. ID no. 13604042
  misc_feature (447)..(481): Pfam Name: PPR repeat Pfam Description: PPR repeat
  misc_feature (13)..(586): Homolog of NCBI NO: 30689969 NR Description: pentatricopeptide (PPR) repeat-containing protein
  misc_feature (13)..(586): Homolog of NCBI NO: 26449475 NR Description: unknown protein [Arabidopsis thaliana]
  misc_feature (32)..(528): Homolog of NCBI NO: 3107905 NR Description: leaf protein [Ipomoea nil]
  misc_feature (7)..(536): Homolog of NCBI NO: 19071860 NR Description: SNF1-like protein kinase [Arabidopsis thaliana]
  misc_feature (7)..(536): Homolog of NCBI NO: 30688180 NR Description: protein kinase family [Arabidopsis thaliana]
  misc_feature (7)..(536): Homolog of NCBI NO: 19071826 NR Description: PnC401 homologue [Arabidopsis thaliana]
  misc_feature (41)..(506): Homolog of NCBI NO: 34904258 NR Description: Ipomoea nil leaf protein like protein [Oryza
  misc_feature (44)..(518): Homolog of NCBI NO: 15221282 NR Description: pentatricopeptide (PPR) repeat-containing protein
  misc_feature (56)..(488): Homolog of NCBI NO: 15221635 NR Description: pentatricopeptide (PPR) repeat-containing protein
  misc_feature (63)..(489): Homolog of NCBI NO: 15221282 NR Description: pentatricopeptide (PPR) repeat-containing protein
FRCRKHILFRQNMEDVNQEKKKVPPMSEPERSTPIKTTGGQYRFCKSCVEGSSCRTVRSRTKLMNVLIERGRPHEAQTVFKTLAETGHRPSLISYTTLLAAMTVQKQYGSISSIVSEVEQSGTKLDSIFFNAVINAFSESGNMEDAVQALLKMKELGLNPTTSTYNTLIKGYGIAGKPERSSELLDLMLEEGNVDVGPNIRTFNVLVQAWCKKKKVEEAWEVVKKMEECGVRPDTVTYNTIATCYVQKGETVRAESEVVEKMVMKEKAKPNGRTCGIVVGGYCREGRVRDGLRFVRRMKEMRVEANLVVFNSLINGFVEVMDRDGIDEVLTLMKECNVKADVITYSTVMNAWSSAGYMEKAAQVFKEMVKAGVKPDAHAYSILAKGYVRAKEPKKAEELLETLIVESRPNVVIFTTVISGWCSNGSMDDAMRVFNKMCKFGVSPNIKTFETLMWGYLEVKQPWKAEEVLQMMRGCGVKPENSTFLLLAEAWRVAGLTDESNKAINALKCKDIEIAKLEKLYQKQSSGSSFNLLQIPVGKRELPTAKAMNLSACKLGARVPIICQKQSQAQFGISGQFVHSCTVFLS

SEQ ID NO: 99993 - protein, 574 aa, Arabidopsis thaliana
  peptide (1)..(574): Ceres Seq. ID no. 13604043
  misc_feature (435)..(469): Pfam Name: PPR repeat Pfam Description: PPR repeat
  misc_feature (1)..(574): Homolog of NCBI NO: 30689969 NR Description: pentatricopeptide (PPR) repeat-containing protein
  misc_feature (1)..(574): Homolog of NCBI NO: 26449475 NR Description: unknown protein [Arabidopsis thaliana]
  misc_feature (20)..(516): Homolog of NCBI NO: 3107905 NR Description: leaf protein [Ipomoea nil]
  misc_feature (1)..(524): Homolog of NCBI NO: 19071860 NR Description: SNF1-like protein kinase [Arabidopsis thaliana]
  misc_feature (1)..(524): Homolog of NCBI NO: 30688180 NR Description: protein kinase family [Arabidopsis thaliana]
  misc_feature (1)..(524): Homolog of NCBI NO: 19071826 NR Description: PnC401 homologue [Arabidopsis thaliana]
  misc_feature (29)..(494): Homolog of NCBI NO: 34904258 NR Description: Ipomoea nil leaf protein like protein [Oryza
  misc_feature (32)..(506): Homolog of NCBI NO: 15221282 NR Description: pentatricopeptide (PPR) repeat-containing protein
  misc_feature (44)..(476): Homolog of NCBI NO: 15221635 NR Description: pentatricopeptide (PPR) repeat-containing protein
  misc_feature (51)..(477): Homolog of NCBI NO: 15221282 NR Description: pentatricopeptide (PPR) repeat-containing protein
MEDVNQEKKKVPPMSEPERSTPIKTTGGQYRFCKSCVEGSSCRTVRSRTKLMNVLIERGRPHEAQTVFKTLAETGHRPSLISYTTLLAAMTVQKQYGSISSIVSEVEQSGTKLDSIFFNAVINAFSESGNMEDAVQALLKMKELGLNPTTSTYNTLIKGYGIAGKPERSSELLDLMLEEGNVDVGPNIRTFNVLVQAWCKKKKVEEAWEVVKKMEECGVRPDTVTYNTIATCYVQKGETVRAESEVVEKMVMKEKAKPNGRTCGIVVGGYCREGRVRDGLRFVRRMKEMRVEANLVVFNSLINGFVEVMDRDGIDEVLTLMKECNVKADVITYSTVMNAWSSAGYMEKAAQVFKEMVKAGVKPDAHAYSILAKGYVRAKEPKKAEELLETLIVESRPNVVIFTTVISGWCSNGSMDDAMRVFNKMCKFGVSPNIKTFETLMWGYLEVKQPWKAEEVLQMMRGCGVKPENSTFLLLAEAWRVAGLTDESNKAINALKCKDIEIAKLEKLYQKQSSGSSFNLLQIPVGKRELPTAKAMNLSACKLGARVPIICQKQSQAQFGISGQFVHSCTVFLS

SEQ ID NO: 99994 - protein, 561 aa, Arabidopsis thaliana
  peptide (1)..(561): Ceres Seq. ID no. 13604044
  misc_feature (422)..(456): Pfam Name: PPR repeat Pfam Description: PPR repeat
  misc_feature (1)..(561): Homolog of NCBI NO: 30689969 NR Description: pentatricopeptide (PPR) repeat-containing protein
  misc_feature (1)..(561): Homolog of NCBI NO: 26449475 NR Description: unknown protein [Arabidopsis thaliana]
  misc_feature (7)..(503): Homolog of NCBI NO: 3107905 NR Description: leaf protein [Ipomoea nil]
  misc_feature (1)..(511): Homolog of NCBI NO: 19071860 NR Description: SNF1-like protein kinase [Arabidopsis thaliana]
  misc_feature (1)..(511): Homolog of NCBI NO: 30688180 NR Description: protein kinase family [Arabidopsis thaliana]
  misc_feature (1)..(511): Homolog of NCBI NO: 19071826 NR Description: PnC401 homologue [Arabidopsis thaliana]
  misc_feature (16)..(481): Homolog of NCBI NO: 34904258 NR Description: Ipomoea nil leaf protein like protein [Oryza
  misc_feature (19)..(493): Homolog of NCBI NO: 15221282 NR Description: pentatricopeptide (PPR) repeat-containing protein
  misc_feature (31)..(463): Homolog of NCBI NO: 15221635 NR Description: pentatricopeptide (PPR) repeat-containing protein
  misc_feature (38)..(464): Homolog of NCBI NO: 15221282 NR Description: pentatricopeptide (PPR) repeat-containing protein
MSEPERSTPIKTTGGQYRFCKSCVEGSSCRTVRSRTKLMNVLIERGRPHEAQTVFKTLAETGHRPSLISYTTLLAAMTVQKQYGSISSIVSEVEQSGTKLDSIFFNAVINAFSESGNMEDAVQALLKMKELGLNPTTSTYNTLIKGYGIAGKPERSSELLDLMLEEGNVDVGPNIRTFNVLVQAWCKKKKVEEAWEVVKKMEECGVRPDTVTYNTIATCYVQKGETVRAESEVVEKMVMKEKAKPNGRTCGIVVGGYCREGRVRDGLRFVRRMKEMRVEANLVVFNSLINGFVEVMDRDGIDEVLTLMKECNVKADVITYSTVMNAWSSAGYMEKAAQVFKEMVKAGVKPDAHAYSILAKGYVRAKEPKKAEELLETLIVESRPNVVIFTTVISGWCSNGSMDDAMRVFNKMCKFGVSPNIKTFETLMWGYLEVKQPWKAEEVLQMMRGCGVKPENSTFLLLAEAWRVAGLTDESNKAINALKCKDIEIAKLEKLYQKQSSGSSFNLLQIPVGKRELPTAKAMNLSACKLGARVPIICQKQSQAQFGISGQFVHSCTVFLS

SEQ ID NO: 99995 - DNA, 1164 bp, Arabidopsis thaliana
  misc_feature (1)..(1164): Ceres Seq. ID no. 13604064
  misc_feature: MA Experiment ID: 108434 Result: Up-regulated in Transcription
  misc_feature: MA Experiment 108434 PARAMETER Experiment Name: At_Root_Tips_cDNA_P Parameter: Tissue Value: Root Tips
  misc_feature: MA Experiment ID: 108464 Result: Up-regulated in Transcription
  misc_feature: MA Experiment 108464 PARAMETER Experiment Name: At_Germinating_Seeds_cDNA_P Parameter: Age (day) Value: 4 vs. 0
  misc_feature: MA Experiment 108464 PARAMETER Experiment Name: At_Germinating_Seeds_cDNA_P Parameter: Tissue Value: Germinating Seeds
  misc_feature: MA Experiment ID: 108469 Result: Up-regulated in Transcription
  misc_feature: MA Experiment ID: 108501 Result: Down-regulated in Transcription
  misc_feature: MA Experiment 108501 PARAMETER Experiment Name: At_ap2_floral_buds_cDNA_P Parameter: Plant Line Value: ap2 (Ler.)
  misc_feature: MA Experiment 108501 PARAMETER Experiment Name: At_ap2_floral_buds_cDNA_P Parameter: Tissue Value: Closed Flower
  misc_feature: MA Experiment ID: 108572 Result: Up-regulated in Transcription
  misc_feature: MA Experiment 108572 PARAMETER Experiment Name: At_Drought_cDNA_P Parameter: Timepoint (hr) Value: 1
  misc_feature: MA Experiment 108572 PARAMETER Experiment Name: At_Drought_cDNA_P Parameter: Tissue Value: Aerial
  misc_feature: MA Experiment 108572 PARAMETER Experiment Name: At_Drought_cDNA_P Parameter: Treatment Value: Drought vs. No Drought
  misc_feature: MA Experiment ID: 108573 Result: Up-regulated in Transcription
  misc_feature: MA Experiment 108573 PARAMETER Experiment Name: At_Drought_cDNA_P Parameter: Timepoint (hr) Value: 6
  misc_feature: MA Experiment 108573 PARAMETER Experiment Name: At_Drought_cDNA_P Parameter: Tissue Value: Aerial
  misc_feature: MA Experiment 108573 PARAMETER Experiment Name: At_Drought_cDNA_P Parameter: Treatment Value: Drought vs. No Drought
  misc_feature: MA Experiment ID: 108574 Result: Down-regulated in Transcription
  misc_feature: MA Experiment 108574 PARAMETER Experiment Name: At_Wounding__cDNA_P Parameter: Timepoint (hr) Value: 1
  misc_feature: MA Experiment 108574 PARAMETER Experiment Name: At_Wounding__cDNA_P Parameter: Tissue Value: Aerial
  misc_feature: MA Experiment 108574 PARAMETER Experiment Name: At_Wounding__cDNA_P Parameter: Treatment Value: Wounding vs. No Wounding
  misc_feature: MA Experiment ID: 108579 Result: Down-regulated in Transcription
  misc_feature: MA Experiment 108579 PARAMETER Experiment Name: At_4deg_Cold_cDNA_P Parameter: Temperature (deg C) Value: 4 vs. 22
  misc_feature: MA Experiment 108579 PARAMETER Experiment Name: At_4deg_Cold_cDNA_P Parameter: Timepoint (hr) Value: 6
  misc_feature: MA Experiment 108579 PARAMETER Experiment Name: At_4deg_Cold_cDNA_P Parameter: Tissue Value: Aerial
  misc_feature: MA Experiment ID: 108585 Result: Up-regulated in Transcription
  misc_feature: MA Experiment 108585 PARAMETER Experiment Name: At_5mM_NaNP_cDNA_P Parameter: Timepoint (hr) Value: 6
  misc_feature: MA Experiment 108585 PARAMETER Experiment Name: At_5mM_NaNP_cDNA_P Parameter: Tissue Value: Aerial
  misc_feature: MA Experiment 108585 PARAMETER Experiment Name: At_5mM_NaNP_cDNA_P Parameter: Treatment Value: null
  misc_feature: MA Experiment ID: 108595 Result: Down-regulated in Transcription
  misc_feature: MA Experiment 108595 PARAMETER Experiment Name: At_Ler-pi_Ovule_cDNA_P Parameter: Plant Line Value: null
  misc_feature: MA Experiment ID: 20000185 Result: Down-regulated in Transcription
  misc_feature: MA Experiment 20000185 PARAMETER Experiment Name: At_Roots__P Parameter: Age (day) Value: 7 vs. 21
  misc_feature: MA Experiment 20000185 PARAMETER Experiment Name: At_Roots__P Parameter: Organism Value: A. thaliana
  misc_feature: MA Experiment 20000185 PARAMETER Experiment Name: At_Roots__P Parameter: Tissue Value: Roots vs. Whole Plant
  misc_feature: MA Experiment ID: 20000213 Result: Down-regulated in Transcription
  misc_feature: MA Experiment 20000213 PARAMETER Experiment Name: At_4deg_Cold_P Parameter: Timepoint (hr) Value: 2
  misc_feature: MA Experiment ID: 20000214 Result: Down-regulated in Transcription
  misc_feature: MA Experiment 20000214 PARAMETER Experiment Name: At_4deg_Cold_P Parameter: Timepoint (hr) Value: 6
  misc_feature: MA Experiment ID: 20000224 Result: Down-regulated in Transcription
  misc_feature: MA Experiment ID: 20000234 Result: Down-regulated in Transcription
  misc_feature: MA Experiment 20000234 PARAMETER Experiment Name: At_Siliques_P Parameter: Age (day) Value: 21
  misc_feature: MA Experiment 20000234 PARAMETER Experiment Name: At_Siliques_P Parameter: Organism Value: A. thaliana
  misc_feature: MA Experiment 20000234 PARAMETER Experiment Name: At_Siliques_P Parameter: Plant Line Value: WS
  misc_feature: MA Experiment 20000234 PARAMETER Experiment Name: At_Siliques_P Parameter: Tissue Value: Less Than 5mm Siliques vs. Whole Plant
  misc_feature: MA Experiment ID: 20000264 Result: Down-regulated in Transcription
  misc_feature: MA Experiment 20000264 PARAMETER Experiment Name: At_Open_Flower_P Parameter: Age (day) Value: 21
  misc_feature: MA Experiment 20000264 PARAMETER Experiment Name: At_Open_Flower_P Parameter: Plant Line Value: WS
  misc_feature: MA Experiment 20000264 PARAMETER Experiment Name: At_Open_Flower_P Parameter: Tissue Value: Open Flower vs. Whole Plant
  misc_feature: MA Experiment ID: 20000265 Result: Down-regulated in Transcription
  misc_feature: MA Experiment 20000265 PARAMETER Experiment Name: At_Open_Flower_P Parameter: Age (day) Value: 21
  misc_feature: MA Experiment 20000265 PARAMETER Experiment Name: At_Open_Flower_P Parameter: Plant Line Value: WS
  misc_feature: MA Experiment 20000265 PARAMETER Experiment Name: At_Open_Flower_P Parameter: Tissue Value: Closed Flower vs. Whole Plant
  misc_feature: MA Experiment ID: 20000268 Result: Down-regulated in Transcription
  misc_feature: MA Experiment 20000268 PARAMETER Experiment Name: At_100mM_NaCl__P Parameter: Age (day) Value: 14
  misc_feature: MA Experiment 20000268 PARAMETER Experiment Name: At_100mM_NaCl__P Parameter: Organism Value: A. thaliana
  misc_feature: MA Experiment 20000268 PARAMETER Experiment Name: At_100mM_NaCl__P Parameter: Plant Line Value: WS
  misc_feature: MA Experiment 20000268 PARAMETER Experiment Name: At_100mM_NaCl__P Parameter: Timepoint (hr) Value: 6
  misc_feature: MA Experiment 20000268 PARAMETER Experiment Name: At_100mM_NaCl__P Parameter: Tissue Value: Whole Plant
  misc_feature: MA Experiment 20000268 PARAMETER Experiment Name: At_100mM_NaCl__P Parameter: Treatment Value: 100mM NaCl vs. No Treatment
  misc_feature: MA Experiment ID: 20000286 Result: Down-regulated in Transcription
  misc_feature: MA Experiment 20000286 PARAMETER Experiment Name: At_Open_Flower_P Parameter: Age (day) Value: 21
  misc_feature: MA Experiment 20000286 PARAMETER Experiment Name: At_Open_Flower_P Parameter: Plant Line Value: WS
  misc_feature: MA Experiment 20000286 PARAMETER Experiment Name: At_Open_Flower_P Parameter: Tissue Value: Half Open vs. Whole Plant
  misc_feature: MA Experiment ID: 20000308 Result: Down-regulated in Transcription
  misc_feature: MA Experiment 20000308 PARAMETER Experiment Name: At_100mM_NaCl__P Parameter: Age (day) Value: 17
  misc_feature: MA Experiment 20000308 PARAMETER Experiment Name: At_100mM_NaCl__P Parameter: Organism Value: A. thaliana
  misc_feature: MA Experiment 20000308 PARAMETER Experiment Name: At_100mM_NaCl__P Parameter: Plant Line Value: WS
  misc_feature: MA Experiment 20000308 PARAMETER Experiment Name: At_100mM_NaCl__P Parameter: Timepoint (hr) Value: 72
  misc_feature: MA Experiment 20000308 PARAMETER Experiment Name: At_100mM_NaCl__P Parameter: Tissue Value: Whole Plant
  misc_feature: MA Experiment 20000308 PARAMETER Experiment Name: At_100mM_NaCl__P Parameter: Treatment Value: 100mM NaCl vs. No Treatment
  misc_feature: MA Experiment ID: 20000439 Result: Down-regulated in Transcription
  misc_feature: MA Experiment 20000439 PARAMETER Experiment Name: At_Roots__P Parameter: Age (day) Value: 14 vs. 21
  misc_feature: MA Experiment 20000439 PARAMETER Experiment Name: At_Roots__P Parameter: Organism Value: A. thaliana
  misc_feature: MA Experiment 20000439 PARAMETER Experiment Name: At_Roots__P Parameter: Tissue Value: Roots vs. Whole Plant
  misc_feature: MA Experiment ID: 20000441 Result: Up-regulated in Transcription
  misc_feature: MA Experiment 20000441 PARAMETER Experiment Name: At_1uM_BR-BRZ__P Parameter: Tissue Value: Shoot Apices
  misc_feature: MA Experiment 20000441 PARAMETER Experiment Name: At_1uM_BR-BRZ__P Parameter: Treatment Value: 1uM BR vs. No Treatment
  misc_feature: MA Experiment ID: 20000443 Result: Up-regulated in Transcription
  misc_feature: MA Experiment 20000443 PARAMETER Experiment Name: At_1uM_BR-BRZ__P Parameter: Tissue Value: Shoot Apices
  misc_feature: MA Experiment 20000443 PARAMETER Experiment Name: At_1uM_BR-BRZ__P Parameter: Treatment Value: 1uM BRZ vs. No Treatment
  misc_feature: MA Experiment ID: 20000573 Result: Up-regulated in Transcription
  misc_feature: MA Experiment 20000573 PARAMETER Experiment Name: At_100uM_ABA_Mutants__P Parameter: Organism Value: A. thaliana
  misc_feature: MA Experiment 20000573 PARAMETER Experiment Name: At_100uM_ABA_Mutants__P Parameter: Plant Line Value: CS22 vs. Ler wt
  misc_feature: MA Experiment 20000573 PARAMETER Experiment Name: At_100uM_ABA_Mutants__P Parameter: Timepoint (hr) Value: N/A
  misc_feature: MA Experiment 20000573 PARAMETER Experiment Name: At_100uM_ABA_Mutants__P Parameter: Tissue Value: Whole Plant
  misc_feature: MA Experiment 20000573 PARAMETER Experiment Name: At_100uM_ABA_Mutants__P Parameter: Treatment Value: None
  misc_feature: MA Experiment ID: 20000794 Result: Down-regulated in Transcription
  misc_feature: MA Experiment 20000794 PARAMETER Experiment Name: At_Petals_P Parameter: Age (day) Value: 23-25 days
  misc_feature: MA Experiment 20000794 PARAMETER Experiment Name: At_Petals_P Parameter: Plant Line Value: WS
  misc_feature: MA Experiment 20000794 PARAMETER Experiment Name: At_Petals_P Parameter: Tissue Value: Petals vs. Whole plant
  misc_feature: MA Experiment ID: 20001248 Result: Up-regulated in Transcription
  misc_feature: MA Experiment 20001248 PARAMETER Experiment Name: At_Far-red-induction_P Parameter: Age (day) Value: 7
  misc_feature: MA Experiment 20001248 PARAMETER Experiment Name: At_Far-red-induction_P Parameter: Light Value: Far-red vs. White
  misc_feature: MA Experiment 20001248 PARAMETER Experiment Name: At_Far-red-induction_P Parameter: Organism Value: A. thaliana
  misc_feature: MA Experiment 20001248 PARAMETER Experiment Name: At_Far-red-induction_P Parameter: Plant Line Value: Columbia
  misc_feature: MA Experiment 20001248 PARAMETER Experiment Name: At_Far-red-induction_P Parameter: Timepoint (hr) Value: 4
  misc_feature: MA Experiment 20001248 PARAMETER Experiment Name: At_Far-red-induction_P Parameter: Tissue Value: Whole Plant
  misc_feature: MA Experiment ID: 20001450 Result: Up-regulated in Transcription
  misc_feature: MA Experiment 20001450 PARAMETER Experiment Name: At_Far-red-induction_P Parameter: Age (day) Value: 7
  misc_feature: MA Experiment 20001450 PARAMETER Experiment Name: At_Far-red-induction_P Parameter: Light Value: Far-red vs. White
  misc_feature: MA Experiment 20001450 PARAMETER Experiment Name: At_Far-red-induction_P Parameter: Organism Value: A. thaliana
  misc_feature: MA Experiment 20001450 PARAMETER Experiment Name: At_Far-red-induction_P Parameter: Plant Line Value: Columbia
  misc_feature: MA Experiment 20001450 PARAMETER Experiment Name: At_Far-red-induction_P Parameter: Timepoint (hr) Value: 8
  misc_feature: MA Experiment 20001450 PARAMETER Experiment Name: At_Far-red-induction_P Parameter: Tissue Value: Whole Plant
  misc_feature: MA Experiment ID: 20001451 Result: Up-regulated in Transcription
  misc_feature: MA Experiment 20001451 PARAMETER Experiment Name: At_Far-red-induction_P Parameter: Age (day) Value: 7
  misc_feature: MA Experiment 20001451 PARAMETER Experiment Name: At_Far-red-induction_P Parameter: Light Value: Far-red vs. White
  misc_feature: MA Experiment 20001451 PARAMETER Experiment Name: At_Far-red-induction_P Parameter: Organism Value: A. thaliana
  misc_feature: MA Experiment 20001451 PARAMETER Experiment Name: At_Far-red-induction_P Parameter: Plant Line Value: Columbia
  misc_feature: MA Experiment 20001451 PARAMETER Experiment Name: At_Far-red-induction_P Parameter: Timepoint (hr) Value: 24
  misc_feature: MA Experiment 20001451 PARAMETER Experiment Name: At_Far-red-induction_P Parameter: Tissue Value: Whole Plant
  misc_feature: MA Experiment ID: 20001556 Result: Down-regulated in Transcription
  misc_feature: MA Experiment 20001556 PARAMETER Experiment Name: At_Drought_Soil_Dry_P Parameter: Age (day) Value: 26
  misc_feature: MA Experiment 20001556 PARAMETER Experiment Name: At_Drought_Soil_Dry_P Parameter: Organism Value: A. thaliana
  misc_feature: MA Experiment 20001556 PARAMETER Experiment Name: At_Drought_Soil_Dry_P Parameter: Plant Line Value: WS
  misc_feature: MA Experiment 20001556 PARAMETER Experiment Name: At_Drought_Soil_Dry_P Parameter: Post Timepoint (hr) Value: None
  misc_feature: MA Experiment 20001556 PARAMETER Experiment Name: At_Drought_Soil_Dry_P Parameter: Post-Treatment Value: None
  misc_feature: MA Experiment 20001556 PARAMETER Experiment Name: At_Drought_Soil_Dry_P Parameter: Timepoint (day) Value: 12
  misc_feature: MA Experiment 20001556 PARAMETER Experiment Name: At_Drought_Soil_Dry_P Parameter: Treatment Value: Drought vs. No Drought
  misc_feature: MA Experiment ID: 20001557 Result: Down-regulated in Transcription
  misc_feature: MA Experiment 20001557 PARAMETER Experiment Name: At_Drought_Soil_Dry_P Parameter: Age (day) Value: 27
  misc_feature: MA Experiment 20001557 PARAMETER Experiment Name: At_Drought_Soil_Dry_P Parameter: Organism Value: A. thaliana
  misc_feature: MA Experiment 20001557 PARAMETER Experiment Name: At_Drought_Soil_Dry_P Parameter: Plant Line Value: WS
  misc_feature: MA Experiment 20001557 PARAMETER Experiment Name: At_Drought_Soil_Dry_P Parameter: Post Timepoint (hr) Value: 3
  misc_feature: MA Experiment 20001557 PARAMETER Experiment Name: At_Drought_Soil_Dry_P Parameter: Post-Treatment Value: Re-Water vs. No Drought
  misc_feature: MA Experiment 20001557 PARAMETER Experiment Name: At_Drought_Soil_Dry_P Parameter: Timepoint (day) Value: 13
  misc_feature: MA Experiment 20001557 PARAMETER Experiment Name: At_Drought_Soil_Dry_P Parameter: Treatment Value: Drought vs. No Drought
  misc_feature: MA Experiment ID: 20001558 Result: Down-regulated in Transcription
  misc_feature: MA Experiment 20001558 PARAMETER Experiment Name: At_Drought_Soil_Dry_P Parameter: Age (day) Value: 27
  misc_feature: MA Experiment 20001558 PARAMETER Experiment Name: At_Drought_Soil_Dry_P Parameter: Organism Value: A. thaliana
  misc_feature: MA Experiment 20001558 PARAMETER Experiment Name: At_Drought_Soil_Dry_P Parameter: Plant Line Value: WS
  misc_feature: MA Experiment 20001558 PARAMETER Experiment Name: At_Drought_Soil_Dry_P Parameter: Post Timepoint (hr) Value: 6
  misc_feature: MA Experiment 20001558 PARAMETER Experiment Name: At_Drought_Soil_Dry_P Parameter: Post-Treatment Value: Re-Water vs. No Drought
  misc_feature: MA Experiment 20001558 PARAMETER Experiment Name: At_Drought_Soil_Dry_P Parameter: Timepoint (day) Value: 13
  misc_feature: MA Experiment 20001558 PARAMETER Experiment Name: At_Drought_Soil_Dry_P Parameter: Treatment Value: Drought vs. No Drought
  misc_feature: MA Experiment ID: 20001559 Result: Down-regulated in Transcription
  misc_feature: MA Experiment 20001559 PARAMETER Experiment Name: At_Drought_Soil_Dry_P Parameter: Age (day) Value: 28
  misc_feature: MA Experiment 20001559 PARAMETER Experiment Name: At_Drought_Soil_Dry_P Parameter: Organism Value: A. thaliana
  misc_feature: MA Experiment 20001559 PARAMETER Experiment Name: At_Drought_Soil_Dry_P Parameter: Plant Line Value: WS
  misc_feature: MA Experiment 20001559 PARAMETER Experiment Name: At_Drought_Soil_Dry_P Parameter: Post Timepoint (hr) Value: 29
  misc_feature: MA Experiment 20001559 PARAMETER Experiment Name: At_Drought_Soil_Dry_P Parameter: Post-Treatment Value: Re-Water vs. No Drought
  misc_feature: MA Experiment 20001559 PARAMETER Experiment Name: At_Drought_Soil_Dry_P Parameter: Timepoint (day) Value: 14
  misc_feature: MA Experiment 20001559 PARAMETER Experiment Name: At_Drought_Soil_Dry_P Parameter: Treatment Value: Drought vs. No Drought
  misc_feature: MA Experiment ID: 20001560 Result: Down-regulated in Transcription
  misc_feature: MA Experiment 20001560 PARAMETER Experiment Name: At_Drought_Soil_Dry_P Parameter: Age (day) Value: 28
  misc_feature: MA Experiment 20001560 PARAMETER Experiment Name: At_Drought_Soil_Dry_P Parameter: Organism Value: A. thaliana
  misc_feature: MA Experiment 20001560 PARAMETER Experiment Name: At_Drought_Soil_Dry_P Parameter: Plant Line Value: WS
  misc_feature: MA Experiment 20001560 PARAMETER Experiment Name: At_Drought_Soil_Dry_P Parameter: Post Timepoint (hr) Value: None
  misc_feature: MA Experiment 20001560 PARAMETER Experiment Name: At_Drought_Soil_Dry_P Parameter: Post-Treatment Value: None
  misc_feature: MA Experiment 20001560 PARAMETER Experiment Name: At_Drought_Soil_Dry_P Parameter: Timepoint (day) Value: 14
  misc_feature: MA Experiment 20001560 PARAMETER Experiment Name: At_Drought_Soil_Dry_P Parameter: Treatment Value: Drought vs. No Drought
  misc_feature: MA Experiment ID: 20001757 Result: Up-regulated in Transcription
  misc_feature: MA Experiment 20001757 PARAMETER Experiment Name: At_50mM_NH4NO3_L-to-H_P Parameter: Timepoint (hr) Value: 6
  misc_feature: MA Experiment 20001757 PARAMETER Experiment Name: At_50mM_NH4NO3_L-to-H_P Parameter: Tissue Value: Leaf
  misc_feature: MA Experiment 20001757 PARAMETER Experiment Name: At_50mM_NH4NO3_L-to-H_P Parameter: Treatment Value: 50mM NH4NO3 vs 100mM Mannitol
  misc_feature: MA Experiment ID: 20001906 Result: Down-regulated in Transcription
  misc_feature: MA Experiment 20001906 PARAMETER Experiment Name: At_Drought_Reproduction_P Parameter: Age (day) Value: 35
  misc_feature: MA Experiment 20001906 PARAMETER Experiment Name: At_Drought_Reproduction_P Parameter: Organism Value: A. thaliana
  misc_feature: MA Experiment 20001906 PARAMETER Experiment Name: At_Drought_Reproduction_P Parameter: Plant Line Value: WS
  misc_feature: MA Experiment 20001906 PARAMETER Experiment Name: At_Drought_Reproduction_P Parameter: Timepoint (day) Value: 5
  misc_feature: MA Experiment 20001906 PARAMETER Experiment Name: At_Drought_Reproduction_P Parameter: Tissue Value: Siliques
  misc_feature: MA Experiment 20001906 PARAMETER Experiment Name: At_Drought_Reproduction_P Parameter: Treatment Value: Drought vs. No Drought
  misc_feature: MA Experiment ID: 20001908 Result: Down-regulated in Transcription
  misc_feature: MA Experiment 20001908 PARAMETER Experiment Name: At_Drought_Reproduction_P Parameter: Age (day) Value: 40
  misc_feature: MA Experiment 20001908 PARAMETER Experiment Name: At_Drought_Reproduction_P Parameter: Organism Value: A. thaliana
  misc_feature: MA Experiment 20001908 PARAMETER Experiment Name: At_Drought_Reproduction_P Parameter: Plant Line Value: WS
  misc_feature: MA Experiment 20001908 PARAMETER Experiment Name: At_Drought_Reproduction_P Parameter: Timepoint (day) Value: 10
  misc_feature: MA Experiment 20001908 PARAMETER Experiment Name: At_Drought_Reproduction_P Parameter: Tissue Value: Siliques
  misc_feature: MA Experiment 20001908 PARAMETER Experiment Name: At_Drought_Reproduction_P Parameter: Treatment Value: Drought vs. No Drought
atctctctcctctctttgtctctctcgcttctgtgatttgggctttttcagatgggaaatgcgaacggcaaagacgaagacgccgccgccggtagcggtggtgcagatgttacctcgtcctcggcgagatctaatggcggcgatccttctgcacgcagtcgtcaccgtcgtccttcttcagactctatgagcagttctcctcccggaagtcctgctcgatctccatctcctttcttattcgctcctcagcccacattgttattccacgttacatcttacaacatttgctcacctatgcgtcacctcttccattgtttaggcttaacatgtgtacctaatggctgcatttcgtgtcggatggttcccgtggctccattgcagagagcaaacgcccctcctcctaataacatccaatggaaccaatcacagagagtttttgataatcccccagagcaaggaatccctaccatcattacatggaaccaaggaggtaatgatgtggcggtggaaggatcatgggacaattggagatcaaggaagaagctgcagaaatcagggaaagaccactcgattctctttgtccttccatctggcatataccactacaaggtgattgtggacggtgaatccaaatacatcccagatttaccctttgtagcagacgaagttggcaatgtctgtaacattctcgatgttcataactttgtgccagaaaacccagaaagcatagtggagtttgaggcgccaccatcacctgatcatagctacggtcaaaccctaccagccgcagaagattacgcgaaagagccactggcggtgccacctcagcttcatctaacacttcttggcactactgaagagacagccatagccacaaagcctcaacatgtggtgcttaaccatgtgttcatagagcaaggatggactcctcaatccatagtagctttgggtttaacccacaggttcgagtctaagtacataactgttgtcctctacaaaccgctcacacggtaaccctaaaaattcagtgccacattgttctctctctttctttctttttcatctctcaattatgtgaaaacatgttctttgttcatagtgactagtgagtgcccaacatttgagtttattaacctctttcttacctggtttgtggtgcttgtg

SEQ ID NO: 99996 - protein, 320 aa, Arabidopsis thaliana
  peptide (1)..(320): Ceres Seq. ID no. 13604065
  misc_feature (0)..(0): Pfam Name: 5'-AMP-activated protein kinase, beta subunit, Pfam Description: 5'-AMP-activated protein kinase, beta subunit,
  misc_feature (95)..(320): Homolog of NCBI NO: 15242175 NR Description: AMPKBI (5'-AMP-activated protein kinase, beta
  misc_feature (1)..(66): Homolog of NCBI NO: 15242175 NR Description: AMPKBI (5'-AMP-activated protein kinase, beta
  misc_feature (95)..(320): Homolog of NCBI NO: 6686782 NR Description: AKIN gamma [Arabidopsis thaliana]
  misc_feature (1)..(66): Homolog of NCBI NO: 6686782 NR Description: AKIN gamma [Arabidopsis thaliana]
  misc_feature (104)..(320): Homolog of NCBI NO: 32364486 NR Description: AKIN beta1 [Medicago truncatula]
  misc_feature (16)..(69): Homolog of NCBI NO: 32364486 NR Description: AKIN beta1 [Medicago truncatula]
  misc_feature (104)..(320): Homolog of NCBI NO: 5702015 NR Description: GAL83 protein [Solanum tuberosum]
  misc_feature (1)..(66): Homolog of NCBI NO: 5702015 NR Description: GAL83 protein [Solanum tuberosum]
  misc_feature (104)..(320): Homolog of NCBI NO: 6686784 NR Description: AKIN beta2 [Arabidopsis thaliana]
  misc_feature (1)..(69): Homolog of NCBI NO: 6686784 NR Description: AKIN beta2 [Arabidopsis thaliana]
MGNANGKDEDAAAGSGGADVTSSSARSNGGDPSARSRHRRPSSDSMSSSPPGSPARSPSPFLFAPQPTLLFHVTSYNICSPMRHLFHCLGLTCVPNGCISCRMVPVAPLQRANAPPPNNIQWNQSQRVFDNPPEQGIPTIITWNQGGNDVAVEGSWDNWRSRKKLQKSGKDHSILFVLPSGIYHYKVIVDGESKYIPDLPFVADEVGNVCNILDVHNFVPENPESIVEFEAPPSPDHSYGQTLPAAEDYAKEPLAVPPQLHLTLLGTTEETAIATKPQHVVLNHVFIEQGWTPQSIVALGLTHRFESKYITVVLYKPLTR

SEQ ID NO: 99997 - protein, 275 aa, Arabidopsis thaliana
  peptide (1)..(275): Ceres Seq. ID no. 13604066
  misc_feature (0)..(0): Pfam Name: 5'-AMP-activated protein kinase, beta subunit, Pfam Description: 5'-AMP-activated protein kinase, beta subunit,
  misc_feature (50)..(275): Homolog of NCBI NO: 15242175 NR Description: AMPKBI (5'-AMP-activated protein kinase, beta
  misc_feature (1)..(21): Homolog of NCBI NO: 15242175 NR Description: AMPKBI (5'-AMP-activated protein kinase, beta
  misc_feature (50)..(275): Homolog of NCBI NO: 6686782 NR Description: AKIN gamma [Arabidopsis thaliana]
  misc_feature (1)..(21): Homolog of NCBI NO: 6686782 NR Description: AKIN gamma [Arabidopsis thaliana]
  misc_feature (59)..(275): Homolog of NCBI NO: 32364486 NR Description: AKIN beta1 [Medicago truncatula]
  misc_feature (1)..(24): Homolog of NCBI NO: 32364486 NR Description: AKIN beta1 [Medicago truncatula]
  misc_feature (59)..(275): Homolog of NCBI NO: 5702015 NR Description: GAL83 protein [Solanum tuberosum]
  misc_feature (1)..(21): Homolog of NCBI NO: 5702015 NR Description: GAL83 protein [Solanum tuberosum]
  misc_feature (59)..(275): Homolog of NCBI NO: 6686784 NR Description: AKIN beta2 [Arabidopsis thaliana]
  misc_feature (1)..(24): Homolog of NCBI NO: 6686784 NR Description: AKIN beta2 [Arabidopsis thaliana]
MSSSPPGSPARSPSPFLFAPQPTLLFHVTSYNICSPMRHLFHCLGLTCVPNGCISCRMVPVAPLQRANAPPPNNIQWNQSQRVFDNPPEQGIPTIITWNQGGNDVAVEGSWDNWRSRKKLQKSGKDHSILFVLPSGIYHYKVIVDGESKYIPDLPFVADEVGNVCNILDVHNFVPENPESIVEFEAPPSPDHSYGQTLPAAEDYAKEPLAVPPQLHLTLLGTTEETAIATKPQHVVLNHVFIEQGWTPQSIVALGLTHRFESKYITVVLYKPLTR

SEQ ID NO: 99998 - protein, 239 aa, Arabidopsis thaliana
  peptide (1)..(239): Ceres Seq. ID no. 13604067
  misc_feature (0)..(0): Pfam Name: 5'-AMP-activated protein kinase, beta subunit, Pfam Description: 5'-AMP-activated protein kinase, beta subunit,
  misc_feature (14)..(239): Homolog of NCBI NO: 15242175 NR Description: AMPKBI (5'-AMP-activated protein kinase, beta
  misc_feature (14)..(239): Homolog of NCBI NO: 6686782 NR Description: AKIN gamma [Arabidopsis thaliana]
  misc_feature (23)..(239): Homolog of NCBI NO: 32364486 NR Description: AKIN beta1 [Medicago truncatula]
  misc_feature (23)..(239): Homolog of NCBI NO: 5702015 NR Description: GAL83 protein [Solanum tuberosum]
  misc_feature (23)..(239): Homolog of NCBI NO: 6686784 NR Description: AKIN beta2 [Arabidopsis thaliana]
  misc_feature (23)..(197): Homolog of NCBI NO: 29725558 NR Description: SNF1 kinase complex anchoring protein
  misc_feature (23)..(239): Homolog of NCBI NO: 11935162 NR Description: SNF1-related kinase complex anchoring protein
  misc_feature (23)..(239): Homolog of NCBI NO: 15234895 NR Description: kinase like protein [Arabidopsis thaliana]
  misc_feature (24)..(239): Homolog of NCBI NO: 32364488 NR Description: AKIN beta2 [Medicago truncatula]
  misc_feature (24)..(239): Homolog of NCBI NO: 22324436 NR Description: AKIN beta1-like protein [Oryza sativa (japonica
MRHLFHCLGLTCVPNGCISCRMVPVAPLQRANAPPPNNIQWNQSQRVFDNPPEQGIPTIITWNQGGNDVAVEGSWDNWRSRKKLQKSGKDHSILFVLPSGIYHYKVIVDGESKYIPDLPFVADEVGNVCNILDVHNFVPENPESIVEFEAPPSPDHSYGQTLPAAEDYAKEPLAVPPQLHLTLLGTTEETAIATKPQHVVLNHVFIEQGWTPQSIVALGLTHRFESKYITVVLYKPLTR

SEQ ID NO: 99999 - DNA, 1075 bp, Arabidopsis thaliana
  misc_feature (1)..(1075): Ceres Seq. ID no. 13604068
  misc_feature: MA Experiment ID: 20000234 Result: Up-regulated in Transcription
  misc_feature: MA Experiment 20000234 PARAMETER Experiment Name: At_Siliques_P Parameter: Age (day) Value: 21
  misc_feature: MA Experiment 20000234 PARAMETER Experiment Name: At_Siliques_P Parameter: Organism Value: A. thaliana
  misc_feature: MA Experiment 20000234 PARAMETER Experiment Name: At_Siliques_P Parameter: Plant Line Value: WS
  misc_feature: MA Experiment 20000234 PARAMETER Experiment Name: At_Siliques_P Parameter: Tissue Value: Less Than 5mm Siliques vs. Whole Plant
  misc_feature: MA Experiment ID: 20000264 Result: Up-regulated in Transcription
  misc_feature: MA Experiment 20000264 PARAMETER Experiment Name: At_Open_Flower_P Parameter: Age (day) Value: 21
  misc_feature: MA Experiment 20000264 PARAMETER Experiment Name: At_Open_Flower_P Parameter: Plant Line Value: WS
  misc_feature: MA Experiment 20000264 PARAMETER Experiment Name: At_Open_Flower_P Parameter: Tissue Value: Open Flower vs. Whole Plant
  misc_feature: MA Experiment ID: 20000265 Result: Up-regulated in Transcription
  misc_feature: MA Experiment 20000265 PARAMETER Experiment Name: At_Open_Flower_P Parameter: Age (day) Value: 21
  misc_feature: MA Experiment 20000265 PARAMETER Experiment Name: At_Open_Flower_P Parameter: Plant Line Value: WS
  misc_feature: MA Experiment 20000265 PARAMETER Experiment Name: At_Open_Flower_P Parameter: Tissue Value: Closed Flower vs. Whole Plant
  misc_feature: MA Experiment ID: 20000438 Result: Down-regulated in Transcription
  misc_feature: MA Experiment 20000438 PARAMETER Experiment Name: At_Shoots__P Parameter: Age (day) Value: 14
  misc_feature: MA Experiment 20000438 PARAMETER Experiment Name: At_Shoots__P Parameter: Tissue Value: Shoots vs. Whole Plant
  misc_feature: MA Experiment ID: 20000439 Result: Up-regulated in Transcription
  misc_feature: MA Experiment 20000439 PARAMETER Experiment Name: At_Roots__P Parameter: Age (day) Value: 14 vs. 21
  misc_feature: MA Experiment 20000439 PARAMETER Experiment Name: At_Roots__P Parameter: Organism Value: A. thaliana
  misc_feature: MA Experiment 20000439 PARAMETER Experiment Name: At_Roots__P Parameter: Tissue Value: Roots vs. Whole Plant
  misc_feature: MA Experiment ID: 20000527 Result: Down-regulated in Transcription
  misc_feature: MA Experiment 20000527 PARAMETER Experiment Name: At_10percent_PEG_P Parameter: Age (day) Value: 20
  misc_feature: MA Experiment 20000527 PARAMETER Experiment Name: At_10percent_PEG_P Parameter: Organism Value: A. thaliana
  misc_feature: MA Experiment 20000527 PARAMETER Experiment Name: At_10percent_PEG_P Parameter: Plant Line Value: WS
  misc_feature: MA Experiment 20000527 PARAMETER Experiment Name: At_10percent_PEG_P Parameter: Timepoint (day) Value: 20
  misc_feature: MA Experiment 20000527 PARAMETER Experiment Name: At_10percent_PEG_P Parameter: Tissue Value: Whole Plant
  misc_feature: MA Experiment 20000527 PARAMETER Experiment Name: At_10percent_PEG_P Parameter: Treatment Value: 10percent PEG vs. No Treatment
  misc_feature: MA Experiment ID: 20000794 Result: Up-regulated in Transcription
  misc_feature: MA Experiment 20000794 PARAMETER Experiment Name: At_Petals_P Parameter: Age (day) Value: 23-25 days
  misc_feature: MA Experiment 20000794 PARAMETER Experiment Name: At_Petals_P Parameter: Plant Line Value: WS
  misc_feature: MA Experiment 20000794 PARAMETER Experiment Name: At_Petals_P Parameter: Tissue Value: Petals vs. Whole plant
  misc_feature: MA Experiment ID: 20001556 Result: Down-regulated in Transcription
  misc_feature: MA Experiment 20001556 PARAMETER Experiment Name: At_Drought_Soil_Dry_P Parameter: Age (day) Value: 26
  misc_feature: MA Experiment 20001556 PARAMETER Experiment Name: At_Drought_Soil_Dry_P Parameter: Organism Value: A. thaliana
  misc_feature: MA Experiment 20001556 PARAMETER Experiment Name: At_Drought_Soil_Dry_P Parameter: Plant Line Value: WS
  misc_feature: MA Experiment 20001556 PARAMETER Experiment Name: At_Drought_Soil_Dry_P Parameter: Post Timepoint (hr) Value: None
  misc_feature: MA Experiment 20001556 PARAMETER Experiment Name: At_Drought_Soil_Dry_P Parameter: Post-Treatment Value: None
  misc_feature: MA Experiment 20001556 PARAMETER Experiment Name: At_Drought_Soil_Dry_P Parameter: Timepoint (day) Value: 12
  misc_feature: MA Experiment 20001556 PARAMETER Experiment Name: At_Drought_Soil_Dry_P Parameter: Treatment Value: Drought vs. No Drought
atggctccctcgtttctaagcgtcgcaagattcgttgaggcactactccgccggagattctcctccgctggtctctccttacaaaccctatccatcgactccgaaaccaccatacagttctggggaccaccaccgtcttcatcatcggaaaatacacaaaaaccgtcgctcctcctcctccatggttttggaccttccgctgtatggcaatggagccatcaggtcaagccactctctcacttctttcgtctctacgtccccgacctagtcttcttcggcggctcctcttcctccggtgagaaccggtcggagatgtttcaagcgttgtgcatggggaagcttatggagaagctcgaggtcgagagattcagtgtcgttgggacgagctacggcgggtttgtggcgtataatatggcgaaaatgtttccggagaaagtggagaaggtggtgcttgcgagctccggtgttaatttgcggaggagtgacaacgaggcgtttatcgctagggctaagtgccaccgtatcaaggaggtgatgcttcctgcttctgcaacagatcttaggagattctctgggatggtttcttctaagagactcgattatgtcccagattttgtcttgaacgacttttgccagaaaatgtattcggaaaagagagaggaaaaagcagaacttctcgaggggctgagtattgggaaggatgacaaaaccaacgtttctccaattcaacaggatgtaatgctgatatggggtgagcaagatcaagtttttcctttaaaaatggcccatgacctcaaagagatgttggggactaaggcgacgctaaaagttatacaaaagacatcacatatacctcaaacggagaagtccaaagaattcaatggctttgtcatgtctttcttattacctccttctccatcaccataaatgtaacatccatattaaactataaattacaatttttttctgatttcgtcgatgttagaagtatttatgatgcatatgtcagttcatgatacatttgagaatatttgtaacattgttattgatgatgcatatgtcaaattagttcacc

SEQ ID NO: 100000 - protein, 308 aa, Arabidopsis thaliana
  peptide (1)..(308): Ceres Seq. ID no. 13604069
  misc_feature (110)..(299): Pfam Name: alpha/beta hydrolase fold Pfam Description: alpha/beta hydrolase fold
  misc_feature (1)..(308): Homolog of NCBI NO: 22326938 NR Description: hydrolase, alpha/beta fold family [Arabidopsis >gi|29294062|gb|AAO73899.1| hydrolase, alpha/beta fold family
  misc_feature (1)..(212): Homolog of NCBI NO: 13374854 NR Description: putative protein [Arabidopsis thaliana]
  misc_feature (105)..(308): Homolog of NCBI NO: 26451507 NR Description: unknown protein [Arabidopsis thaliana]
  misc_feature (4)..(301): Homolog of NCBI NO: 30689631 NR Description: hydrolase, alpha/beta fold family [Arabidopsis
  misc_feature (57)..(301): Homolog of NCBI NO: 21592805 NR Description: unknown [Arabidopsis thaliana]
  misc_feature (3)..(217): Homolog of NCBI NO: 24059850 NR Description: hydrolase-like protein [Oryza sativa (japonica
  misc_feature (214)..(307): Homolog of NCBI NO: 24059850 NR Description: hydrolase-like protein [Oryza sativa (japonica
  misc_feature (6)..(307): Homolog of NCBI NO: 27436746 NR Description: Unknown protein [Oryza sativa (japonica
  misc_feature (8)..(308): Homolog of NCBI NO: 27436745 NR Description: Hypothetical protein [Oryza sativa (japonica
  misc_feature (7)..(305): Homolog of NCBI NO: 18411865 NR Description: hydrolase, alpha/beta fold family [Arabidopsis >gi|19699019|gb|AAL91245.1| unknown protein [Arabidopsis >gi|25084092|gb|AAN72173.1| unknown protein [Arabidopsis
MAPSFLSVARFVEALLRRRFSSAGLSLQTLSIDSETTIQFWGPPPSSSSENTQKPSLLLLHGFGPSAVWQWSHQVKPLSHFFRLYVPDLVFFGGSSSSGENRSEMFQALCMGKLMEKLEVERFSVVGTSYGGFVAYNMAKMFPEKVEKVVLASSGVNLRRSDNEAFIARAKCHRIKEVMLPASATDLRRFSGMVSSKRLDYVPDFVLNDFCQKMYSEKREEKAELLEGLSIGKDDKTNVSPIQQDVMLIWGEQDQVFPLKMAHDLKEMLGTKATLKVIQKTSHIPQTEKSKEFNGFVMSFLLPPSPSP

SEQ ID NO: 100001 - protein, 204 aa, Arabidopsis thaliana
  peptide (1)..(204): Ceres Seq. ID no. 13604070
  misc_feature (6)..(195): Pfam Name: alpha/beta hydrolase fold Pfam Description: alpha/beta hydrolase fold
  misc_feature (1)..(204): Homolog of NCBI NO: 22326938 NR Description: hydrolase, alpha/beta fold family [Arabidopsis >gi|29294062|gb|AAO73899.1| hydrolase, alpha/beta fold family
  misc_feature (1)..(108): Homolog of NCBI NO: 13374854 NR Description: putative protein [Arabidopsis thaliana]
  misc_feature (1)..(204): Homolog of NCBI NO: 26451507 NR Description: unknown protein [Arabidopsis thaliana]
  misc_feature (1)..(197): Homolog of NCBI NO: 30689631 NR Description: hydrolase, alpha/beta fold family [Arabidopsis
  misc_feature (1)..(197): Homolog of NCBI NO: 21592805 NR Description: unknown [Arabidopsis thaliana]
  misc_feature (1)..(113): Homolog of NCBI NO: 24059850 NR Description: hydrolase-like protein [Oryza sativa (japonica
  misc_feature (110)..(203): Homolog of NCBI NO: 24059850 NR Description: hydrolase-like protein [Oryza sativa (japonica
  misc_feature (1)..(203): Homolog of NCBI NO: 27436746 NR Description: Unknown protein [Oryza sativa (japonica
  misc_feature (1)..(204): Homolog of NCBI NO: 27436745 NR Description: Hypothetical protein [Oryza sativa (japonica
  misc_feature (1)..(201): Homolog of NCBI NO: 18411865 NR Description: hydrolase, alpha/beta fold family [Arabidopsis >gi|19699019|gb|AAL91245.1| unknown protein [Arabidopsis >gi|25084092|gb|AAN72173.1| unknown protein [Arabidopsis
MFQALCMGKLMEKLEVERFSVVGTSYGGFVAYNMAKMFPEKVEKVVLASSGVNLRRSDNEAFIARAKCHRIKEVMLPASATDLRRFSGMVSSKRLDYVPDFVLNDFCQKMYSEKREEKAELLEGLSIGKDDKTNVSPIQQDVMLIWGEQDQVFPLKMAHDLKEMLGTKATLKVIQKTSHIPQTEKSKEFNGFVMSFLLPPSPSP

SEQ ID NO: 100002 - protein, 198 aa, Arabidopsis thaliana
  peptide (1)..(198): Ceres Seq. ID no. 13604071
  misc_feature (1)..(189): Pfam Name: alpha/beta hydrolase fold Pfam Description: alpha/beta hydrolase fold
  misc_feature (1)..(198): Homolog of NCBI NO: 22326938 NR Description: hydrolase, alpha/beta fold family [Arabidopsis >gi|29294062|gb|AAO73899.1| hydrolase, alpha/beta fold family
  misc_feature (1)..(102): Homolog of NCBI NO: 13374854 NR Description: putative protein [Arabidopsis thaliana]
  misc_feature (1)..(198): Homolog of NCBI NO: 26451507 NR Description: unknown protein [Arabidopsis thaliana]
  misc_feature (1)..(191): Homolog of NCBI NO: 30689631 NR Description: hydrolase, alpha/beta fold family [Arabidopsis
  misc_feature (1)..(191): Homolog of NCBI NO: 21592805 NR Description: unknown [Arabidopsis thaliana]
  misc_feature (1)..(107): Homolog of NCBI NO: 24059850 NR Description: hydrolase-like protein [Oryza sativa (japonica
  misc_feature (104)..(197): Homolog of NCBI NO: 24059850 NR Description: hydrolase-like protein [Oryza sativa (japonica
  misc_feature (1)..(197): Homolog of NCBI NO: 27436746 NR Description: Unknown protein [Oryza sativa (japonica
  misc_feature (1)..(198): Homolog of NCBI NO: 27436745 NR Description: Hypothetical protein [Oryza sativa (japonica
  misc_feature (1)..(195): Homolog of NCBI NO: 18411865 NR Description: hydrolase, alpha/beta fold family [Arabidopsis >gi|19699019|gb|AAL91245.1| unknown protein [Arabidopsis >gi|25084092|gb|AAN72173.1| unknown protein [Arabidopsis
MGKLMEKLEVERFSVVGTSYGGFVAYNMAKMFPEKVEKVVLASSGVNLRRSDNEAFIARAKCHRIKEVMLPASATDLRRFSGMVSSKRLDYVPDFVLNDFCQKMYSEKREEKAELLEGLSIGKDDKTNVSPIQQDVMLIWGEQDQVFPLKMAHDLKEMLGTKATLKVIQKTSHIPQTEKSKEFNGFVMSFLLPPSPSP

SEQ ID NO: 100003 - DNA, 1792 bp, Arabidopsis thaliana
  misc_feature (1)..(1792): Ceres Seq. ID no. 13604072
  misc_feature: MA Experiment ID: 108434 Result: Down-regulated in Transcription
  misc_feature: MA Experiment 108434 PARAMETER Experiment Name: At_Root_Tips_cDNA_P Parameter: Tissue Value: Root Tips
  misc_feature: MA Experiment ID: 108573 Result: Up-regulated in Transcription
  misc_feature: MA Experiment 108573 PARAMETER Experiment Name: At_Drought_cDNA_P Parameter: Timepoint (hr) Value: 6
  misc_feature: MA Experiment 108573 PARAMETER Experiment Name: At_Drought_cDNA_P Parameter: Tissue Value: Aerial
  misc_feature: MA Experiment 108573 PARAMETER Experiment Name: At_Drought_cDNA_P Parameter: Treatment Value: Drought vs. No Drought
  misc_feature: MA Experiment ID: 108668 Result: Up-regulated in Transcription
  misc_feature: MA Experiment 108668 PARAMETER Experiment Name: At_2mM_SA_cDNA_P Parameter: Plant Line Value: WS
  misc_feature: MA Experiment 108668 PARAMETER Experiment Name: At_2mM_SA_cDNA_P Parameter: Timepoint (hr) Value: 6
  misc_feature: MA Experiment 108668 PARAMETER Experiment Name: At_2mM_SA_cDNA_P Parameter: Treatment Value: 2mM SA vs. No Treatment
  misc_feature: MA Experiment ID: 20000112 Result: Up-regulated in Transcription
  misc_feature: MA Experiment 20000112 PARAMETER Experiment Name: At_42deg_Heat_cDNA_P Parameter: Temperature (deg C) Value: 42 vs. 22
  misc_feature: MA Experiment 20000112 PARAMETER Experiment Name: At_42deg_Heat_cDNA_P Parameter: Timepoint (hr) Value: 2
  misc_feature: MA Experiment 20000112 PARAMETER Experiment Name: At_42deg_Heat_cDNA_P Parameter: Tissue Value: Aerial
  misc_feature: MA Experiment ID: 20000113 Result: Up-regulated in Transcription
  misc_feature: MA Experiment 20000113 PARAMETER Experiment Name: At_42deg_Heat_cDNA_P Parameter: Temperature (deg C) Value: 42 vs. 22
  misc_feature: MA Experiment 20000113 PARAMETER Experiment Name: At_42deg_Heat_cDNA_P Parameter: Timepoint (hr) Value: 8
  misc_feature: MA Experiment 20000113 PARAMETER Experiment Name: At_42deg_Heat_cDNA_P Parameter: Tissue Value: Aerial
  misc_feature: MA Experiment ID: 20001450 Result: Up-regulated in Transcription
  misc_feature: MA Experiment 20001450 PARAMETER Experiment Name: At_Far-red-induction_P Parameter: Age (day) Value: 7
  misc_feature: MA Experiment 20001450 PARAMETER Experiment Name: At_Far-red-induction_P Parameter: Light Value: Far-red vs. White
  misc_feature: MA Experiment 20001450 PARAMETER Experiment Name: At_Far-red-induction_P Parameter: Organism Value: A. thaliana
  misc_feature: MA Experiment 20001450 PARAMETER Experiment Name: At_Far-red-induction_P Parameter: Plant Line Value: Columbia
  misc_feature: MA Experiment 20001450 PARAMETER Experiment Name: At_Far-red-induction_P Parameter: Timepoint (hr) Value: 8
  misc_feature: MA Experiment 20001450 PARAMETER Experiment Name: At_Far-red-induction_P Parameter: Tissue Value: Whole Plant
  misc_feature: MA Experiment ID: 20001451 Result: Up-regulated in Transcription
  misc_feature: MA Experiment 20001451 PARAMETER Experiment Name: At_Far-red-induction_P Parameter: Age (day) Value: 7
  misc_feature: MA Experiment 20001451 PARAMETER Experiment Name: At_Far-red-induction_P Parameter: Light Value: Far-red vs. White
  misc_feature: MA Experiment 20001451 PARAMETER Experiment Name: At_Far-red-induction_P Parameter: Organism Value: A. thaliana
  misc_feature: MA Experiment 20001451 PARAMETER Experiment Name: At_Far-red-induction_P Parameter: Plant Line Value: Columbia
  misc_feature: MA Experiment 20001451 PARAMETER Experiment Name: At_Far-red-induction_P Parameter: Timepoint (hr) Value: 24
  misc_feature: MA Experiment 20001451 PARAMETER Experiment Name: At_Far-red-induction_P Parameter: Tissue Value: Whole Plant
  misc_feature: MA Experiment ID: 20001911 Result: Up-regulated in Transcription
  misc_feature: MA Experiment 20001911 PARAMETER Experiment Name: At_Drought_Reproduction_P Parameter: Age (day) Value: 40
  misc_feature: MA Experiment 20001911 PARAMETER Experiment Name: At_Drought_Reproduction_P Parameter: Organism Value: A. thaliana
  misc_feature: MA Experiment 20001911 PARAMETER Experiment Name: At_Drought_Reproduction_P Parameter: Plant Line Value: WS
  misc_feature: MA Experiment 20001911 PARAMETER Experiment Name: At_Drought_Reproduction_P Parameter: Timepoint (day) Value: 10
  misc_feature: MA Experiment 20001911 PARAMETER Experiment Name: At_Drought_Reproduction_P Parameter: Tissue Value: Flowers
  misc_feature: MA Experiment 20001911 PARAMETER Experiment Name: At_Drought_Reproduction_P Parameter: Treatment Value: Drought vs. No Drought
aaagagtctttgtcattgtcttccttcttcttcctttttctctccccccccccattatcttcggcgaatcatgaatctagggttttgttttctcccataaccctagattttcttccatcaatcttatatttttctcatttcttcttctccgttttagctcatctcccgattcatctcgatttccatggagggagcgggagagacgacgacgtcggaggggcatttgacttcggcagcagcttttgtggaagggggaattcaagatgcttgtgatgatgcttgtagcatttgtcttgaatccttctgcgaaagcgatccttctactttgactagttgcaagcatgagtatcatcttcaatgcattcttgagtggtgtcaaagaagctcacagtgccctatgtgttggcaatcaattagtctcaaagaccccacaagtcaggagttgcttgaggctgtggaacaggagaggaatttccgcttcaatccaactagaaatgccaccatatttcgtcatccaactcttggtgattttgaattacaacatcttccagtgggggtggataatgctgagattgaagaacgaatcattcagcacttggctgctgctgctgctatgggacgagcaagacatggggtaagaagggaaggccacagaagcaggtcgtcaagtcaaggacatcaacagttcatggtgttctcttcgcaacctaatgcttcttctcctccacctcatcctcccatgccttcttctccatctcagagagatgagagtgacacagtgtcaaaccttcctcacaatgctttaggggagggttctcatcagtcaaacacgcagccaccaacttcttctcatccccgccaggtttctccctcagcatctgattcaaacagcaggcctcttaatcaatcttccccaagtgaacaagatagagctggaccatcagaactccagtcattttcggaatcacttaagtctcgattaaacgctgtctccacgagatacaaagaatcgatatcaaagaatacaaggaactggaaagatagacttttttctcgcaacacgtccatggcagatcttggctctgaggttaaaagagaggtcagtgccggaatcgccactgtgtcccgcatgatggaacgtttagaaacgagagaaaacagtagacccagcactgcatctgtatcagatgtctctgaaaatcacactcctgaaacaaacaatgagcacaatagagcagcagcgggtgatgaacattctgtgaatgaaagaggtgttaaagaaacatgtgcgactggttctggttcaagctaataagtgagtgccagcatcttgttggcaaagagagaggaagatgttgtccattgtgaaattctgataatatatatatacagagtcagaagtctcaaaagtgtggagcataggaagaaggttattattgataaagaaaaagagttttccgattatcaataaataagaaaagttatatatgaccaaaaggaggccttaaagacgcctctttctgtgttatgtcaaacaaacaaaaaaaaaactaaagagaaaaattagagtaaaagacctgtgtggggttgttggttatttggtcggtctgttgtaaattcacattgtcgttcacattacggatttctatgaatttctacttatgtatcttcaaaaacttggtctagcaaaaccaatttaatgtatcgattccagtgtactatagttatgatggtgtcgtgtgacttctgtcgaacaaacaaaattatggtgcttaataatggttttcgattt

SEQ ID NO: 100004 - protein, 375 aa, Arabidopsis thaliana; identical to SEQ ID NO: 41738
  peptide (1)..(375): Ceres Seq. ID no. 13604073
  misc_feature (33)..(73): Pfam Name: Zinc finger, C3HC4 type (RING finger) Pfam Description: Zinc finger, C3HC4 type (RING finger)
  misc_feature (1)..(375): Homolog of NCBI NO: 18420424 NR Description: zinc finger (C3HC4-type RING finger) protein
  misc_feature (1)..(375): Homolog of NCBI NO: 30688252 NR Description: zinc finger (C3HC4-type RING finger) protein
  misc_feature (1)..(352): Homolog of NCBI NO: 26451710 NR Description: putative RING-H2 finger protein RHF2a
  misc_feature (3)..(350): Homolog of NCBI NO: 32493110 NR Description: putative RING-H2 zinc finger protein [Oryza
  misc_feature (6)..(308): Homolog of NCBI NO: 27819501 NR Description: putative zinc finger protein [Oryza sativa
  misc_feature (1)..(114): Homolog of NCBI NO: 32400766 NR Description: RING-H2 finger protein [Triticum aestivum]
  misc_feature (15)..(282): Homolog of NCBI NO: 25360953 NR Description: RING-H2 finger protein RHF1a [imported] -
  misc_feature (15)..(282): Homolog of NCBI NO: 30682750 NR Description: zinc finger (C3HC4-type RING finger) protein
  misc_feature (15)..(282): Homolog of NCBI NO: 26450997 NR Description: putative RING-H2 finger protein RHF1a
  misc_feature (30)..(282): Homolog of NCBI NO: 11358783 NR Description: RING-H2 finger protein RHF1a [imported] -

SEQ ID NO: 100005 - protein, 304 aa, Arabidopsis thaliana; identical to SEQ ID NO: 41739
  peptide (1)..(304): Ceres Seq. ID no. 13604074
  misc_feature (1)..(304): Homolog of NCBI NO: 18420424 NR Description: zinc finger (C3HC4-type RING finger) protein
  misc_feature (1)..(304): Homolog of NCBI NO: 30688252 NR Description: zinc finger (C3HC4-type RING finger) protein
  misc_feature (1)..(281): Homolog of NCBI NO: 26451710 NR Description: putative RING-H2 finger protein RHF2a
  misc_feature (1)..(279): Homolog of NCBI NO: 32493110 NR Description: putative RING-H2 zinc finger protein [Oryza
  misc_feature (1)..(237): Homolog of NCBI NO: 27819501 NR Description: putative zinc finger protein [Oryza sativa
  misc_feature (1)..(43): Homolog of NCBI NO: 32400766 NR Description: RING-H2 finger protein [Triticum aestivum]
  misc_feature (1)..(211): Homolog of NCBI NO: 25360953 NR Description: RING-H2 finger protein RHF1a [imported] -
  misc_feature (1)..(211): Homolog of NCBI NO: 30682750 NR Description: zinc finger (C3HC4-type RING finger) protein
  misc_feature (1)..(211): Homolog of NCBI NO: 26450997 NR Description: putative RING-H2 finger protein RHF1a
  misc_feature (1)..(211): Homolog of NCBI NO: 11358783 NR Description: RING-H2 finger protein RHF1a [imported] -

SEQ ID NO: 100006 - protein, 232 aa, Arabidopsis thaliana; identical to SEQ ID NO: 41740
  peptide (1)..(232): Ceres Seq. ID no. 13604075
  misc_feature (1)..(232): Homolog of NCBI NO: 18420424 NR Description: zinc finger (C3HC4-type RING finger) protein
  misc_feature (1)..(232): Homolog of NCBI NO: 30688252 NR Description: zinc finger (C3HC4-type RING finger) protein
  misc_feature (1)..(209): Homolog of NCBI NO: 26451710 NR Description: putative RING-H2 finger protein RHF2a
  misc_feature (1)..(207): Homolog of NCBI NO: 32493110 NR Description: putative RING-H2 zinc finger protein [Oryza
  misc_feature (1)..(165): Homolog of NCBI NO: 27819501 NR Description: putative zinc finger protein [Oryza sativa
  misc_feature (1)..(139): Homolog of NCBI NO: 25360953 NR Description: RING-H2 finger protein RHF1a [imported] -
  misc_feature (1)..(139): Homolog of NCBI NO: 30682750 NR Description: zinc finger (C3HC4-type RING finger) protein
  misc_feature (1)..(139): Homolog of NCBI NO: 26450997 NR Description: putative RING-H2 finger protein RHF1a
  misc_feature (1)..(139): Homolog of NCBI NO: 11358783 NR Description: RING-H2 finger protein RHF1a [imported] -
  misc_feature (45)..(191): Homolog of NCBI NO: 7485164 NR Description: hypothetical protein - Arabidopsis thaliana

SEQ ID NO: 100007 - DNA, 1387 bp, Arabidopsis thaliana
  misc_feature (1)..(1387): Ceres Seq. ID no. 13604088
  misc_feature: MA Experiment ID: 108461 Result: Down-regulated in Transcription
  misc_feature: MA Experiment 108461 PARAMETER Experiment Name: At_Germinating_Seeds_cDNA_P Parameter: Age (day) Value: 1 vs. 0
  misc_feature: MA Experiment 108461 PARAMETER Experiment Name: At_Germinating_Seeds_cDNA_P Parameter: Tissue Value: Germinating Seeds
  misc_feature: MA Experiment ID: 108462 Result: Down-regulated in Transcription
  misc_feature: MA Experiment 108462 PARAMETER Experiment Name: At_Germinating_Seeds_cDNA_P Parameter: Age (day) Value: 2 vs. 0
  misc_feature: MA Experiment 108462 PARAMETER Experiment Name: At_Germinating_Seeds_cDNA_P Parameter: Tissue Value: Germinating Seeds
  misc_feature: MA Experiment ID: 108463 Result: Down-regulated in Transcription
  misc_feature: MA Experiment 108463 PARAMETER Experiment Name: At_Germinating_Seeds_cDNA_P Parameter: Age (day) Value: 3 vs. 0
  misc_feature: MA Experiment 108463 PARAMETER Experiment Name: At_Germinating_Seeds_cDNA_P Parameter: Tissue Value: Germinating Seeds
  misc_feature: MA Experiment ID: 108473 Result: Up-regulated in Transcription
  misc_feature: MA Experiment 108473 PARAMETER Experiment Name: At_Drought_Flowers_cDNA_P Parameter: Timepoint (hr) Value: 7 d
  misc_feature: MA Experiment 108473 PARAMETER Experiment Name: At_Drought_Flowers_cDNA_P Parameter: Tissue Value: Flower
  misc_feature: MA Experiment 108473 PARAMETER Experiment Name: At_Drought_Flowers_cDNA_P Parameter: Treatment Value: Drought vs. No Drought
  misc_feature: MA Experiment ID: 108489 Result: Down-regulated in Transcription
  misc_feature: MA Experiment ID: 108561 Result: Up-regulated in Transcription
  misc_feature: MA Experiment 108561 PARAMETER Experiment Name: At_100uM_ABA_cDNA_P Parameter: Timepoint (hr) Value: 6
  misc_feature: MA Experiment 108561 PARAMETER Experiment Name: At_100uM_ABA_cDNA_P Parameter: Tissue Value: Aerial
  misc_feature: MA Experiment 108561 PARAMETER Experiment Name: At_100uM_ABA_cDNA_P Parameter: Treatment Value: 100uM ABA vs. No Treatment
  misc_feature: MA Experiment ID: 108607 Result: Up-regulated in Transcription
  misc_feature: MA Experiment 108607 PARAMETER Experiment Name: At_100uM_ABA_cDNA_P Parameter: Timepoint (hr) Value: 4
  misc_feature: MA Experiment 108607 PARAMETER Experiment Name: At_100uM_ABA_cDNA_P Parameter: Tissue Value: Aerial
  misc_feature: MA Experiment 108607 PARAMETER Experiment Name: At_100uM_ABA_cDNA_P Parameter: Treatment Value: 100uM ABA vs. No Treatment
  misc_feature: MA Experiment ID: 108608 Result: Up-regulated in Transcription
  misc_feature: MA Experiment 108608 PARAMETER Experiment Name: At_100uM_ABA_cDNA_P Parameter: Timepoint (hr) Value: 1
  misc_feature: MA Experiment 108608 PARAMETER Experiment Name: At_100uM_ABA_cDNA_P Parameter: Tissue Value: Aerial
  misc_feature: MA Experiment 108608 PARAMETER Experiment Name: At_100uM_ABA_cDNA_P Parameter: Treatment Value: 100uM ABA vs. No Treatment
  misc_feature: MA Experiment ID: 108668 Result: Up-regulated in Transcription
  misc_feature: MA Experiment 108668 PARAMETER Experiment Name: At_2mM_SA_cDNA_P Parameter: Plant Line Value: WS
  misc_feature: MA Experiment 108668 PARAMETER Experiment Name: At_2mM_SA_cDNA_P Parameter: Timepoint (hr) Value: 6
  misc_feature: MA Experiment 108668 PARAMETER Experiment Name: At_2mM_SA_cDNA_P Parameter: Treatment Value: 2mM SA vs. No Treatment
  misc_feature: MA Experiment ID: 20000069 Result: Up-regulated in Transcription
  misc_feature: MA Experiment 20000069 PARAMETER Experiment Name: At_100uM_ABA_Mutants_cDNA_P Parameter: Plant Line Value: CS23
  misc_feature: MA Experiment 20000069 PARAMETER Experiment Name: At_100uM_ABA_Mutants_cDNA_P Parameter: Timepoint (hr) Value: 6
  misc_feature: MA Experiment 20000069 PARAMETER Experiment Name: At_100uM_ABA_Mutants_cDNA_P Parameter: Tissue Value: Aerial
  misc_feature: MA Experiment 20000069 PARAMETER Experiment Name: At_100uM_ABA_Mutants_cDNA_P Parameter: Treatment Value: 100uM ABA vs. No Treatment
  misc_feature: MA Experiment ID: 20000070 Result: Up-regulated in Transcription
  misc_feature: MA Experiment 20000070 PARAMETER Experiment Name: At_100uM_ABA_Mutants_cDNA_P Parameter: Plant Line Value: CS24
  misc_feature: MA Experiment 20000070 PARAMETER Experiment Name: At_100uM_ABA_Mutants_cDNA_P Parameter: Timepoint (hr) Value: 6
  misc_feature: MA Experiment 20000070 PARAMETER Experiment Name: At_100uM_ABA_Mutants_cDNA_P Parameter: Tissue Value: Aerial
  misc_feature: MA Experiment 20000070 PARAMETER Experiment Name: At_100uM_ABA_Mutants_cDNA_P Parameter: Treatment Value: 100uM ABA vs. No Treatment
  misc_feature: MA Experiment ID: 20000166 Result: Up-regulated in Transcription
  misc_feature: MA Experiment 20000166 PARAMETER Experiment Name: At_100uM_ABA_P Parameter: Age (day) Value: 14
  misc_feature: MA Experiment 20000166 PARAMETER Experiment Name: At_100uM_ABA_P Parameter: Organism Value: A. thaliana
  misc_feature: MA Experiment 20000166 PARAMETER Experiment Name: At_100uM_ABA_P Parameter: Plant Line Value: WS
  misc_feature: MA Experiment 20000166 PARAMETER Experiment Name: At_100uM_ABA_P Parameter: Timepoint (hr) Value: 1
  misc_feature: MA Experiment 20000166 PARAMETER Experiment Name: At_100uM_ABA_P Parameter: Tissue Value: Aerial
  misc_feature: MA Experiment 20000166 PARAMETER Experiment Name: At_100uM_ABA_P Parameter: Treatment Value: 100uM ABA vs. No Treatment
  misc_feature: MA Experiment ID: 20000173 Result: Up-regulated in Transcription
  misc_feature: MA Experiment 20000173 PARAMETER Experiment Name: At_42deg_Heat_P Parameter: Age (day) Value: 14
  misc_feature: MA Experiment 20000173 PARAMETER Experiment Name: At_42deg_Heat_P Parameter: Organism Value: A. thaliana
  misc_feature: MA Experiment 20000173 PARAMETER Experiment Name: At_42deg_Heat_P Parameter: Plant Line Value: WS
  misc_feature: MA Experiment 20000173 PARAMETER Experiment Name: At_42deg_Heat_P Parameter: Temperature (deg C) Value: 42 vs. 22
  misc_feature: MA Experiment 20000173 PARAMETER Experiment Name: At_42deg_Heat_P Parameter: Timepoint (hr) Value: 6
  misc_feature: MA Experiment 20000173 PARAMETER Experiment Name: At_42deg_Heat_P Parameter: Tissue Value: Aerial
  misc_feature: MA Experiment ID: 20000180 Result: Down-regulated in Transcription
  misc_feature: MA Experiment 20000180 PARAMETER Experiment Name: At_Germinating_Seeds_P Parameter: Age (hr) Value: 24 vs. 0
  misc_feature: MA Experiment 20000180 PARAMETER Experiment Name: At_Germinating_Seeds_P Parameter: Tissue Value: Germinating Seeds
  misc_feature: MA Experiment ID: 20000182 Result: Up-regulated in Transcription
  misc_feature: MA Experiment 20000182 PARAMETER Experiment Name: At_2mM_SA_P Parameter: Age (day) Value: 14
  misc_feature: MA Experiment 20000182 PARAMETER Experiment Name: At_2mM_SA_P Parameter: Organism Value: A. thaliana
  misc_feature: MA Experiment 20000182 PARAMETER Experiment Name: At_2mM_SA_P Parameter: Plant Line Value: WS
  misc_feature: MA Experiment 20000182 PARAMETER Experiment Name: At_2mM_SA_P Parameter: Timepoint (hr) Value: 6
  misc_feature: MA Experiment 20000182 PARAMETER Experiment Name: At_2mM_SA_P Parameter: Tissue Value: Aerial
  misc_feature: MA Experiment 20000182 PARAMETER Experiment Name: At_2mM_SA_P Parameter: Treatment Value: 2mM SA vs. No Treatment
  misc_feature: MA Experiment ID: 20000267 Result: Up-regulated in Transcription
  misc_feature: MA Experiment 20000267 PARAMETER Experiment Name: At_Drought_P Parameter: Age (day) Value: 7
  misc_feature: MA Experiment 20000267 PARAMETER Experiment Name: At_Drought_P Parameter: Organism Value: A. thaliana
  misc_feature: MA Experiment 20000267 PARAMETER Experiment Name: At_Drought_P Parameter: Plant Line Value: WS
  misc_feature: MA Experiment 20000267 PARAMETER Experiment Name: At_Drought_P Parameter: Timepoint (hr) Value: 6
  misc_feature: MA Experiment 20000267 PARAMETER Experiment Name: At_Drought_P Parameter: Tissue Value: Whole Plant
  misc_feature: MA Experiment 20000267 PARAMETER Experiment Name: At_Drought_P Parameter: Treatment Value: Drought vs. No Drought
  misc_feature: MA Experiment ID: 20000436 Result: Up-regulated in Transcription
  misc_feature: MA Experiment 20000436 PARAMETER Experiment Name: At_Drought_P Parameter: Age (day) Value: 7
  misc_feature: MA Experiment 20000436 PARAMETER Experiment Name: At_Drought_P Parameter: Organism Value: A. thaliana
  misc_feature: MA Experiment 20000436 PARAMETER Experiment Name: At_Drought_P Parameter: Plant Line Value: WS
  misc_feature: MA Experiment 20000436 PARAMETER Experiment Name: At_Drought_P Parameter: Timepoint (hr) Value: 12
  misc_feature: MA Experiment 20000436 PARAMETER Experiment Name: At_Drought_P Parameter: Tissue Value: Whole Plant
  misc_feature: MA Experiment 20000436 PARAMETER Experiment Name: At_Drought_P Parameter: Treatment Value: Drought vs. No Drought
  misc_feature: MA Experiment ID: 20000437 Result: Up-regulated in Transcription
  misc_feature: MA Experiment 20000437 PARAMETER Experiment Name: At_Drought_P Parameter: Age (day) Value: 8
  misc_feature: MA Experiment 20000437 PARAMETER Experiment Name: At_Drought_P Parameter: Organism Value: A. thaliana
  misc_feature: MA Experiment 20000437 PARAMETER Experiment Name: At_Drought_P Parameter: Plant Line Value: WS
  misc_feature: MA Experiment 20000437 PARAMETER Experiment Name: At_Drought_P Parameter: Timepoint (hr) Value: 24
  misc_feature: MA Experiment 20000437 PARAMETER Experiment Name: At_Drought_P Parameter: Tissue Value: Whole Plant
  misc_feature: MA Experiment 20000437 PARAMETER Experiment Name: At_Drought_P Parameter: Treatment Value: Drought vs. No Drought
  misc_feature: MA Experiment ID: 20001248 Result: Up-regulated in Transcription
  misc_feature: MA Experiment 20001248 PARAMETER Experiment Name: At_Far-red-induction_P Parameter: Age (day) Value: 7
  misc_feature: MA Experiment 20001248 PARAMETER Experiment Name: At_Far-red-induction_P Parameter: Light Value: Far-red vs. White
  misc_feature: MA Experiment 20001248 PARAMETER Experiment Name: At_Far-red-induction_P Parameter: Organism Value: A. thaliana
  misc_feature: MA Experiment 20001248 PARAMETER Experiment Name: At_Far-red-induction_P Parameter: Plant Line Value: Columbia
  misc_feature: MA Experiment 20001248 PARAMETER Experiment Name: At_Far-red-induction_P Parameter: Timepoint (hr) Value: 4
  misc_feature: MA Experiment 20001248 PARAMETER Experiment Name: At_Far-red-induction_P Parameter: Tissue Value: Whole Plant
  misc_feature: MA Experiment ID: 20001450 Result: Up-regulated in Transcription
  misc_feature: MA Experiment 20001450 PARAMETER Experiment Name: At_Far-red-induction_P Parameter: Age (day) Value: 7
  misc_feature: MA Experiment 20001450 PARAMETER Experiment Name: At_Far-red-induction_P Parameter: Light Value: Far-red vs. White
  misc_feature: MA Experiment 20001450 PARAMETER Experiment Name: At_Far-red-induction_P Parameter: Organism Value: A. thaliana
  misc_feature: MA Experiment 20001450 PARAMETER Experiment Name: At_Far-red-induction_P Parameter: Plant Line Value: Columbia
  misc_feature: MA Experiment 20001450 PARAMETER Experiment Name: At_Far-red-induction_P Parameter: Timepoint (hr) Value: 8
  misc_feature: MA Experiment 20001450 PARAMETER Experiment Name: At_Far-red-induction_P Parameter: Tissue Value: Whole Plant
  misc_feature: MA Experiment ID: 20001554 Result: Up-regulated in Transcription
  misc_feature: MA Experiment 20001554 PARAMETER Experiment Name: At_Drought_Soil_Dry_P Parameter: Age (day) Value: 21
  misc_feature: MA Experiment 20001554 PARAMETER Experiment Name: At_Drought_Soil_Dry_P Parameter: Organism Value: A. thaliana
  misc_feature: MA Experiment 20001554 PARAMETER Experiment Name: At_Drought_Soil_Dry_P Parameter: Plant Line Value: WS
  misc_feature: MA Experiment 20001554 PARAMETER Experiment Name: At_Drought_Soil_Dry_P Parameter: Post Timepoint (hr) Value: None
  misc_feature: MA Experiment 20001554 PARAMETER Experiment Name: At_Drought_Soil_Dry_P Parameter: Post-Treatment Value: None
  misc_feature: MA Experiment 20001554 PARAMETER Experiment Name: At_Drought_Soil_Dry_P Parameter: Timepoint (day) Value: 7
  misc_feature: MA Experiment 20001554 PARAMETER Experiment Name: At_Drought_Soil_Dry_P Parameter: Treatment Value: Drought vs. No Drought
  misc_feature: MA Experiment ID: 20001555 Result: Up-regulated in Transcription
  misc_feature: MA Experiment 20001555 PARAMETER Experiment Name: At_Drought_Soil_Dry_P Parameter: Age (day) Value: 24
  misc_feature: MA Experiment 20001555 PARAMETER Experiment Name: At_Drought_Soil_Dry_P Parameter: Organism Value: A. thaliana
  misc_feature: MA Experiment 20001555 PARAMETER Experiment Name: At_Drought_Soil_Dry_P Parameter: Plant Line Value: WS
  misc_feature: MA Experiment 20001555 PARAMETER Experiment Name: At_Drought_Soil_Dry_P Parameter: Post Timepoint (hr) Value: None
  misc_feature: MA Experiment 20001555 PARAMETER Experiment Name: At_Drought_Soil_Dry_P Parameter: Post-Treatment Value: None
  misc_feature: MA Experiment 20001555 PARAMETER Experiment Name: At_Drought_Soil_Dry_P Parameter: Timepoint (day) Value: 10
  misc_feature: MA Experiment 20001555 PARAMETER Experiment Name: At_Drought_Soil_Dry_P Parameter: Treatment Value: Drought vs. No Drought
atggaaagtcttgtggagcagttgaaatccatcaagaaggataagttttcttgtaatgataagtggttaacccttaagcttcaaatcaacaaaaactttgagctccctgagcaagtgagaagagaccacactgagaagaaaaatccttcaggttatcgaaaattcccggattttactctttgggcggtggccgatttcttacgcgctctttttgtggcgactgttgtatacgcgcgagccttcatggacacgaaggcggttggagtttctaaggatacggcggcgtcgatggaagcgtcgacggtgtttcctgggtttaaattctcgccgacggatgtggagttgatttcgtattacctgaagcggaagatggatggcttggagaggtccgttgaggttataccggaccttgagatttacaatttcgagccttgggatttacccgataagtcgattgtgaaatctgatagcgagtggttcttcttctgtgcgcgtgggaaaaagtatccacatggttcacagaacaggagagcaacgaagatgggatactggaaagcaactgggaaagagcgtgatgtgaagtctggttctgaggtcattggaacaaagaggacgcttgttttccatattggtcgtgcaccaaaaggcgaaagaactgactggattatgcacgagtactgcgtgaaaggagtatctctggatgatgctatggttgtttgccgggttaggaggaacaaagaatacaatagtggtacaagtcagaaggcaccaaagccaaattcatcagccgagaagcatgcgaaagtccaaaatggcgctacgagttcagggagcccgtctgattgggacaacttggttgatttttacctagcaggtgaatcaggggagaaactactcgctgagatggcagagtcatcagaaaatctacaggtggataatgacgaggatttctttgcggatatcctaagagacgaaatcatcaatctcgatgaagcggtgatgacagggaacacaccaaacgaagtgccaacactagaatcagcatcaatggagataagggtacttcctttaccaaacatgatagacaaacaaatgtcatcactgttagaggaaagaccatcacagaagaagaaaggaaaagacgccacggaatcattgtcgagctgcttcgtgggtttatactcgatcaaatcagtgaacaaggcacgatgggatgttattataggtgtagtggctctgatagcaatgttgttttatctagaataagaggcttatggaagtagcgaaaaacagtgtcctagctatgtttgtatcatcttttctcggacattgacaaggattatatgatgtttttgtgtaaacggtttatgttttacacttctacttc

SEQ ID NO: 100008 - protein, 421 aa, Arabidopsis thaliana
  peptide (1)..(421): Ceres Seq. ID no. 13604089
  misc_feature (102)..(229): Pfam Name: No apical meristem (NAM) protein Pfam Description: No apical meristem (NAM) protein
  misc_feature (82)..(421): Homolog of NCBI NO: 18420448 NR Description: No apical meristem (NAM) protein family thaliana] >gi|14326465|gb|AAK60278.1|AF385685_1 AT5g22290/MWD9_7 thaliana] >gi|18700194|gb|AAL77707.1| AT5g22290/MWD9_7
  misc_feature (97)..(421): Homolog of NCBI NO: 9757809 NR Description: NAM (no apical meristem)-like protein
  misc_feature (100)..(420): Homolog of NCBI NO: 15229931 NR Description: No apical meristem (NAM) protein family
  misc_feature (89)..(418): Homolog of NCBI NO: 15225866 NR Description: No apical meristem (NAM) protein family
  misc_feature (104)..(356): Homolog of NCBI NO: 15218843 NR Description: No apical meristem (NAM) protein family
  misc_feature (97)..(370): Homolog of NCBI NO: 15237469 NR Description: No apical meristem (NAM) protein family
  misc_feature (101)..(302): Homolog of NCBI NO: 37537036 NR Description: putative NAM (no apical meristem) protein [Oryza
  misc_feature (97)..(245): Homolog of NCBI NO: 21105751 NR Description: nam-like protein 11 [Petunia x hybrida]
  misc_feature (104)..(322): Homolog of NCBI NO: 15237939 NR Description: No apical meristem (NAM) protein family
  misc_feature (104)..(242): Homolog of NCBI NO: 34902214 NR Description: Hypothetical protein [Oryza sativa (japonica group)] >gi|27452910|gb|AAO15294.1| Hypothetical protein [Oryza
MESLVEQLKSIKKDKFSCNDKWLTLKLQINKNFELPEQVRRDHTEKKNPSGYRKFPDFTLWAVADFLRALFVATVVYARAFMDTKAVGVSKDTAASMEASTVFPGFKFSPTDVELISYYLKRKMDGLERSVEVIPDLEIYNFEPWDLPDKSIVKSDSEWFFFCARGKKYPHGSQNRRATKMGYWKATGKERDVKSGSEVIGTKRTLVFHIGRAPKGERTDWIMHEYCVKGVSLDDAMVVCRVRRNKEYNSGTSQKAPKPNSSAEKHAKVQNGATSSGSPSDWDNLVDFYLAGESGEKLLAEMAESSENLQVDNDEDFFADILRDEIINLDEAVMTGNTPNEVPTLESASMEIRVLPLPNMIDKQMSSLLEERPSQKKKGKDATESLSSCFVGLYSIKSVNKARWDVIIGVVALIAMLFYLE

SEQ ID NO: 100009 - protein, 340 aa, Arabidopsis thaliana; identical to SEQ ID NO: 41503
  peptide (1)..(340): Ceres Seq. ID no. 13604090
  misc_feature (21)..(148): Pfam Name: No apical meristem (NAM) protein Pfam Description: No apical meristem (NAM) protein
  misc_feature (1)..(340): Homolog of NCBI NO: 18420448 NR Description: No apical meristem (NAM) protein family thaliana] >gi|14326465|gb|AAK60278.1|AF385685_1 AT5g22290/MWD9_7 thaliana] >gi|18700194|gb|AAL77707.1| AT5g22290/MWD9_7
  misc_feature (16)..(340): Homolog of NCBI NO: 9757809 NR Description: NAM (no apical meristem)-like protein
  misc_feature (19)..(339): Homolog of NCBI NO: 15229931 NR Description: No apical meristem (NAM) protein family
  misc_feature (8)..(337): Homolog of NCBI NO: 15225866 NR Description: No apical meristem (NAM) protein family
  misc_feature (23)..(275): Homolog of NCBI NO: 15218843 NR Description: No apical meristem (NAM) protein family
  misc_feature (16)..(289): Homolog of NCBI NO: 15237469 NR Description: No apical meristem (NAM) protein family
  misc_feature (20)..(221): Homolog of NCBI NO: 37537036 NR Description: putative NAM (no apical meristem) protein [Oryza
  misc_feature (16)..(164): Homolog of NCBI NO: 21105751 NR Description: nam-like protein 11 [Petunia x hybrida]
  misc_feature (23)..(241): Homolog of NCBI NO: 15237939 NR Description: No apical meristem (NAM) protein family
  misc_feature (23)..(161): Homolog of NCBI NO: 34902214 NR Description: Hypothetical protein [Oryza sativa (japonica group)] >gi|27452910|gb|AAO15294.1| Hypothetical protein [Oryza

SEQ ID NO: 100010 - protein, 325 aa, Arabidopsis thaliana; identical to SEQ ID NO: 41504
  peptide (1)..(325): Ceres Seq. ID no. 13604091
  misc_feature (6)..(133): Pfam Name: No apical meristem (NAM) protein Pfam Description: No apical meristem (NAM) protein
  misc_feature (1)..(325): Homolog of NCBI NO: 18420448 NR Description: No apical meristem (NAM) protein family thaliana] >gi|14326465|gb|AAK60278.1|AF385685_1 AT5g22290/MWD9_7 thaliana] >gi|18700194|gb|AAL77707.1| AT5g22290/MWD9_7
  misc_feature (1)..(325): Homolog of NCBI NO: 9757809 NR Description: NAM (no apical meristem)-like protein
  misc_feature (4)..(324): Homolog of NCBI NO: 15229931 NR Description: No apical meristem (NAM) protein family
  misc_feature (1)..(322): Homolog of NCBI NO: 15225866 NR Description: No apical meristem (NAM) protein family
  misc_feature (8)..(260): Homolog of NCBI NO: 15218843 NR Description: No apical meristem (NAM) protein family
  misc_feature (1)..(274): Homolog of NCBI NO: 15237469 NR Description: No apical meristem (NAM) protein family
  misc_feature (5)..(206): Homolog of NCBI NO: 37537036 NR Description: putative NAM (no apical meristem) protein [Oryza
  misc_feature (1)..(149): Homolog of NCBI NO: 21105751 NR Description: nam-like protein 11 [Petunia x hybrida]
  misc_feature (8)..(226): Homolog of NCBI NO: 15237939 NR Description: No apical meristem (NAM) protein family
  misc_feature (8)..(146): Homolog of NCBI NO: 34902214 NR Description: Hypothetical protein [Oryza sativa (japonica group)] >gi|27452910|gb|AAO15294.1| Hypothetical protein [Oryza

SEQ ID NO: 100011 - DNA, 913 bp, Arabidopsis thaliana
  misc_feature (1)..(913): Ceres Seq. ID no. 13604104
  misc_feature: MA Experiment ID: 108473 Result: Down-regulated in Transcription
  misc_feature: MA Experiment 108473 PARAMETER Experiment Name: At_Drought_Flowers_cDNA_P Parameter: Timepoint (hr) Value: 7 d
  misc_feature: MA Experiment 108473 PARAMETER Experiment Name: At_Drought_Flowers_cDNA_P Parameter: Tissue Value: Flower
  misc_feature: MA Experiment 108473 PARAMETER Experiment Name: At_Drought_Flowers_cDNA_P Parameter: Treatment Value: Drought vs. No Drought
  misc_feature: MA Experiment ID: 108501 Result: Down-regulated in Transcription
  misc_feature: MA Experiment 108501 PARAMETER Experiment Name: At_ap2_floral_buds_cDNA_P Parameter: Plant Line Value: ap2 (Ler.)
  misc_feature: MA Experiment 108501 PARAMETER Experiment Name: At_ap2_floral_buds_cDNA_P Parameter: Tissue Value: Closed Flower
  misc_feature: MA Experiment ID: 108595 Result: Up-regulated in Transcription
  misc_feature: MA Experiment 108595 PARAMETER Experiment Name: At_Ler-pi_Ovule_cDNA_P Parameter: Plant Line Value: null
  misc_feature: MA Experiment ID: 20000171 Result: Down-regulated in Transcription
  misc_feature: MA Experiment 20000171 PARAMETER Experiment Name: At_42deg_Heat_P Parameter: Age (day) Value: 14
  misc_feature: MA Experiment 20000171 PARAMETER Experiment Name: At_42deg_Heat_P Parameter: Organism Value: A. thaliana
  misc_feature: MA Experiment 20000171 PARAMETER Experiment Name: At_42deg_Heat_P Parameter: Plant Line Value: WS
  misc_feature: MA Experiment 20000171 PARAMETER Experiment Name: At_42deg_Heat_P Parameter: Temperature (deg C) Value: 42 vs. 22
  misc_feature: MA Experiment 20000171 PARAMETER Experiment Name: At_42deg_Heat_P Parameter: Timepoint (hr) Value: 1
  misc_feature: MA Experiment 20000171 PARAMETER Experiment Name: At_42deg_Heat_P Parameter: Tissue Value: Aerial
  misc_feature: MA Experiment ID: 20000173 Result: Down-regulated in Transcription
  misc_feature: MA Experiment 20000173 PARAMETER Experiment Name: At_42deg_Heat_P Parameter: Age (day) Value: 14
  misc_feature: MA Experiment 20000173 PARAMETER Experiment Name: At_42deg_Heat_P Parameter: Organism Value: A. thaliana
  misc_feature: MA Experiment 20000173 PARAMETER Experiment Name: At_42deg_Heat_P Parameter: Plant Line Value: WS
  misc_feature: MA Experiment 20000173 PARAMETER Experiment Name: At_42deg_Heat_P Parameter: Temperature (deg C) Value: 42 vs. 22
  misc_feature: MA Experiment 20000173 PARAMETER Experiment Name: At_42deg_Heat_P Parameter: Timepoint (hr) Value: 6
  misc_feature: MA Experiment 20000173 PARAMETER Experiment Name: At_42deg_Heat_P Parameter: Tissue Value: Aerial
  misc_feature: MA Experiment ID: 20000184 Result: Down-regulated in Transcription
  misc_feature: MA Experiment 20000184 PARAMETER Experiment Name: At_Shoots__P Parameter: Age (day) Value: 7
  misc_feature: MA Experiment 20000184 PARAMETER Experiment Name: At_Shoots__P Parameter: Tissue Value: Shoots vs. Whole Plant
  misc_feature: MA Experiment ID: 20000235 Result: Down-regulated in Transcription
  misc_feature: MA Experiment 20000235 PARAMETER Experiment Name: At_Siliques_P Parameter: Age (day) Value: 21
  misc_feature: MA Experiment 20000235 PARAMETER Experiment Name: At_Siliques_P Parameter: Organism Value: A. thaliana
  misc_feature: MA Experiment 20000235 PARAMETER Experiment Name: At_Siliques_P Parameter: Plant Line Value: WS
  misc_feature: MA Experiment 20000235 PARAMETER Experiment Name: At_Siliques_P Parameter: Tissue Value: 5-10mm Siliques vs. Whole Plant
  misc_feature: MA Experiment ID: 20000264 Result: Down-regulated in Transcription
  misc_feature: MA Experiment 20000264 PARAMETER Experiment Name: At_Open_Flower_P Parameter: Age (day) Value: 21
  misc_feature: MA Experiment 20000264 PARAMETER Experiment Name: At_Open_Flower_P Parameter: Plant Line Value: WS
  misc_feature: MA Experiment 20000264 PARAMETER Experiment Name: At_Open_Flower_P Parameter: Tissue Value: Open Flower vs. Whole Plant
  misc_feature: MA Experiment ID: 20000265 Result: Up-regulated in Transcription
  misc_feature: MA Experiment 20000265 PARAMETER Experiment Name: At_Open_Flower_P Parameter: Age (day) Value: 21
  misc_feature: MA Experiment 20000265 PARAMETER Experiment Name: At_Open_Flower_P Parameter: Plant Line Value: WS
  misc_feature: MA Experiment 20000265 PARAMETER Experiment Name: At_Open_Flower_P Parameter: Tissue Value: Closed Flower vs. Whole Plant
  misc_feature: MA Experiment ID: 20000286 Result: Up-regulated in Transcription
  misc_feature: MA Experiment 20000286 PARAMETER Experiment Name: At_Open_Flower_P Parameter: Age (day) Value: 21
  misc_feature: MA Experiment 20000286 PARAMETER Experiment Name: At_Open_Flower_P Parameter: Plant Line Value: WS
  misc_feature: MA Experiment 20000286 PARAMETER Experiment Name: At_Open_Flower_P Parameter: Tissue Value: Half Open vs. Whole Plant
  misc_feature: MA Experiment ID: 20000438 Result: Down-regulated in Transcription
  misc_feature: MA Experiment 20000438 PARAMETER Experiment Name: At_Shoots__P Parameter: Age (day) Value: 14
  misc_feature: MA Experiment 20000438 PARAMETER Experiment Name: At_Shoots__P Parameter: Tissue Value: Shoots vs. Whole Plant
  misc_feature: MA Experiment ID: 20000439 Result: Down-regulated in Transcription
  misc_feature: MA Experiment 20000439 PARAMETER Experiment Name: At_Roots__P Parameter: Age (day) Value: 14 vs. 21
  misc_feature: MA Experiment 20000439 PARAMETER Experiment Name: At_Roots__P Parameter: Organism Value: A. thaliana
  misc_feature: MA Experiment 20000439 PARAMETER Experiment Name: At_Roots__P Parameter: Tissue Value: Roots vs. Whole Plant
  misc_feature: MA Experiment ID: 20000794 Result: Down-regulated in Transcription
  misc_feature: MA Experiment 20000794 PARAMETER Experiment Name: At_Petals_P Parameter: Age (day) Value: 23-25 days
  misc_feature: MA Experiment 20000794 PARAMETER Experiment Name: At_Petals_P Parameter: Plant Line Value: WS
  misc_feature: MA Experiment 20000794 PARAMETER Experiment Name: At_Petals_P Parameter: Tissue Value: Petals vs. Whole plant
  misc_feature: MA Experiment ID: 20001555 Result: Down-regulated in Transcription
  misc_feature: MA Experiment 20001555 PARAMETER Experiment Name: At_Drought_Soil_Dry_P Parameter: Age (day) Value: 24
  misc_feature: MA Experiment 20001555 PARAMETER Experiment Name: At_Drought_Soil_Dry_P Parameter: Organism Value: A. thaliana
  misc_feature: MA Experiment 20001555 PARAMETER Experiment Name: At_Drought_Soil_Dry_P Parameter: Plant Line Value: WS
  misc_feature: MA Experiment 20001555 PARAMETER Experiment Name: At_Drought_Soil_Dry_P Parameter: Post Timepoint (hr) Value: None
  misc_feature: MA Experiment 20001555 PARAMETER Experiment Name: At_Drought_Soil_Dry_P Parameter: Post-Treatment Value: None
  misc_feature: MA Experiment 20001555 PARAMETER Experiment Name: At_Drought_Soil_Dry_P Parameter: Timepoint (day) Value: 10
  misc_feature: MA Experiment 20001555 PARAMETER Experiment Name: At_Drought_Soil_Dry_P Parameter: Treatment Value: Drought vs. No Drought
  misc_feature: MA Experiment ID: 20001556 Result: Down-regulated in Transcription
  misc_feature: MA Experiment 20001556 PARAMETER Experiment Name: At_Drought_Soil_Dry_P Parameter: Age (day) Value: 26
  misc_feature: MA Experiment 20001556 PARAMETER Experiment Name: At_Drought_Soil_Dry_P Parameter: Organism Value: A. thaliana
  misc_feature: MA Experiment 20001556 PARAMETER Experiment Name: At_Drought_Soil_Dry_P Parameter: Plant Line Value: WS
  misc_feature: MA Experiment 20001556 PARAMETER Experiment Name: At_Drought_Soil_Dry_P Parameter: Post Timepoint (hr) Value: None
  misc_feature: MA Experiment 20001556 PARAMETER Experiment Name: At_Drought_Soil_Dry_P Parameter: Post-Treatment Value: None
  misc_feature: MA Experiment 20001556 PARAMETER Experiment Name: At_Drought_Soil_Dry_P Parameter: Timepoint (day) Value: 12
  misc_feature: MA Experiment 20001556 PARAMETER Experiment Name: At_Drought_Soil_Dry_P Parameter: Treatment Value: Drought vs. No Drought
  misc_feature: MA Experiment ID: 20001557 Result: Down-regulated in Transcription
  misc_feature: MA Experiment 20001557 PARAMETER Experiment Name: At_Drought_Soil_Dry_P Parameter: Age (day) Value: 27
  misc_feature: MA Experiment 20001557 PARAMETER Experiment Name: At_Drought_Soil_Dry_P Parameter: Organism Value: A. thaliana
  misc_feature: MA Experiment 20001557 PARAMETER Experiment Name: At_Drought_Soil_Dry_P Parameter: Plant Line Value: WS
  misc_feature: MA Experiment 20001557 PARAMETER Experiment Name: At_Drought_Soil_Dry_P Parameter: Post Timepoint (hr) Value: 3
  misc_feature: MA Experiment 20001557 PARAMETER Experiment Name: At_Drought_Soil_Dry_P Parameter: Post-Treatment Value: Re-Water vs. No Drought
  misc_feature: MA Experiment 20001557 PARAMETER Experiment Name: At_Drought_Soil_Dry_P Parameter: Timepoint (day) Value: 13
  misc_feature: MA Experiment 20001557 PARAMETER Experiment Name: At_Drought_Soil_Dry_P Parameter: Treatment Value: Drought vs. No Drought
  misc_feature: MA Experiment ID: 20001560 Result: Up-regulated in Transcription
  misc_feature: MA Experiment 20001560 PARAMETER Experiment Name: At_Drought_Soil_Dry_P Parameter: Age (day) Value: 28
  misc_feature: MA Experiment 20001560 PARAMETER Experiment Name: At_Drought_Soil_Dry_P Parameter: Organism Value: A. thaliana
  misc_feature: MA Experiment 20001560 PARAMETER Experiment Name: At_Drought_Soil_Dry_P Parameter: Plant Line Value: WS
  misc_feature: MA Experiment 20001560 PARAMETER Experiment Name: At_Drought_Soil_Dry_P Parameter: Post Timepoint (hr) Value: None
  misc_feature: MA Experiment 20001560 PARAMETER Experiment Name: At_Drought_Soil_Dry_P Parameter: Post-Treatment Value: None
  misc_feature: MA Experiment 20001560 PARAMETER Experiment Name: At_Drought_Soil_Dry_P Parameter: Timepoint (day) Value: 14
  misc_feature: MA Experiment 20001560 PARAMETER Experiment Name: At_Drought_Soil_Dry_P Parameter: Treatment Value: Drought vs. No Drought
  misc_feature: MA Experiment ID: 20001761 Result: Up-regulated in Transcription
  misc_feature: MA Experiment 20001761 PARAMETER Experiment Name: At_50mM_NH4NO3_L-to-H_P Parameter: Timepoint (hr) Value: 4
  misc_feature: MA Experiment 20001761 PARAMETER Experiment Name: At_50mM_NH4NO3_L-to-H_P Parameter: Tissue Value: Siliques
  misc_feature: MA Experiment 20001761 PARAMETER Experiment Name: At_50mM_NH4NO3_L-to-H_P Parameter: Treatment Value: 50mM NH4NO3 vs 100mM Mannitol
  misc_feature: MA Experiment ID: 20001762 Result: Down-regulated in Transcription
  misc_feature: MA Experiment 20001762 PARAMETER Experiment Name: At_50mM_NH4NO3_L-to-H_P Parameter: Timepoint (hr) Value: 6
  misc_feature: MA Experiment 20001762 PARAMETER Experiment Name: At_50mM_NH4NO3_L-to-H_P Parameter: Tissue Value: Siliques
  misc_feature: MA Experiment 20001762 PARAMETER Experiment Name: At_50mM_NH4NO3_L-to-H_P Parameter: Treatment Value: 50mM NH4NO3 vs 100mM Mannitol
  misc_feature: MA Experiment ID: 20001771 Result: Up-regulated in Transcription
  misc_feature: MA Experiment 20001771 PARAMETER Experiment Name: At_Far-red-enriched-adult_P Parameter: Age (day) Value: 28
  misc_feature: MA Experiment 20001771 PARAMETER Experiment Name: At_Far-red-enriched-adult_P Parameter: Light Value: Far-red enriched vs. White
  misc_feature: MA Experiment 20001771 PARAMETER Experiment Name: At_Far-red-enriched-adult_P Parameter: Organism Value: A. thaliana
  misc_feature: MA Experiment 20001771 PARAMETER Experiment Name: At_Far-red-enriched-adult_P Parameter: Plant Line Value: Columbia
  misc_feature: MA Experiment 20001771 PARAMETER Experiment Name: At_Far-red-enriched-adult_P Parameter: Timepoint (hr) Value: 16
  misc_feature: MA Experiment 20001771 PARAMETER Experiment Name: At_Far-red-enriched-adult_P Parameter: Tissue Value: Aerial
  misc_feature: MA Experiment ID: 20001773 Result: Up-regulated in Transcription
  misc_feature: MA Experiment 20001773 PARAMETER Experiment Name: At_Far-red-enriched-adult_P Parameter: Age (day) Value: 30
  misc_feature: MA Experiment 20001773 PARAMETER Experiment Name: At_Far-red-enriched-adult_P Parameter: Light Value: Far-red enriched vs. White
  misc_feature: MA Experiment 20001773 PARAMETER Experiment Name: At_Far-red-enriched-adult_P Parameter: Organism Value: A. thaliana
  misc_feature: MA Experiment 20001773 PARAMETER Experiment Name: At_Far-red-enriched-adult_P Parameter: Plant Line Value: Columbia
  misc_feature: MA Experiment 20001773 PARAMETER Experiment Name: At_Far-red-enriched-adult_P Parameter: Timepoint (hr) Value: 48
  misc_feature: MA Experiment 20001773 PARAMETER Experiment Name: At_Far-red-enriched-adult_P Parameter: Tissue Value: Aerial
  misc_feature: MA Experiment ID: 20001904 Result: Down-regulated in Transcription
  misc_feature: MA Experiment 20001904 PARAMETER Experiment Name: At_Drought_Reproduction_P Parameter: Age (day) Value: 37
  misc_feature: MA Experiment 20001904 PARAMETER Experiment Name: At_Drought_Reproduction_P Parameter: Organism Value: A. thaliana
  misc_feature: MA Experiment 20001904 PARAMETER Experiment Name: At_Drought_Reproduction_P Parameter: Plant Line Value: WS
  misc_feature: MA Experiment 20001904 PARAMETER Experiment Name: At_Drought_Reproduction_P Parameter: Timepoint (day) Value: 7
  misc_feature: MA Experiment 20001904 PARAMETER Experiment Name: At_Drought_Reproduction_P Parameter: Tissue Value: Rosettes
  misc_feature: MA Experiment 20001904 PARAMETER Experiment Name: At_Drought_Reproduction_P Parameter: Treatment Value: Drought vs. No Drought
  misc_feature: MA Experiment ID: 20001911 Result: Down-regulated in Transcription
  misc_feature: MA Experiment 20001911 PARAMETER Experiment Name: At_Drought_Reproduction_P Parameter: Age (day) Value: 40
  misc_feature: MA Experiment 20001911 PARAMETER Experiment Name: At_Drought_Reproduction_P Parameter: Organism Value: A. thaliana
  misc_feature: MA Experiment 20001911 PARAMETER Experiment Name: At_Drought_Reproduction_P Parameter: Plant Line Value: WS
  misc_feature: MA Experiment 20001911 PARAMETER Experiment Name: At_Drought_Reproduction_P Parameter: Timepoint (day) Value: 10
  misc_feature: MA Experiment 20001911 PARAMETER Experiment Name: At_Drought_Reproduction_P Parameter: Tissue Value: Flowers
  misc_feature: MA Experiment 20001911 PARAMETER Experiment Name: At_Drought_Reproduction_P Parameter: Treatment Value: Drought vs. No Drought
ttttggttcctttaataatcatttctttcttttatataaacctaagatacgttccccatatttcactcactcaagaagacatctaaagccatcaaaaatatatccatagaagcttcatcgaaatggcgaatcaagcagctgctgcagcattcttccttttcgctttagccgtcttctccaacttggagctctcagcttcttcacttgtcagtggcaagatctcttgccttgactgccaccgcgatttcgacttctcaggcattaaggtcctccttaaatgcgacggagagaagaaacaaataaccgcggtggcagctgcagacggatctttccggtcagtgcttccaacggctgacaaaaaaggctccataaattgtcttgcaaagctcttgggaggccctgagcaactctatgctcacaaacacaacttggtctctgaattggtcaaatctaaacacgattccaaagttttaactacctcaaacccacttgccttctctctctcctgccccaaaccatcccgagatgatatcggaagtatgatcggagattccaagactattaattttccgggggcaggaggttttggattcccacctgccagcttctttcccttcttaccaatcattggtatcccatgatttaaataagtgttacttttaagtccttaaagacatatgtatacatatgttttgttgtttacgtgaatgaagccagccaagacaagacacaaatatttagcaaattacattactttgtttagtgagatataaggtttgtttatgtgctaagaaaatgttatttattggctttatttagtttaaatcagttgcttttgtatcaagtttgtaataagaaggttgggttaatccaacaacatacgctttattgtgaacattcatgcttctatgat

SEQ ID NO: 100012 - protein, 172 aa, Arabidopsis thaliana; identical to SEQ ID NO: 42548
  peptide (1)..(172): Ceres Seq. ID no. 13604105
  misc_feature (1)..(172): Homolog of NCBI NO: 18420486 NR Description: expressed protein [Arabidopsis thaliana] gene_id:MWD9.23~unknown protein [Arabidopsis thaliana] unknown protein [Arabidopsis thaliana]
  misc_feature (1)..(172): Homolog of NCBI NO: 21594030 NR Description: unknown [Arabidopsis thaliana]
  misc_feature (1)..(172): Homolog of NCBI NO: 30683502 NR Description: expressed protein [Arabidopsis thaliana]

SEQ ID NO: 100013 - DNA, 816 bp, Arabidopsis thaliana
  misc_feature (1)..(816): Ceres Seq. ID no. 13604113
  misc_feature: MA Experiment ID: 108462 Result: Down-regulated in Transcription
  misc_feature: MA Experiment 108462 PARAMETER Experiment Name: At_Germinating_Seeds_cDNA_P Parameter: Age (day) Value: 2 vs. 0
  misc_feature: MA Experiment 108462 PARAMETER Experiment Name: At_Germinating_Seeds_cDNA_P Parameter: Tissue Value: Germinating Seeds
  misc_feature: MA Experiment ID: 108577 Result: Down-regulated in Transcription
  misc_feature: MA Experiment 108577 PARAMETER Experiment Name: At_42deg_Heat_cDNA_P Parameter: Temperature (deg C) Value: 42 vs. 22
  misc_feature: MA Experiment 108577 PARAMETER Experiment Name: At_42deg_Heat_cDNA_P Parameter: Timepoint (hr) Value: 6
  misc_feature: MA Experiment 108577 PARAMETER Experiment Name: At_42deg_Heat_cDNA_P Parameter: Tissue Value: Aerial
  misc_feature: MA Experiment ID: 20000030 Result: Up-regulated in Transcription
  misc_feature: MA Experiment 20000030 PARAMETER Experiment Name: At_CS6630_Roots_cDNA_P Parameter: Plant Line Value: CS6630 vs. WS
  misc_feature: MA Experiment 20000030 PARAMETER Experiment Name: At_CS6630_Roots_cDNA_P Parameter: Tissue Value: Roots
  misc_feature: MA Experiment ID: 20000173 Result: Down-regulated in Transcription
  misc_feature: MA Experiment 20000173 PARAMETER Experiment Name: At_42deg_Heat_P Parameter: Age (day) Value: 14
  misc_feature: MA Experiment 20000173 PARAMETER Experiment Name: At_42deg_Heat_P Parameter: Organism Value: A. thaliana
  misc_feature: MA Experiment 20000173 PARAMETER Experiment Name: At_42deg_Heat_P Parameter: Plant Line Value: WS
  misc_feature: MA Experiment 20000173 PARAMETER Experiment Name: At_42deg_Heat_P Parameter: Temperature (deg C) Value: 42 vs. 22
  misc_feature: MA Experiment 20000173 PARAMETER Experiment Name: At_42deg_Heat_P Parameter: Timepoint (hr) Value: 6
  misc_feature: MA Experiment 20000173 PARAMETER Experiment Name: At_42deg_Heat_P Parameter: Tissue Value: Aerial
  misc_feature: MA Experiment ID: 20000184 Result: Down-regulated in Transcription
  misc_feature: MA Experiment 20000184 PARAMETER Experiment Name: At_Shoots__P Parameter: Age (day) Value: 7
  misc_feature: MA Experiment 20000184 PARAMETER Experiment Name: At_Shoots__P Parameter: Tissue Value: Shoots vs. Whole Plant
  misc_feature: MA Experiment ID: 20000224 Result: Up-regulated in Transcription
  misc_feature: MA Experiment ID: 20000495 Result: Up-regulated in Transcription
  misc_feature: MA Experiment 20000495 PARAMETER Experiment Name: At_Guard_Cells_P Parameter: Harvest Date Value: 8/2/2002
  misc_feature: MA Experiment 20000495 PARAMETER Experiment Name: At_Guard_Cells_P Parameter: Organism Value: A. thaliana
  misc_feature: MA Experiment 20000495 PARAMETER Experiment Name: At_Guard_Cells_P Parameter: Tissue Value: Guard Cells vs. Leaves
  misc_feature: MA Experiment ID: 20001451 Result: Up-regulated in Transcription
  misc_feature: MA Experiment 20001451 PARAMETER Experiment Name: At_Far-red-induction_P Parameter: Age (day) Value: 7
  misc_feature: MA Experiment 20001451 PARAMETER Experiment Name: At_Far-red-induction_P Parameter: Light Value: Far-red vs. White
  misc_feature: MA Experiment 20001451 PARAMETER Experiment Name: At_Far-red-induction_P Parameter: Organism Value: A. thaliana
  misc_feature: MA Experiment 20001451 PARAMETER Experiment Name: At_Far-red-induction_P Parameter: Plant Line Value: Columbia
  misc_feature: MA Experiment 20001451 PARAMETER Experiment Name: At_Far-red-induction_P Parameter: Timepoint (hr) Value: 24
  misc_feature: MA Experiment 20001451 PARAMETER Experiment Name: At_Far-red-induction_P Parameter: Tissue Value: Whole Plant
  misc_feature: MA Experiment ID: 20001560 Result: Up-regulated in Transcription
  misc_feature: MA Experiment 20001560 PARAMETER Experiment Name: At_Drought_Soil_Dry_P Parameter: Age (day) Value: 28
  misc_feature: MA Experiment 20001560 PARAMETER Experiment Name: At_Drought_Soil_Dry_P Parameter: Organism Value: A. thaliana
  misc_feature: MA Experiment 20001560 PARAMETER Experiment Name: At_Drought_Soil_Dry_P Parameter: Plant Line Value: WS
  misc_feature: MA Experiment 20001560 PARAMETER Experiment Name: At_Drought_Soil_Dry_P Parameter: Post Timepoint (hr) Value: None
  misc_feature: MA Experiment 20001560 PARAMETER Experiment Name: At_Drought_Soil_Dry_P Parameter: Post-Treatment Value: None
  misc_feature: MA Experiment 20001560 PARAMETER Experiment Name: At_Drought_Soil_Dry_P Parameter: Timepoint (day) Value: 14
  misc_feature: MA Experiment 20001560 PARAMETER Experiment Name: At_Drought_Soil_Dry_P Parameter: Treatment Value: Drought vs. No Drought
  misc_feature: MA Experiment ID: 20001911 Result: Up-regulated in Transcription
  misc_feature: MA Experiment 20001911 PARAMETER Experiment Name: At_Drought_Reproduction_P Parameter: Age (day) Value: 40
  misc_feature: MA Experiment 20001911 PARAMETER Experiment Name: At_Drought_Reproduction_P Parameter: Organism Value: A. thaliana
  misc_feature: MA Experiment 20001911 PARAMETER Experiment Name: At_Drought_Reproduction_P Parameter: Plant Line Value: WS
  misc_feature: MA Experiment 20001911 PARAMETER Experiment Name: At_Drought_Reproduction_P Parameter: Timepoint (day) Value: 10
  misc_feature: MA Experiment 20001911 PARAMETER Experiment Name: At_Drought_Reproduction_P Parameter: Tissue Value: Flowers
  misc_feature: MA Experiment 20001911 PARAMETER Experiment Name: At_Drought_Reproduction_P Parameter: Treatment Value: Drought vs. No Drought
ggagacggaagaaaattcgaatcatcagtgtttgtttcctcctctcttaaagcttagcccttctcaggtcattgttcttcaatggcttcgagcaacacgactactggggttgataatacgtttagaaagaagtttgatgtggaagagtttaaggagcgtgctcgtgaacgcgaaaagaaggaatcggatcggtctaaatctcggtccaaaggtcctcctgtgcaaagagcccctttgaagcatagagattatcatgtagacctagaatctcgtctgggcaagacacaggtcgttacaccggtagcgcctctaagtcagcaggctggttatttctgtcgcgtttgtgattgtgttgttaaagattcggcaaactacttggatcacataaatgggaaaaaacatcaaagggcattggggatgtctatgcgggtggagagatcgtcacttgaacaagtccaagagcggttcgaggttttaaagaagcggaaagcgccaggaactttcacagaacaagatctggacgaacgcatccgaaaacagcaagaagaagaggaagaactaaaaaggcagcgtagagagaaaaagaaagagaagaagaaagggaaggtggtggaagaagagcctgagatggatcctgaggttgcagagatgatgggatttgggggctttggatcttcaaaaaaatcatgatgattatatgatcacttgtatctttgtcttgtagcgtttttgatccaaagtttgcaactttgtaatctgacacatcataacgatatttttctcattgtgcaagaagaggaatttgatggcaattta

SEQ ID NO: 100014 - protein, 202 aa, Arabidopsis thaliana; identical to SEQ ID NO: 35753
  peptide (1)..(202): Ceres Seq. ID no. 13604114
  misc_feature (83)..(107): Pfam Name: Zinc finger, C2H2 type Pfam Description: Zinc finger, C2H2 type
  misc_feature (1)..(202): Homolog of NCBI NO: 18397358 NR Description: expressed protein [Arabidopsis thaliana] AT3g05760/F10A16_5 [Arabidopsis thaliana]
  misc_feature (1)..(172): Homolog of NCBI NO: 6714389 NR Description: hypothetical protein [Arabidopsis thaliana]
  misc_feature (4)..(201): Homolog of NCBI NO: 34897240 NR Description: unknown protein [Oryza sativa (japonica
  misc_feature (8)..(201): Homolog of NCBI NO: 37595334 NR Description: z2610510D14Rik [Danio rerio]
  misc_feature (1)..(202): Homolog of NCBI NO: 13385046 NR Description: RIKEN cDNA 2610510D14 [Mus musculus] hypothetical protein FLJ31121 [Homo sapiens] unnamed protein product [Mus musculus]
  misc_feature (14)..(202): Homolog of NCBI NO: 34878791 NR Description: similar to histidyl-tRNA synthetase-like [Rattus
  misc_feature (15)..(202): Homolog of NCBI NO: 21355873 NR Description: CG11586-PA [Drosophila melanogaster]
  misc_feature (15)..(196): Homolog of NCBI NO: 31216822 NR Description: ENSANGP00000020597 [Anopheles gambiae]
  misc_feature (3)..(201): Homolog of NCBI NO: 39581678 NR Description: Hypothetical protein CBG00030 [Caenorhabditis
  misc_feature (3)..(201): Homolog of NCBI NO: 17557051 NR Description: Putative nuclear protein family member, with 2 coil-4 domains, of eukaryotic origin [Caenorhabditis elegans] Hypothetical zinc finger protein Caenorhabditis elegans

SEQ ID NO: 100015 - DNA, 1226 bp, Arabidopsis thaliana
  misc_feature (1)..(1226): Ceres Seq. ID no. 13604118
  misc_feature: MA Experiment ID: 108488 Result: Down-regulated in Transcription
  misc_feature: MA Experiment ID: 108569 Result: Down-regulated in Transcription
  misc_feature: MA Experiment 108569 PARAMETER Experiment Name: At_0.001%_MeJA__cDNA_P Parameter: Timepoint (hr) Value: 6
  misc_feature: MA Experiment 108569 PARAMETER Experiment Name: At_0.001%_MeJA__cDNA_P Parameter: Tissue Value: Aerial
  misc_feature: MA Experiment 108569 PARAMETER Experiment Name: At_0.001%_MeJA__cDNA_P Parameter: Treatment Value: 0.001% MeJA vs. No Treatment
  misc_feature: MA Experiment ID: 108585 Result: Up-regulated in Transcription
  misc_feature: MA Experiment 108585 PARAMETER Experiment Name: At_5mM_NaNP_cDNA_P Parameter: Timepoint (hr) Value: 6
  misc_feature: MA Experiment 108585 PARAMETER Experiment Name: At_5mM_NaNP_cDNA_P Parameter: Tissue Value: Aerial
  misc_feature: MA Experiment 108585 PARAMETER Experiment Name: At_5mM_NaNP_cDNA_P Parameter: Treatment Value: null
  misc_feature: MA Experiment ID: 108594 Result: Up-regulated in Transcription
  misc_feature: MA Experiment 108594 PARAMETER Experiment Name: At_Ler-rhl_Root_cDNA_P Parameter: Plant Line Value: null
  misc_feature: MA Experiment ID: 108607 Result: Up-regulated in Transcription
  misc_feature: MA Experiment 108607 PARAMETER Experiment Name: At_100uM_ABA_cDNA_P Parameter: Timepoint (hr) Value: 4
  misc_feature: MA Experiment 108607 PARAMETER Experiment Name: At_100uM_ABA_cDNA_P Parameter: Tissue Value: Aerial
  misc_feature: MA Experiment 108607 PARAMETER Experiment Name: At_100uM_ABA_cDNA_P Parameter: Treatment Value: 100uM ABA vs. No Treatment
  misc_feature: MA Experiment ID: 108668 Result: Up-regulated in Transcription
  misc_feature: MA Experiment 108668 PARAMETER Experiment Name: At_2mM_SA_cDNA_P Parameter: Plant Line Value: WS
  misc_feature: MA Experiment 108668 PARAMETER Experiment Name: At_2mM_SA_cDNA_P Parameter: Timepoint (hr) Value: 6
  misc_feature: MA Experiment 108668 PARAMETER Experiment Name: At_2mM_SA_cDNA_P Parameter: Treatment Value: 2mM SA vs. No Treatment
  misc_feature: MA Experiment ID: 20000111 Result: Down-regulated in Transcription
  misc_feature: MA Experiment 20000111 PARAMETER Experiment Name: At_42deg_Heat_cDNA_P Parameter: Temperature (deg C) Value: 42 vs. 22
  misc_feature: MA Experiment 20000111 PARAMETER Experiment Name: At_42deg_Heat_cDNA_P Parameter: Timepoint (hr) Value: 6
  misc_feature: MA Experiment 20000111 PARAMETER Experiment Name: At_42deg_Heat_cDNA_P Parameter: Tissue Value: Aerial
  misc_feature: MA Experiment ID: 20000265 Result: Up-regulated in Transcription
  misc_feature: MA Experiment 20000265 PARAMETER Experiment Name: At_Open_Flower_P Parameter: Age (day) Value: 21
  misc_feature: MA Experiment 20000265 PARAMETER Experiment Name: At_Open_Flower_P Parameter: Plant Line Value: WS
  misc_feature: MA Experiment 20000265 PARAMETER Experiment Name: At_Open_Flower_P Parameter: Tissue Value: Closed Flower vs. Whole Plant
  misc_feature: MA Experiment ID: 20000437 Result: Up-regulated in Transcription
  misc_feature: MA Experiment 20000437 PARAMETER Experiment Name: At_Drought_P Parameter: Age (day) Value: 8
  misc_feature: MA Experiment 20000437 PARAMETER Experiment Name: At_Drought_P Parameter: Organism Value: A. thaliana
  misc_feature: MA Experiment 20000437 PARAMETER Experiment Name: At_Drought_P Parameter: Plant Line Value: WS
  misc_feature: MA Experiment 20000437 PARAMETER Experiment Name: At_Drought_P Parameter: Timepoint (hr) Value: 24
  misc_feature: MA Experiment 20000437 PARAMETER Experiment Name: At_Drought_P Parameter: Tissue Value: Whole Plant
  misc_feature: MA Experiment 20000437 PARAMETER Experiment Name: At_Drought_P Parameter: Treatment Value: Drought vs. No Drought
  misc_feature: MA Experiment ID: 20001905 Result: Up-regulated in Transcription
  misc_feature: MA Experiment 20001905 PARAMETER Experiment Name: At_Drought_Reproduction_P Parameter: Age (day) Value: 40
  misc_feature: MA Experiment 20001905 PARAMETER Experiment Name: At_Drought_Reproduction_P Parameter: Organism Value: A. thaliana
  misc_feature: MA Experiment 20001905 PARAMETER Experiment Name: At_Drought_Reproduction_P Parameter: Plant Line Value: WS
  misc_feature: MA Experiment 20001905 PARAMETER Experiment Name: At_Drought_Reproduction_P Parameter: Timepoint (day) Value: 10
  misc_feature: MA Experiment 20001905 PARAMETER Experiment Name: At_Drought_Reproduction_P Parameter: Tissue Value: Rosettes
  misc_feature: MA Experiment 20001905 PARAMETER Experiment Name: At_Drought_Reproduction_P Parameter: Treatment Value: Drought vs. No Drought
gttcacatgcacccgcaaaaaaaaaaactaattttttttcttttttcttctcctcatcttcagagttttgagatttgtgattgcctccatgcaagagctgaattagccgaatctggatgtcttattctgaaaaaacgacggtggatccacttctgagagatttggatgagaagaaagagagtttccggcgaaacgtggtgtctctggctacggagctgaagcaagtgaggggccgtttggtttctcaagaacaatcttttcttaaagagaccattactagaaaagaagcagagaaaaggggaaagaatatggaaatggagatttgtaaattgcagaagagactggaagaaaggaattgtcagcttgaagcttctgcatctgctgctgataagtttatcaaagagttggaggaatttagattaaagcttgatacaaccaagcaaaccgcagaggcaagtgctgattctgctcaatctacaaagatccaatgctcaatgctaaagcaacaacttgacgacaaaacacgttctctcagagaacaagaagaccgtatgactcagcttggtcatcagcttgatgatctacagagaggtctgagcttgagagagtgctcagaaaagcagcttagagaagaagttaggagaatcgagcgtgaggttactgaggccattgcaaaagcgggaataggtggcatggacagcgagctccagaaacttctagaagatgtgtctccaatgaaatttgagaggatgaataggctagttgaagtaaaagacgaagagattacaaaactgaaagatgagataaggttaatgtcaggtcaatggaaacataagactaaggaactcgaatctcagctggagaaacagagaagaactgatcaagatttgaagaagaaggtattgaagctagagttctgtttacaagaagctcgaagccagacaagaaagctgcagaggaaaggggaaagaagggacatggagatcaaagagataagagatcttatatcggagaagcaaaaccttaacaatgagtcttgggataaacagaagttctgggacaattcagggttcaagattgttgtatcaatgtctatgttgatgttagtggtagtctccaagagatgatgaattttgtaatgtataaatttagttgcagatagttgatgaggataatctaactcatgtatgtgtcgtcttcaggtctaatataacagccatgtactt

SEQ ID NO: 100016 - protein, 336 aa, Arabidopsis thaliana; identical to SEQ ID NO: 39866
  peptide (1)..(336): Ceres Seq. ID no. 13604119
  misc_feature (6)..(320): Pfam Name: Myosin tail Pfam Description: Myosin tail
  misc_feature (1)..(336): Homolog of NCBI NO: 18397379 NR Description: expressed protein [Arabidopsis thaliana]
  misc_feature (4)..(336): Homolog of NCBI NO: 4097950 NR Description: plant IF-like protein [Arabidopsis thaliana]
  misc_feature (1)..(336): Homolog of NCBI NO: 18421042 NR Description: expressed protein [Arabidopsis thaliana]
  misc_feature (1)..(329): Homolog of NCBI NO: 7485248 NR Description: hypothetical protein A_IG002P16.20 - Arabidopsis >gi|2191168|gb|AAB61054.1| contains similarity to myosin heavy
  misc_feature (10)..(336): Homolog of NCBI NO: 22329439 NR Description: hypothetical protein [Arabidopsis thaliana]
  misc_feature (10)..(335): Homolog of NCBI NO: 25402551 NR Description: hypothetical protein [imported] - Arabidopsis >gi|3482922|gb|AAC33207.1| Hypothetical protein [Arabidopsis
  misc_feature (233)..(326): Homolog of NCBI NO: 22329441 NR Description: myosin heavy chain -related [Arabidopsis thaliana]
  misc_feature (210)..(336): Homolog of NCBI NO: 34894370 NR Description: unnamed protein product [Oryza sativa (japonica group)] >gi|8468034|dbj|BAA96634.1| unnamed protein product
  misc_feature (6)..(320): Homolog of NCBI NO: 4249699 NR Description: myosin heavy chain [Rana catesbeiana]
  misc_feature (6)..(299): Homolog of NCBI NO: 31144 NR Description: myosin heavy chain (1167 AA) [Homo sapiens]

SEQ ID NO: 100017 - protein, 272 aa, Arabidopsis thaliana; identical to SEQ ID NO: 39867
  peptide (1)..(272): Ceres Seq. ID no. 13604120
  misc_feature (1)..(256): Pfam Name: Myosin tail Pfam Description: Myosin tail
  misc_feature (1)..(272): Homolog of NCBI NO: 18397379 NR Description: expressed protein [Arabidopsis thaliana]
  misc_feature (1)..(272): Homolog of NCBI NO: 4097950 NR Description: plant IF-like protein [Arabidopsis thaliana]
  misc_feature (1)..(272): Homolog of NCBI NO: 18421042 NR Description: expressed protein [Arabidopsis thaliana]
  misc_feature (1)..(265): Homolog of NCBI NO: 7485248 NR Description: hypothetical protein A_IG002P16.20 - Arabidopsis >gi|2191168|gb|AAB61054.1| contains similarity to myosin heavy
  misc_feature (1)..(272): Homolog of NCBI NO: 22329439 NR Description: hypothetical protein [Arabidopsis thaliana]
  misc_feature (1)..(271): Homolog of NCBI NO: 25402551 NR Description: hypothetical protein [imported] - Arabidopsis >gi|3482922|gb|AAC33207.1| Hypothetical protein [Arabidopsis
  misc_feature (169)..(262): Homolog of NCBI NO: 22329441 NR Description: myosin heavy chain -related [Arabidopsis thaliana]
  misc_feature (146)..(272): Homolog of NCBI NO: 34894370 NR Description: unnamed protein product [Oryza sativa (japonica group)] >gi|8468034|dbj|BAA96634.1| unnamed protein product
  misc_feature (1)..(256): Homolog of NCBI NO: 4249699 NR Description: myosin heavy chain [Rana catesbeiana]
  misc_feature (1)..(235): Homolog of NCBI NO: 31144 NR Description: myosin heavy chain (1167 AA) [Homo sapiens]

SEQ ID NO: 100018 - protein, 270 aa, Arabidopsis thaliana; identical to SEQ ID NO: 39868
  peptide (1)..(270): Ceres Seq. ID no. 13604121
  misc_feature (1)..(254): Pfam Name: Myosin tail Pfam Description: Myosin tail
  misc_feature (1)..(270): Homolog of NCBI NO: 18397379 NR Description: expressed protein [Arabidopsis thaliana]
  misc_feature (1)..(270): Homolog of NCBI NO: 4097950 NR Description: plant IF-like protein [Arabidopsis thaliana]
  misc_feature (1)..(270): Homolog of NCBI NO: 18421042 NR Description: expressed protein [Arabidopsis thaliana]
  misc_feature (1)..(263): Homolog of NCBI NO: 7485248 NR Description: hypothetical protein A_IG002P16.20 - Arabidopsis >gi|2191168|gb|AAB61054.1| contains similarity to myosin heavy
  misc_feature (1)..(270): Homolog of NCBI NO: 22329439 NR Description: hypothetical protein [Arabidopsis thaliana]
  misc_feature (1)..(269): Homolog of NCBI NO: 25402551 NR Description: hypothetical protein [imported] - Arabidopsis >gi|3482922|gb|AAC33207.1| Hypothetical protein [Arabidopsis
  misc_feature (167)..(260): Homolog of NCBI NO: 22329441 NR Description: myosin heavy chain -related [Arabidopsis thaliana]
  misc_feature (144)..(270): Homolog of NCBI NO: 34894370 NR Description: unnamed protein product [Oryza sativa (japonica group)] >gi|8468034|dbj|BAA96634.1| unnamed protein product
  misc_feature (1)..(254): Homolog of NCBI NO: 4249699 NR Description: myosin heavy chain [Rana catesbeiana]
  misc_feature (1)..(233): Homolog of NCBI NO: 31144 NR Description: myosin heavy chain (1167 AA) [Homo sapiens]

SEQ ID NO: 100019 - DNA, 1718 bp, Arabidopsis thaliana
  misc_feature (1)..(1718): Ceres Seq. ID no. 13604122
  misc_feature: MA Experiment ID: 108462 Result: Up-regulated in Transcription
  misc_feature: MA Experiment 108462 PARAMETER Experiment Name: At_Germinating_Seeds_cDNA_P Parameter: Age (day) Value: 2 vs. 0
  misc_feature: MA Experiment 108462 PARAMETER Experiment Name: At_Germinating_Seeds_cDNA_P Parameter: Tissue Value: Germinating Seeds
  misc_feature: MA Experiment ID: 108464 Result: Up-regulated in Transcription
  misc_feature: MA Experiment 108464 PARAMETER Experiment Name: At_Germinating_Seeds_cDNA_P Parameter: Age (day) Value: 4 vs. 0
  misc_feature: MA Experiment 108464 PARAMETER Experiment Name: At_Germinating_Seeds_cDNA_P Parameter: Tissue Value: Germinating Seeds
  misc_feature: MA Experiment ID: 108569 Result: Up-regulated in Transcription
  misc_feature: MA Experiment 108569 PARAMETER Experiment Name: At_0.001%_MeJA__cDNA_P Parameter: Timepoint (hr) Value: 6
  misc_feature: MA Experiment 108569 PARAMETER Experiment Name: At_0.001%_MeJA__cDNA_P Parameter: Tissue Value: Aerial
  misc_feature: MA Experiment 108569 PARAMETER Experiment Name: At_0.001%_MeJA__cDNA_P Parameter: Treatment Value: 0.001% MeJA vs. No Treatment
  misc_feature: MA Experiment ID: 108573 Result: Up-regulated in Transcription
  misc_feature: MA Experiment 108573 PARAMETER Experiment Name: At_Drought_cDNA_P Parameter: Timepoint (hr) Value: 6
  misc_feature: MA Experiment 108573 PARAMETER Experiment Name: At_Drought_cDNA_P Parameter: Tissue Value: Aerial
  misc_feature: MA Experiment 108573 PARAMETER Experiment Name: At_Drought_cDNA_P Parameter: Treatment Value: Drought vs. No Drought
  misc_feature: MA Experiment ID: 20000089 Result: Down-regulated in Transcription
attcttattattattattcatcagaccaacaacaaaaaggagataaagagaagaggattcatcatcatcaatcaatccttcattttatggatctactcatatcttgattcttccttctatctctcccttttcttccatctctttttctctgggtttccccggattgagttttttaatctctgattgacagatttgaagagcgtgacaaaggaagaatcttttattaaaacaaattcttctgttttaatcttgggatggcctcggtgggcatagagcctagtgccgcggttagagaatctactggaaacgttactgatgctgatagattacccgaggagatgaaggacatgaaaattcaagatgataaagaaatggaagctacgattgttaatggcaatgtgactgagactggccatataatagtaactactataggaggaagaaatggccagccaaaacagacaatcagttacatggcggagcgagttgttggacatggctcctttggtgttgtgtttcaggccaaatgtttagaaacaggagaaactgttgctataaagaaagttctacaagatcggaggtacaagaatcgtgagcttcaaacaatgaggctacttgaccatccaaatgttgtgtctttgaaacattgtttcttctctacaaccgaaaaagatgagctttatctcaacttggttctggaatacgttccggaaactgtgcaccgcgtcatcaaacactacaacaaacttaaccaacgaatgcctctcgtttacgtcaaactttacacttatcagatttttaggtccttatcctacattcaccgatgtatcggcgtatgtcatcgagacatcaaacctcaaaacttgttggtaaatccacacactcatcaagtgaaactatgcgattttggaagtgcgaaagtattggttaaaggagagccaaacatttcatacatttgctcgaggtattacagagcacctgagctcatttttggagccaccgagtatactacagccattgatgtctggtctgcaggatgtgttctcgccgagcttcttctcgggcagccattgttcccgggtgagagcggtgttgatcaacttgtagagattataaaggttttgggaacaccaacaagggaagaaatcaaatgcatgaacccgaattacacagagttcaaatttcctcagattaaagctcatccatggcataagattttccacaagagaatgcctccagaagctgttgatttggtctcaaggcttcttcaatactctcccaatctccgttgtgctgctcttgattcattggtccacccattctttgacgagctaagagatccgaatgcgcgattacccaacggacgtttccttccaccgctctttaactttaagcctcatgaacttaaaggtgtgcctgtggagatggtggcgaagttagttccagaacatgcgaggaagcaatgtccgtggctcagtttgtgatttgttctcacctgcaaacacgaaaactagagcaaagcagtcgagatattcatctcttctcttctctctccttctctgtattaatattattataatgatcatatctcaatctgatgatttagtaaccctttgtttgttgtatgagtagagaaagagtgaatcatttgtgggggttatgatattgtataagccaacaaagattattttttaaagagagtttcgtgttttctgtct

SEQ ID NO: 100020 - protein, 409 aa, Arabidopsis thaliana; identical to SEQ ID NO: 30400
  peptide (1)..(409): Ceres Seq. ID no. 13604123
  misc_feature (73)..(357): Pfam Name: Protein kinase domain Pfam Description: Protein kinase domain
  misc_feature (1)..(409): Homolog of NCBI NO: 15230058 NR Description: shaggy-related protein kinase gamma [Arabidopsis
  misc_feature (1)..(409): Homolog of NCBI NO: 21553877 NR Description: shaggy related protein kinase ASK-GAMMA
  misc_feature (1)..(409): Homolog of NCBI NO: 18421039 NR Description: shaggy-related protein kinase alpha [Arabidopsis
  misc_feature (1)..(409): Homolog of NCBI NO: 541901 NR Description: protein kinase ASK-alpha (EC 2.7.1.-) - Arabidopsis thaliana >gi|460832|emb|CAA53181.1| shaggy related [Arabidopsis thaliana] >gi|1769889|emb|CAA48538.1| serine
  misc_feature (1)..(409): Homolog of NCBI NO: 2398519 NR Description: shaggy-like kinase alpha [Arabidopsis thaliana]
  misc_feature (69)..(409): Homolog of NCBI NO: 7434274 NR Description: hypothetical protein A_IG002P16.21 - Arabidopsis >gi|2191169|gb|AAB61055.1| Similar to shaggy related protein
  misc_feature (1)..(78): Homolog of NCBI NO: 7434274 NR Description: hypothetical protein A_IG002P16.21 - Arabidopsis >gi|2191169|gb|AAB61055.1| Similar to shaggy related protein
  misc_feature (1)..(409): Homolog of NCBI NO: 1709127 NR Description: Glycogen synthase kinase-3 homolog MsK-1
  misc_feature (1)..(409): Homolog of NCBI NO: 11133532 NR Description: Shaggy-related protein kinase NtK-1
  misc_feature (1)..(404): Homolog of NCBI NO: 481018 NR Description: protein kinase MSK-3 (EC 2.7.1.-) [similarity] -

SEQ ID NO: 100021 - protein, 381 aa, Arabidopsis thaliana; identical to SEQ ID NO: 30401
  peptide (1)..(381): Ceres Seq. ID no. 13604124
  misc_feature (45)..(329): Pfam Name: Protein kinase domain Pfam Description: Protein kinase domain
  misc_feature (1)..(381): Homolog of NCBI NO: 15230058 NR Description: shaggy-related protein kinase gamma [Arabidopsis
  misc_feature (1)..(381): Homolog of NCBI NO: 21553877 NR Description: shaggy related protein kinase ASK-GAMMA
  misc_feature (1)..(381): Homolog of NCBI NO: 18421039 NR Description: shaggy-related protein kinase alpha [Arabidopsis
  misc_feature (1)..(381): Homolog of NCBI NO: 541901 NR Description: protein kinase ASK-alpha (EC 2.7.1.-) - Arabidopsis thaliana >gi|460832|emb|CAA53181.1| shaggy related [Arabidopsis thaliana] >gi|1769889|emb|CAA48538.1| serine
  misc_feature (1)..(381): Homolog of NCBI NO: 2398519 NR Description: shaggy-like kinase alpha [Arabidopsis thaliana]
  misc_feature (41)..(381): Homolog of NCBI NO: 7434274 NR Description: hypothetical protein A_IG002P16.21 - Arabidopsis >gi|2191169|gb|AAB61055.1| Similar to shaggy related protein
  misc_feature (1)..(50): Homolog of NCBI NO: 7434274 NR Description: hypothetical protein A_IG002P16.21 - Arabidopsis >gi|2191169|gb|AAB61055.1| Similar to shaggy related protein
  misc_feature (1)..(381): Homolog of NCBI NO: 1709127 NR Description: Glycogen synthase kinase-3 homolog MsK-1
  misc_feature (1)..(381): Homolog of NCBI NO: 11133532 NR Description: Shaggy-related protein kinase NtK-1
  misc_feature (1)..(376): Homolog of NCBI NO: 481018 NR Description: protein kinase MSK-3 (EC 2.7.1.-) [similarity] -

SEQ ID NO: 100022 - protein, 378 aa, Arabidopsis thaliana; identical to SEQ ID NO: 30402
  peptide (1)..(378): Ceres Seq. ID no. 13604125
  misc_feature (42)..(326): Pfam Name: Protein kinase domain Pfam Description: Protein kinase domain
  misc_feature (1)..(378): Homolog of NCBI NO: 15230058 NR Description: shaggy-related protein kinase gamma [Arabidopsis
  misc_feature (1)..(378): Homolog of NCBI NO: 21553877 NR Description: shaggy related protein kinase ASK-GAMMA
  misc_feature (1)..(378): Homolog of NCBI NO: 18421039 NR Description: shaggy-related protein kinase alpha [Arabidopsis
  misc_feature (1)..(378): Homolog of NCBI NO: 541901 NR Description: protein kinase ASK-alpha (EC 2.7.1.-) - Arabidopsis thaliana >gi|460832|emb|CAA53181.1| shaggy related [Arabidopsis thaliana] >gi|1769889|emb|CAA48538.1| serine
  misc_feature (1)..(378): Homolog of NCBI NO: 2398519 NR Description: shaggy-like kinase alpha [Arabidopsis thaliana]
  misc_feature (38)..(378): Homolog of NCBI NO: 7434274 NR Description: hypothetical protein A_IG002P16.21 - Arabidopsis >gi|2191169|gb|AAB61055.1| Similar to shaggy related protein
  misc_feature (1)..(47): Homolog of NCBI NO: 7434274 NR Description: hypothetical protein A_IG002P16.21 - Arabidopsis >gi|2191169|gb|AAB61055.1| Similar to shaggy related protein
  misc_feature (1)..(378): Homolog of NCBI NO: 1709127 NR Description: Glycogen synthase kinase-3 homolog MsK-1
  misc_feature (1)..(378): Homolog of NCBI NO: 11133532 NR Description: Shaggy-related protein kinase NtK-1
  misc_feature (1)..(373): Homolog of NCBI NO: 481018 NR Description: protein kinase MSK-3 (EC 2.7.1.-) [similarity] -

SEQ ID NO: 100023 - DNA, 2290 bp, Arabidopsis thaliana
  misc_feature (1)..(2290): Ceres Seq. ID no. 13604130
  misc_feature: MA Experiment ID: 108469 Result: Up-regulated in Transcription
  misc_feature: MA Experiment ID: 108595 Result: Up-regulated in Transcription
  misc_feature: MA Experiment 108595 PARAMETER Experiment Name: At_Ler-pi_Ovule_cDNA_P Parameter: Plant Line Value: null
  misc_feature: MA Experiment ID: 20000086 Result: Down-regulated in Transcription
  misc_feature: MA Experiment 20000086 PARAMETER Experiment Name: At_100uM_ABA_Mutants_cDNA_P Parameter: Plant Line Value: CS22
  misc_feature: MA Experiment 20000086 PARAMETER Experiment Name: At_100uM_ABA_Mutants_cDNA_P Parameter: Timepoint (hr) Value: 6
  misc_feature: MA Experiment 20000086 PARAMETER Experiment Name: At_100uM_ABA_Mutants_cDNA_P Parameter: Tissue Value: Aerial
  misc_feature: MA Experiment 20000086 PARAMETER Experiment Name: At_100uM_ABA_Mutants_cDNA_P Parameter: Treatment Value: 100uM ABA vs. No Treatment
  misc_feature: MA Experiment ID: 20000173 Result: Down-regulated in Transcription
  misc_feature: MA Experiment 20000173 PARAMETER Experiment Name: At_42deg_Heat_P Parameter: Age (day) Value: 14
  misc_feature: MA Experiment 20000173 PARAMETER Experiment Name: At_42deg_Heat_P Parameter: Organism Value: A. thaliana
  misc_feature: MA Experiment 20000173 PARAMETER Experiment Name: At_42deg_Heat_P Parameter: Plant Line Value: WS
  misc_feature: MA Experiment 20000173 PARAMETER Experiment Name: At_42deg_Heat_P Parameter: Temperature (deg C) Value: 42 vs. 22
  misc_feature: MA Experiment 20000173 PARAMETER Experiment Name: At_42deg_Heat_P Parameter: Timepoint (hr) Value: 6
  misc_feature: MA Experiment 20000173 PARAMETER Experiment Name: At_42deg_Heat_P Parameter: Tissue Value: Aerial
  misc_feature: MA Experiment ID: 20000182 Result: Up-regulated in Transcription
  misc_feature: MA Experiment 20000182 PARAMETER Experiment Name: At_2mM_SA_P Parameter: Age (day) Value: 14
  misc_feature: MA Experiment 20000182 PARAMETER Experiment Name: At_2mM_SA_P Parameter: Organism Value: A. thaliana
  misc_feature: MA Experiment 20000182 PARAMETER Experiment Name: At_2mM_SA_P Parameter: Plant Line Value: WS
  misc_feature: MA Experiment 20000182 PARAMETER Experiment Name: At_2mM_SA_P Parameter: Timepoint (hr) Value: 6
  misc_feature: MA Experiment 20000182 PARAMETER Experiment Name: At_2mM_SA_P Parameter: Tissue Value: Aerial
  misc_feature: MA Experiment 20000182 PARAMETER Experiment Name: At_2mM_SA_P Parameter: Treatment Value: 2mM SA vs. No Treatment
  misc_feature: MA Experiment ID: 20000184 Result: Down-regulated in Transcription
  misc_feature: MA Experiment 20000184 PARAMETER Experiment Name: At_Shoots__P Parameter: Age (day) Value: 7
  misc_feature: MA Experiment 20000184 PARAMETER Experiment Name: At_Shoots__P Parameter: Tissue Value: Shoots vs. Whole Plant
  misc_feature: MA Experiment ID: 20000224 Result: Down-regulated in Transcription
  misc_feature: MA Experiment ID: 20000437 Result: Up-regulated in Transcription
  misc_feature: MA Experiment 20000437 PARAMETER Experiment Name: At_Drought_P Parameter: Age (day) Value: 8
  misc_feature: MA Experiment 20000437 PARAMETER Experiment Name: At_Drought_P Parameter: Organism Value: A. thaliana
  misc_feature: MA Experiment 20000437 PARAMETER Experiment Name: At_Drought_P Parameter: Plant Line Value: WS
  misc_feature: MA Experiment 20000437 PARAMETER Experiment Name: At_Drought_P Parameter: Timepoint (hr) Value: 24
  misc_feature: MA Experiment 20000437 PARAMETER Experiment Name: At_Drought_P Parameter: Tissue Value: Whole Plant
  misc_feature: MA Experiment 20000437 PARAMETER Experiment Name: At_Drought_P Parameter: Treatment Value: Drought vs. No Drought
  misc_feature: MA Experiment ID: 20000794 Result: Up-regulated in Transcription
  misc_feature: MA Experiment 20000794 PARAMETER Experiment Name: At_Petals_P Parameter: Age (day) Value: 23-25 days
  misc_feature: MA Experiment 20000794 PARAMETER Experiment Name: At_Petals_P Parameter: Plant Line Value: WS
  misc_feature: MA Experiment 20000794 PARAMETER Experiment Name: At_Petals_P Parameter: Tissue Value: Petals vs. Whole plant
  misc_feature: MA Experiment ID: 20001451 Result: Down-regulated in Transcription
  misc_feature: MA Experiment 20001451 PARAMETER Experiment Name: At_Far-red-induction_P Parameter: Age (day) Value: 7
  misc_feature: MA Experiment 20001451 PARAMETER Experiment Name: At_Far-red-induction_P Parameter: Light Value: Far-red vs. White
  misc_feature: MA Experiment 20001451 PARAMETER Experiment Name: At_Far-red-induction_P Parameter: Organism Value: A. thaliana
  misc_feature: MA Experiment 20001451 PARAMETER Experiment Name: At_Far-red-induction_P Parameter: Plant Line Value: Columbia
  misc_feature: MA Experiment 20001451 PARAMETER Experiment Name: At_Far-red-induction_P Parameter: Timepoint (hr) Value: 24
  misc_feature: MA Experiment 20001451 PARAMETER Experiment Name: At_Far-red-induction_P Parameter: Tissue Value: Whole Plant
atctttctctctttcggatcattctctcctctgattccgaatcgggtaaattattatggattcttcttcttcgtcttcctccgccgccgcacgccgccgtatcaacgctatccactctcacctcgtcacctcttctcgctcttcccctctcctccgctccaatcccaccgccggcgagttctgtcttgataatggctatagtgttgttcttcccgagaaactgaatactggcagttggaacgtctacagatctgcaaaatctccgttcaagctcgttagcagattcccagatcatcctgacatcgctactctccatgacaattttgagcatgctgttcatgattttcgagattacaagtatttaggaactcgtgttcgtgtcgacggaactgttggagactacaaatggatgacatatggagaagctggtacagcaagaactgctttaggttctggtttggttcatcacggaatccccatgggatcttctgttggaatttacttcatcaatcgcccagagtggctcattgttgatcatgcttgttcttcttattcttatgtgtctgttcctttgtatgatactcttggtcctgatgctgtgaaatttattgtcaatcatgcaactgtgcaagccatattttgtgtggcagagactttaaactctttacttagctgtttgtctgagatgccaagtgtacgcctggtggtggttgttggagggttaattgaatctttaccctcgcttccctcatcatcaggagtgaaagttgtatcctattcggtgttactgaatcagggtcgtagtaaccctcagcgattttttccaccaaaacccgatgatgttgcaaccatatgctatacaagcggaacaactgggacacccaagggagtcgtattaactcatgcaaacttgattgccaatgttgctggctccagctttagtgtgaagtttttctcttcagatgtttacatttcgtatcttccacttgctcacatttacgaacgagctaatcagatcctaacagtgtactttggagttgctgttggattctaccaaggggacaatatgaaactactggatgatttggctgctctgagacctactgtatttagcagtgtccctcgattatacaatagaatatatgctggtatcattaatgcagtaaaaacctctggtggtctgaaagagagactcttcaatgctgcctataatgcaaagaagcaggctctcttgaatggaaagagtgcttctcccatatgggacaggttggtatttaataaaataaaggacagacttggagggcgggttcgttttatgacgtctggtgcttcacctctctctcctgaagtgatggaatttttgaaagtatgctttggaggaagggtaacagagggatatggaatgactgaaacatcttgtgttataagtggaatggacgagggtgataacctcactggacatgttggctctcctaatccagcttgtgaagtaaagcttgtggatgtcccagaaatgaactatacatcagcggatcagccccatccccgtggcgaaatatgtgttaggggtcctatcatttttacaggctattacaaagatgaaattcaaacgaaagaggtgattgatgaagatggatggcttcacactggagatataggtctgtggctgccgggaggacgtctaaaaattattgacagaaagaagaacatcttcaaattggcgcagggggagtatatagctccagagaaaattgaaaacgtctatgccaaatgcaaatttgtgggccagtgcttcatatatggtgatagctttaattcatcattggtagctgttgtatcggttgatccagatgtgctgaaaagctgggcagcttcagaaggcattaagggaggagatctgagagaattgtgtaataatccgagagtgaaagcagcagtactatctgacatggacactgttggaagagaagctcagttgagaggcttcgagtttgcaaaggctgtgacattggtgctggaaccatttactctggaaaatggcttgttgactccgacgttcaagattaagagaccacaagcaaaggaatatttcgcagaagcaataacaaacatgtacaaggagcttggtgcttctgatccctctgctaatagaggtttgtgatgatggtataatcgtgtgattaataaaaagcctacgcaaaagttgtttctcccacaaattgtattcttttttgttttcttgctacatatttattgaatagtaaaggtaataaaggtgctacattacatt

SEQ ID NO: 100024 - protein, 701 aa, Arabidopsis thaliana
  peptide (1)..(701): Ceres Seq. ID no. 13604131
  misc_feature (120)..(581): Pfam Name: AMP-binding enzyme Pfam Description: AMP-binding enzyme
  misc_feature (13)..(695): Homolog of NCBI NO: 22327099 NR Description: AMP-binding protein, putative [Arabidopsis
  misc_feature (13)..(695): Homolog of NCBI NO: 20805875 NR Description: long chain acyl-CoA synthetase 7 [Arabidopsis
  misc_feature (65)..(695): Homolog of NCBI NO: 28565633 NR Description: fatty acyl-CoA synthetase [Dictyostelium
  misc_feature (44)..(690): Homolog of NCBI NO: 31240973 NR Description: ENSANGP00000012026 [Anopheles gambiae]
  misc_feature (80)..(690): Homolog of NCBI NO: 13431637 NR Description: Long-chain-fatty-acid--CoA ligase 1 (Long-chain
  misc_feature (82)..(690): Homolog of NCBI NO: 17510401 NR Description: Fatty long (79.0 kD) [Caenorhabditis elegans]
  misc_feature (53)..(690): Homolog of NCBI NO: 16769794 NR Description: SD01152p [Drosophila melanogaster]
  misc_feature (53)..(690): Homolog of NCBI NO: 24666497 NR Description: CG3961-PA [Drosophila melanogaster]
  misc_feature (116)..(687): Homolog of NCBI NO: 28628069 NR Description: long-chain acyl-CoA synthetase [Mus musculus]
  misc_feature (80)..(687): Homolog of NCBI NO: 27882609 NR Description: similar to fatty acid Coenzyme A ligase [Xenopus
MDSSSSSSSAAARRRINAIHSHLVTSSRSSPLLRSNPTAGEFCLDNGYSVVLPEKLNTGSWNVYRSAKSPFKLVSRFPDHPDIATLHDNFEHAVHDFRDYKYLGTRVRVDGTVGDYKWMTYGEAGTARTALGSGLVHHGIPMGSSVGIYFINRPEWLIVDHACSSYSYVSVPLYDTLGPDAVKFIVNHATVQAIFCVAETLNSLLSCLSEMPSVRLVVVVGGLIESLPSLPSSSGVKVVSYSVLLNQGRSNPQRFFPPKPDDVATICYTSGTTGTPKGVVLTHANLIANVAGSSFSVKFFSSDVYISYLPLAHIYERANQILTVYFGVAVGFYQGDNMKLLDDLAALRPTVFSSVPRLYNRIYAGIINAVKTSGGLKERLFNAAYNAKKQALLNGKSASPIWDRLVFNKIKDRLGGRVRFMTSGASPLSPEVMEFLKVCFGGRVTEGYGMTETSCVISGMDEGDNLTGHVGSPNPACEVKLVDVPEMNYTSADQPHPRGEICVRGPIIFTGYYKDEIQTKEVIDEDGWLHTGDIGLWLPGGRLKIIDRKKNIFKLAQGEYIAPEKIENVYAKCKFVGQCFIYGDSFNSSLVAVVSVDPDVLKSWAASEGIKGGDLRELCNNPRVKAAVLSDMDTVGREAQLRGFEFAKAVTLVLEPFTLENGLLTPTFKIKRPQAKEYFAEAITNMYKELGASDPSANRGL

SEQ ID NO: 100025 - protein, 583 aa, Arabidopsis thaliana
  peptide (1)..(583): Ceres Seq. ID no. 13604132
  misc_feature (2)..(463): Pfam Name: AMP-binding enzyme Pfam Description: AMP-binding enzyme
  misc_feature (1)..(577): Homolog of NCBI NO: 22327099 NR Description: AMP-binding protein, putative [Arabidopsis
  misc_feature (1)..(577): Homolog of NCBI NO: 20805875 NR Description: long chain acyl-CoA synthetase 7 [Arabidopsis
  misc_feature (1)..(577): Homolog of NCBI NO: 28565633 NR Description: fatty acyl-CoA synthetase [Dictyostelium
  misc_feature (1)..(572): Homolog of NCBI NO: 31240973 NR Description: ENSANGP00000012026 [Anopheles gambiae]
  misc_feature (1)..(572): Homolog of NCBI NO: 13431637 NR Description: Long-chain-fatty-acid--CoA ligase 1 (Long-chain
  misc_feature (1)..(572): Homolog of NCBI NO: 17510401 NR Description: Fatty long (79.0 kD) [Caenorhabditis elegans]
  misc_feature (1)..(572): Homolog of NCBI NO: 16769794 NR Description: SD01152p [Drosophila melanogaster]
  misc_feature (1)..(572): Homolog of NCBI NO: 24666497 NR Description: CG3961-PA [Drosophila melanogaster]
  misc_feature (1)..(569): Homolog of NCBI NO: 28628069 NR Description: long-chain acyl-CoA synthetase [Mus musculus]
  misc_feature (1)..(569): Homolog of NCBI NO: 27882609 NR Description: similar to fatty acid Coenzyme A ligase [Xenopus
MTYGEAGTARTALGSGLVHHGIPMGSSVGIYFINRPEWLIVDHACSSYSYVSVPLYDTLGPDAVKFIVNHATVQAIFCVAETLNSLLSCLSEMPSVRLVVVVGGLIESLPSLPSSSGVKVVSYSVLLNQGRSNPQRFFPPKPDDVATICYTSGTTGTPKGVVLTHANLIANVAGSSFSVKFFSSDVYISYLPLAHIYERANQILTVYFGVAVGFYQGDNMKLLDDLAALRPTVFSSVPRLYNRIYAGIINAVKTSGGLKERLFNAAYNAKKQALLNGKSASPIWDRLVFNKIKDRLGGRVRFMTSGASPLSPEVMEFLKVCFGGRVTEGYGMTETSCVISGMDEGDNLTGHVGSPNPACEVKLVDVPEMNYTSADQPHPRGEICVRGPIIFTGYYKDEIQTKEVIDEDGWLHTGDIGLWLPGGRLKIIDRKKNIFKLAQGEYIAPEKIENVYAKCKFVGQCFIYGDSFNSSLVAVVSVDPDVLKSWAASEGIKGGDLRELCNNPRVKAAVLSDMDTVGREAQLRGFEFAKAVTLVLEPFTLENGLLTPTFKIKRPQAKEYFAEAITNMYKELGASDPSANRGL

SEQ ID NO: 100026 - protein, 560 aa, Arabidopsis thaliana
  peptide (1)..(560): Ceres Seq. ID no. 13604133
  misc_feature (1)..(440): Pfam Name: AMP-binding enzyme Pfam Description: AMP-binding enzyme
  misc_feature (1)..(554): Homolog of NCBI NO: 22327099 NR Description: AMP-binding protein, putative [Arabidopsis
  misc_feature (1)..(554): Homolog of NCBI NO: 20805875 NR Description: long chain acyl-CoA synthetase 7 [Arabidopsis
  misc_feature (1)..(554): Homolog of NCBI NO: 28565633 NR Description: fatty acyl-CoA synthetase [Dictyostelium
  misc_feature (1)..(549): Homolog of NCBI NO: 31240973 NR Description: ENSANGP00000012026 [Anopheles gambiae]
  misc_feature (1)..(549): Homolog of NCBI NO: 13431637 NR Description: Long-chain-fatty-acid--CoA ligase 1 (Long-chain
  misc_feature (1)..(549): Homolog of NCBI NO: 17510401 NR Description: Fatty long (79.0 kD) [Caenorhabditis elegans]
  misc_feature (1)..(549): Homolog of NCBI NO: 16769794 NR Description: SD01152p [Drosophila melanogaster]
  misc_feature (1)..(549): Homolog of NCBI NO: 24666497 NR Description: CG3961-PA [Drosophila melanogaster]
  misc_feature (1)..(546): Homolog of NCBI NO: 28628069 NR Description: long-chain acyl-CoA synthetase [Mus musculus]
  misc_feature (1)..(546): Homolog of NCBI NO: 27882609 NR Description: similar to fatty acid Coenzyme A ligase [Xenopus
MGSSVGIYFINRPEWLIVDHACSSYSYVSVPLYDTLGPDAVKFIVNHATVQAIFCVAETLNSLLSCLSEMPSVRLVVVVGGLIESLPSLPSSSGVKVVSYSVLLNQGRSNPQRFFPPKPDDVATICYTSGTTGTPKGVVLTHANLIANVAGSSFSVKFFSSDVYISYLPLAHIYERANQILTVYFGVAVGFYQGDNMKLLDDLAALRPTVFSSVPRLYNRIYAGIINAVKTSGGLKERLFNAAYNAKKQALLNGKSASPIWDRLVFNKIKDRLGGRVRFMTSGASPLSPEVMEFLKVCFGGRVTEGYGMTETSCVISGMDEGDNLTGHVGSPNPACEVKLVDVPEMNYTSADQPHPRGEICVRGPIIFTGYYKDEIQTKEVIDEDGWLHTGDIGLWLPGGRLKIIDRKKNIFKLAQGEYIAPEKIENVYAKCKFVGQCFIYGDSFNSSLVAVVSVDPDVLKSWAASEGIKGGDLRELCNNPRVKAAVLSDMDTVGREAQLRGFEFAKAVTLVLEPFTLENGLLTPTFKIKRPQAKEYFAEAITNMYKELGASDPSANRGL

SEQ ID NO: 100027 - DNA, 1109 bp, Arabidopsis thaliana
  misc_feature (1)..(1109): Ceres Seq. ID no. 13604134
  misc_feature: MA Experiment ID: 20000171 Result: Up-regulated in Transcription
  misc_feature: MA Experiment 20000171 PARAMETER Experiment Name: At_42deg_Heat_P Parameter: Age (day) Value: 14
  misc_feature: MA Experiment 20000171 PARAMETER Experiment Name: At_42deg_Heat_P Parameter: Organism Value: A. thaliana
  misc_feature: MA Experiment 20000171 PARAMETER Experiment Name: At_42deg_Heat_P Parameter: Plant Line Value: WS
  misc_feature: MA Experiment 20000171 PARAMETER Experiment Name: At_42deg_Heat_P Parameter: Temperature (deg C) Value: 42 vs. 22
  misc_feature: MA Experiment 20000171 PARAMETER Experiment Name: At_42deg_Heat_P Parameter: Timepoint (hr) Value: 1
  misc_feature: MA Experiment 20000171 PARAMETER Experiment Name: At_42deg_Heat_P Parameter: Tissue Value: Aerial
  misc_feature: MA Experiment ID: 20000180 Result: Up-regulated in Transcription
  misc_feature: MA Experiment 20000180 PARAMETER Experiment Name: At_Germinating_Seeds_P Parameter: Age (hr) Value: 24 vs. 0
  misc_feature: MA Experiment 20000180 PARAMETER Experiment Name: At_Germinating_Seeds_P Parameter: Tissue Value: Germinating Seeds
  misc_feature: MA Experiment ID: 20000227 Result: Up-regulated in Transcription
  misc_feature: MA Experiment 20000227 PARAMETER Experiment Name: At_Root-Tips-vs-Tops_P Parameter: Tissue Value: Root Tips vs. Root Tops
  misc_feature: MA Experiment ID: 20000234 Result: Up-regulated in Transcription
  misc_feature: MA Experiment 20000234 PARAMETER Experiment Name: At_Siliques_P Parameter: Age (day) Value: 21
  misc_feature: MA Experiment 20000234 PARAMETER Experiment Name: At_Siliques_P Parameter: Organism Value: A. thaliana
  misc_feature: MA Experiment 20000234 PARAMETER Experiment Name: At_Siliques_P Parameter: Plant Line Value: WS
  misc_feature: MA Experiment 20000234 PARAMETER Experiment Name: At_Siliques_P Parameter: Tissue Value: Less Than 5mm Siliques vs. Whole Plant
  misc_feature: MA Experiment ID: 20000235 Result: Up-regulated in Transcription
  misc_feature: MA Experiment 20000235 PARAMETER Experiment Name: At_Siliques_P Parameter: Age (day) Value: 21
  misc_feature: MA Experiment 20000235 PARAMETER Experiment Name: At_Siliques_P Parameter: Organism Value: A. thaliana
  misc_feature: MA Experiment 20000235 PARAMETER Experiment Name: At_Siliques_P Parameter: Plant Line Value: WS
  misc_feature: MA Experiment 20000235 PARAMETER Experiment Name: At_Siliques_P Parameter: Tissue Value: 5-10mm Siliques vs. Whole Plant
  misc_feature: MA Experiment ID: 20000265 Result: Up-regulated in Transcription
  misc_feature: MA Experiment 20000265 PARAMETER Experiment Name: At_Open_Flower_P Parameter: Age (day) Value: 21
  misc_feature: MA Experiment 20000265 PARAMETER Experiment Name: At_Open_Flower_P Parameter: Plant Line Value: WS
  misc_feature: MA Experiment 20000265 PARAMETER Experiment Name: At_Open_Flower_P Parameter: Tissue Value: Closed Flower vs. Whole Plant
  misc_feature: MA Experiment ID: 20000286 Result: Up-regulated in Transcription
  misc_feature: MA Experiment 20000286 PARAMETER Experiment Name: At_Open_Flower_P Parameter: Age (day) Value: 21
  misc_feature: MA Experiment 20000286 PARAMETER Experiment Name: At_Open_Flower_P Parameter: Plant Line Value: WS
  misc_feature: MA Experiment 20000286 PARAMETER Experiment Name: At_Open_Flower_P Parameter: Tissue Value: Half Open vs. Whole Plant
  misc_feature: MA Experiment ID: 20000441 Result: Down-regulated in Transcription
  misc_feature: MA Experiment 20000441 PARAMETER Experiment Name: At_1uM_BR-BRZ__P Parameter: Tissue Value: Shoot Apices
  misc_feature: MA Experiment 20000441 PARAMETER Experiment Name: At_1uM_BR-BRZ__P Parameter: Treatment Value: 1uM BR vs. No Treatment
  misc_feature: MA Experiment ID: 20000443 Result: Down-regulated in Transcription
  misc_feature: MA Experiment 20000443 PARAMETER Experiment Name: At_1uM_BR-BRZ__P Parameter: Tissue Value: Shoot Apices
  misc_feature: MA Experiment 20000443 PARAMETER Experiment Name: At_1uM_BR-BRZ__P Parameter: Treatment Value: 1uM BRZ vs. No Treatment
  misc_feature: MA Experiment ID: 20001247 Result: Down-regulated in Transcription
  misc_feature: MA Experiment 20001247 PARAMETER Experiment Name: At_Far-red-induction_P Parameter: Age (day) Value: 7
  misc_feature: MA Experiment 20001247 PARAMETER Experiment Name: At_Far-red-induction_P Parameter: Light Value: Far-red vs. White
  misc_feature: MA Experiment 20001247 PARAMETER Experiment Name: At_Far-red-induction_P Parameter: Organism Value: A. thaliana
  misc_feature: MA Experiment 20001247 PARAMETER Experiment Name: At_Far-red-induction_P Parameter: Plant Line Value: Columbia
  misc_feature: MA Experiment 20001247 PARAMETER Experiment Name: At_Far-red-induction_P Parameter: Timepoint (hr) Value: 1
  misc_feature: MA Experiment 20001247 PARAMETER Experiment Name: At_Far-red-induction_P Parameter: Tissue Value: Whole Plant
aaagtccaccactagctcgaactctctcctctcttaaacttatagacaagaatcaatcagtcacacgtctataccacgatttgctcacaaaatctttggcttccaccaaagattataagcagagatcattcacttactcgtatcaatagatcaaatcttcatcacaatagaagaaatggttttagagacggtttcaaagacggaaccaccaccgttgcttggacctcgtatctccttctcatctgatttatctgacggtggagatttcatctgcatcacccccgtaatgtgtaaggaagatgtcgtcaaagggtcagtgaaagtctccgactttgagttcttgtcgtcggaaaatgtgagtccacagagaatgcttaccgccgatgaactcttctccgaaggtaaattgcttcctttttggcaagtaaagcactcagagaagcttaaaaacattactttgaagacgaacgaagaggaagaagcagagaaacgtaaagtggaagtgaagaagaaagatcaggagattaacaatagagataacagagtgacttggtttatagacgaagatccgtctcctcgtcctcccaagtgtaccgttctttggaaagagcttttgagattgaagaaacagaggaatccgtcttcttcgccggtgacggcgaggacagtgtcgtctttgtctccgtcgtcgtccacgtcatcatcaagttcacttgaggacgcagcgaagagagaggagaaagagaaagaagggaagagaggtaagaaaggattagagagaacgagatcggcgagtatgaggataaggccaatgattcatgttcctatttgcactccttctaaatcctctcttcctttgcctcctctgtttcctctttcgcttaagaaaaacagagtagagagacgcgcctagaagatttgatctatctttggattgaaaaaaacaattattggttgaatttgttcagattctcaagtgttaactcatgtggtctaatgcatgtggttaagtgatgtttttcagatgtattatgtgtatgctttatggcttgagatttaatgtgtgacagtgttaagaaattctagtaagaaccgttcctctgttcttc

SEQ ID NO: 100028 - protein, 245 aa, Arabidopsis thaliana; identical to SEQ ID NO: 28199
  peptide (1)..(245): Ceres Seq. ID no. 13604135
  misc_feature (1)..(245): Homolog of NCBI NO: 18397426 NR Description: expressed protein [Arabidopsis thaliana] unknown protein [Arabidopsis thaliana]
  misc_feature (1)..(243): Homolog of NCBI NO: 30687257 NR Description: expressed protein [Arabidopsis thaliana]
  misc_feature (50)..(236): Homolog of NCBI NO: 27311593 NR Description: unknown protein [Arabidopsis thaliana]

SEQ ID NO: 100029 - protein, 208 aa, Arabidopsis thaliana; identical to SEQ ID NO: 28200
  peptide (1)..(208): Ceres Seq. ID no. 13604136
  misc_feature (1)..(208): Homolog of NCBI NO: 18397426 NR Description: expressed protein [Arabidopsis thaliana] unknown protein [Arabidopsis thaliana]
  misc_feature (1)..(206): Homolog of NCBI NO: 30687257 NR Description: expressed protein [Arabidopsis thaliana]
  misc_feature (13)..(199): Homolog of NCBI NO: 27311593 NR Description: unknown protein [Arabidopsis thaliana]

SEQ ID NO: 100030 - protein, 180 aa, Arabidopsis thaliana; identical to SEQ ID NO: 28201
  peptide (1)..(180): Ceres Seq. ID no. 13604137
  misc_feature (1)..(180): Homolog of NCBI NO: 18397426 NR Description: expressed protein [Arabidopsis thaliana] unknown protein [Arabidopsis thaliana]
  misc_feature (1)..(178): Homolog of NCBI NO: 30687257 NR Description: expressed protein [Arabidopsis thaliana]
  misc_feature (1)..(171): Homolog of NCBI NO: 27311593 NR Description: unknown protein [Arabidopsis thaliana]

SEQ ID NO: 100031 - DNA, 1086 bp, Arabidopsis thaliana
  misc_feature (1)..(1086): Ceres Seq. ID no. 13604138
  misc_feature: MA Experiment ID: 108501 Result: Down-regulated in Transcription
  misc_feature: MA Experiment 108501 PARAMETER Experiment Name: At_ap2_floral_buds_cDNA_P Parameter: Plant Line Value: ap2 (Ler.)
  misc_feature: MA Experiment 108501 PARAMETER Experiment Name: At_ap2_floral_buds_cDNA_P Parameter: Tissue Value: Closed Flower
  misc_feature: MA Experiment ID: 20001451 Result: Up-regulated in Transcription
  misc_feature: MA Experiment 20001451 PARAMETER Experiment Name: At_Far-red-induction_P Parameter: Age (day) Value: 7
  misc_feature: MA Experiment 20001451 PARAMETER Experiment Name: At_Far-red-induction_P Parameter: Light Value: Far-red vs. White
  misc_feature: MA Experiment 20001451 PARAMETER Experiment Name: At_Far-red-induction_P Parameter: Organism Value: A. thaliana
  misc_feature: MA Experiment 20001451 PARAMETER Experiment Name: At_Far-red-induction_P Parameter: Plant Line Value: Columbia
  misc_feature: MA Experiment 20001451 PARAMETER Experiment Name: At_Far-red-induction_P Parameter: Timepoint (hr) Value: 24
  misc_feature: MA Experiment 20001451 PARAMETER Experiment Name: At_Far-red-induction_P Parameter: Tissue Value: Whole Plant
  misc_feature: MA Experiment ID: 20001910 Result: Down-regulated in Transcription
  misc_feature: MA Experiment 20001910 PARAMETER Experiment Name: At_Drought_Reproduction_P Parameter: Age (day) Value: 37
  misc_feature: MA Experiment 20001910 PARAMETER Experiment Name: At_Drought_Reproduction_P Parameter: Organism Value: A. thaliana
  misc_feature: MA Experiment 20001910 PARAMETER Experiment Name: At_Drought_Reproduction_P Parameter: Plant Line Value: WS
  misc_feature: MA Experiment 20001910 PARAMETER Experiment Name: At_Drought_Reproduction_P Parameter: Timepoint (day) Value: 7
  misc_feature: MA Experiment 20001910 PARAMETER Experiment Name: At_Drought_Reproduction_P Parameter: Tissue Value: Flowers
  misc_feature: MA Experiment 20001910 PARAMETER Experiment Name: At_Drought_Reproduction_P Parameter: Treatment Value: Drought vs. No Drought
tcctcagttcttgatcactatatcttgaaggaattaagaagatgaatggtgaggcacggtcaagagtagtcgaccaagaagctggctcaactccatctactttgagagatgaagatcatccctcgagacaaaggcttttcggatgtctcccttatgatatagatctcaatcccctacgcattgtaatggcggaattggtggggacattcattctaatgttcagtgtgtgtggggtcataagcagtacccaattatccggcggccacgtgggattgctagagtacgccgtcaccgctggattatctgtggtggtcgtagtttactccatcggacacatctctggcgcccatcttaacccttccatcaccattgctttcgctgtctttggcggattcccgtggtctcaggttccgttgtatataacggcgcaaacattgggggcaacggcggcaacattagttggggtgtcagtgtacggagtaaacgctgacattatggcaacaaaacctgctttaagctgcgtttctgcatttttcgttgaactcatagctacgagcatcgtcgtgtttctcgcctccgcgttgcattgtggtcctcatcaaaatttgggtaatttgacggggttcgtgattggaacagtcatttcccttggagtgcttattaccggaccgatttcaggaggatcgatgaacccagctcgatcacttggaccggcggtggtggcatgggattttgaagacttatggatttacatgacagctccggtgatcggagccataatcggagttttgacatacagatcaattagcctaaaaaccaggccttgcccttctccagtttccccttccgtttcttcacttttacgttaatcacttcaaaacctaatatctattatacaaataaacacttttgattttttttcttggttaaggtttttaagtttttgtcattacgtcattagatgccgtgatgcgaaaacagagagctacttatcggattgaagatatagagggtaaagcaaatgaaaacagggggcattttgttctttttacacaatgaaatgaacgcaattaaaaatctttagtc

SEQ ID NO: 100032 - protein, 275 aa, Arabidopsis thaliana
  peptide (1)..(275): Ceres Seq. ID no. 13604139
  misc_feature (39)..(252): Pfam Name: Major intrinsic protein Pfam Description: Major intrinsic protein
  misc_feature (1)..(275): Homolog of NCBI NO: 18397472 NR Description: major intrinsic protein (MIP) family [Arabidopsis
  misc_feature (1)..(275): Homolog of NCBI NO: 32363339 NR Description: Probable aquaporin NIP7.1 (NOD26-like intrinsic
  misc_feature (1)..(275): Homolog of NCBI NO: 6862914 NR Description: putative major intrinsic protein [Arabidopsis
  misc_feature (34)..(275): Homolog of NCBI NO: 13447785 NR Description: NOD26-like membrane integral protein ZmNIP1-1
  misc_feature (45)..(261): Homolog of NCBI NO: 9971217 NR Description: MIP [Adiantum capillus-veneris]
  misc_feature (34)..(261): Homolog of NCBI NO: 1076748 NR Description: major intrinsic protein - rice
  misc_feature (42)..(255): Homolog of NCBI NO: 15777893 NR Description: early embryogenesis aquaglyceroporin [Pinus taeda]
  misc_feature (48)..(261): Homolog of NCBI NO: 15240347 NR Description: major intrinsic protein (MIP) family [Arabidopsis
  misc_feature (50)..(265): Homolog of NCBI NO: 37536006 NR Description: putative nodulin-26 [Oryza sativa (japonica
  misc_feature (11)..(261): Homolog of NCBI NO: 21536953 NR Description: major intrinsic protein (MIP)- like [Arabidopsis
MNGEARSRVVDQEAGSTPSTLRDEDHPSRQRLFGCLPYDIDLNPLRIVMAELVGTFILMFSVCGVISSTQLSGGHVGLLEYAVTAGLSVVVVVYSIGHISGAHLNPSITIAFAVFGGFPWSQVPLYITAQTLGATAATLVGVSVYGVNADIMATKPALSCVSAFFVELIATSIVVFLASALHCGPHQNLGNLTGFVIGTVISLGVLITGPISGGSMNPARSLGPAVVAWDFEDLWIYMTAPVIGAIIGVLTYRSISLKTRPCPSPVSPSVSSLLR

SEQ ID NO: 100033 - protein, 227 aa, Arabidopsis thaliana
  peptide (1)..(227): Ceres Seq. ID no. 13604140
  misc_feature (1)..(204): Pfam Name: Major intrinsic protein Pfam Description: Major intrinsic protein
  misc_feature (1)..(227): Homolog of NCBI NO: 18397472 NR Description: major intrinsic protein (MIP) family [Arabidopsis
  misc_feature (1)..(227): Homolog of NCBI NO: 32363339 NR Description: Probable aquaporin NIP7.1 (NOD26-like intrinsic
  misc_feature (1)..(227): Homolog of NCBI NO: 6862914 NR Description: putative major intrinsic protein [Arabidopsis
  misc_feature (1)..(227): Homolog of NCBI NO: 13447785 NR Description: NOD26-like membrane integral protein ZmNIP1-1
  misc_feature (1)..(213): Homolog of NCBI NO: 9971217 NR Description: MIP [Adiantum capillus-veneris]
  misc_feature (1)..(213): Homolog of NCBI NO: 1076748 NR Description: major intrinsic protein - rice
  misc_feature (1)..(207): Homolog of NCBI NO: 15777893 NR Description: early embryogenesis aquaglyceroporin [Pinus taeda]
  misc_feature (1)..(213): Homolog of NCBI NO: 15240347 NR Description: major intrinsic protein (MIP) family [Arabidopsis
  misc_feature (2)..(217): Homolog of NCBI NO: 37536006 NR Description: putative nodulin-26 [Oryza sativa (japonica
  misc_feature (1)..(213): Homolog of NCBI NO: 21536953 NR Description: major intrinsic protein (MIP)- like [Arabidopsis
MAELVGTFILMFSVCGVISSTQLSGGHVGLLEYAVTAGLSVVVVVYSIGHISGAHLNPSITIAFAVFGGFPWSQVPLYITAQTLGATAATLVGVSVYGVNADIMATKPALSCVSAFFVELIATSIVVFLASALHCGPHQNLGNLTGFVIGTVISLGVLITGPISGGSMNPARSLGPAVVAWDFEDLWIYMTAPVIGAIIGVLTYRSISLKTRPCPSPVSPSVSSLLR

SEQ ID NO: 100034 - protein, 217 aa, Arabidopsis thaliana
  peptide (1)..(217): Ceres Seq. ID no. 13604141
  misc_feature (1)..(194): Pfam Name: Major intrinsic protein Pfam Description: Major intrinsic protein
  misc_feature (1)..(217): Homolog of NCBI NO: 18397472 NR Description: major intrinsic protein (MIP) family [Arabidopsis
  misc_feature (1)..(217): Homolog of NCBI NO: 32363339 NR Description: Probable aquaporin NIP7.1 (NOD26-like intrinsic
  misc_feature (1)..(217): Homolog of NCBI NO: 6862914 NR Description: putative major intrinsic protein [Arabidopsis
  misc_feature (1)..(217): Homolog of NCBI NO: 13447785 NR Description: NOD26-like membrane integral protein ZmNIP1-1
  misc_feature (1)..(203): Homolog of NCBI NO: 9971217 NR Description: MIP [Adiantum capillus-veneris]
  misc_feature (1)..(203): Homolog of NCBI NO: 1076748 NR Description: major intrinsic protein - rice
  misc_feature (1)..(197): Homolog of NCBI NO: 15777893 NR Description: early embryogenesis aquaglyceroporin [Pinus taeda]
  misc_feature (1)..(203): Homolog of NCBI NO: 15240347 NR Description: major intrinsic protein (MIP) family [Arabidopsis
  misc_feature (1)..(207): Homolog of NCBI NO: 37536006 NR Description: putative nodulin-26 [Oryza sativa (japonica
  misc_feature (1)..(203): Homolog of NCBI NO: 21536953 NR Description: major intrinsic protein (MIP)- like [Arabidopsis
MFSVCGVISSTQLSGGHVGLLEYAVTAGLSVVVVVYSIGHISGAHLNPSITIAFAVFGGFPWSQVPLYITAQTLGATAATLVGVSVYGVNADIMATKPALSCVSAFFVELIATSIVVFLASALHCGPHQNLGNLTGFVIGTVISLGVLITGPISGGSMNPARSLGPAVVAWDFEDLWIYMTAPVIGAIIGVLTYRSISLKTRPCPSPVSPSVSSLLR

SEQ ID NO: 100035 - DNA, 1409 bp, Arabidopsis thaliana
  misc_feature (1)..(1409): Ceres Seq. ID no. 13604142
  misc_feature: MA Experiment ID: 108434 Result: Down-regulated in Transcription
  misc_feature: MA Experiment 108434 PARAMETER Experiment Name: At_Root_Tips_cDNA_P Parameter: Tissue Value: Root Tips
  misc_feature: MA Experiment ID: 108463 Result: Up-regulated in Transcription
  misc_feature: MA Experiment 108463 PARAMETER Experiment Name: At_Germinating_Seeds_cDNA_P Parameter: Age (day) Value: 3 vs. 0
  misc_feature: MA Experiment 108463 PARAMETER Experiment Name: At_Germinating_Seeds_cDNA_P Parameter: Tissue Value: Germinating Seeds
  misc_feature: MA Experiment ID: 108501 Result: Down-regulated in Transcription
  misc_feature: MA Experiment 108501 PARAMETER Experiment Name: At_ap2_floral_buds_cDNA_P Parameter: Plant Line Value: ap2 (Ler.)
  misc_feature: MA Experiment 108501 PARAMETER Experiment Name: At_ap2_floral_buds_cDNA_P Parameter: Tissue Value: Closed Flower
  misc_feature: MA Experiment ID: 20000070 Result: Up-regulated in Transcription
  misc_feature: MA Experiment 20000070 PARAMETER Experiment Name: At_100uM_ABA_Mutants_cDNA_P Parameter: Plant Line Value: CS24
  misc_feature: MA Experiment 20000070 PARAMETER Experiment Name: At_100uM_ABA_Mutants_cDNA_P Parameter: Timepoint (hr) Value: 6
  misc_feature: MA Experiment 20000070 PARAMETER Experiment Name: At_100uM_ABA_Mutants_cDNA_P Parameter: Tissue Value: Aerial
  misc_feature: MA Experiment 20000070 PARAMETER Experiment Name: At_100uM_ABA_Mutants_cDNA_P Parameter: Treatment Value: 100uM ABA vs. No Treatment
  misc_feature: MA Experiment ID: 20000087 Result: Up-regulated in Transcription
  misc_feature: MA Experiment 20000087 PARAMETER Experiment Name: At_100uM_ABA_Mutants_cDNA_P Parameter: Plant Line Value: WS
  misc_feature: MA Experiment 20000087 PARAMETER Experiment Name: At_100uM_ABA_Mutants_cDNA_P Parameter: Timepoint (hr) Value: 6
  misc_feature: MA Experiment 20000087 PARAMETER Experiment Name: At_100uM_ABA_Mutants_cDNA_P Parameter: Tissue Value: Aerial
  misc_feature: MA Experiment 20000087 PARAMETER Experiment Name: At_100uM_ABA_Mutants_cDNA_P Parameter: Treatment Value: 100uM ABA vs. No Treatment
  misc_feature: MA Experiment ID: 20000117 Result: Up-regulated in Transcription
  misc_feature: MA Experiment 20000117 PARAMETER Experiment Name: At_100uM_ABA_Mutants_cDNA_P Parameter: Plant Line Value: Columbia
  misc_feature: MA Experiment 20000117 PARAMETER Experiment Name: At_100uM_ABA_Mutants_cDNA_P Parameter: Timepoint (hr) Value: 6
  misc_feature: MA Experiment 20000117 PARAMETER Experiment Name: At_100uM_ABA_Mutants_cDNA_P Parameter: Tissue Value: Aerial
  misc_feature: MA Experiment 20000117 PARAMETER Experiment Name: At_100uM_ABA_Mutants_cDNA_P Parameter: Treatment Value: 100uM ABA vs. No Treatment
  misc_feature: MA Experiment ID: 20000180 Result: Up-regulated in Transcription
  misc_feature: MA Experiment 20000180 PARAMETER Experiment Name: At_Germinating_Seeds_P Parameter: Age (hr) Value: 24 vs. 0
  misc_feature: MA Experiment 20000180 PARAMETER Experiment Name: At_Germinating_Seeds_P Parameter: Tissue Value: Germinating Seeds
  misc_feature: MA Experiment ID: 20000184 Result: Up-regulated in Transcription
  misc_feature: MA Experiment 20000184 PARAMETER Experiment Name: At_Shoots__P Parameter: Age (day) Value: 7
  misc_feature: MA Experiment 20000184 PARAMETER Experiment Name: At_Shoots__P Parameter: Tissue Value: Shoots vs. Whole Plant
tttcttcagtctctctgcttctcactgttgtgctttctgtcttgtctctgtctttcccattgtcattctctcaccaatgggaatctcctttagcaacaacaacagaagacgagacaacaataatcgtcgccacctccaccactatcctccgccgccgccttactattacctcgaccctcctcctcctcctccgccatttccaccgcattatgactataactactccaattaccatctctctccgcctctaccgccacagccacagatcaactcttgttcttacggccattaccattatcaccctcagcctcctcagtatttcaccaccgctcagcccaattggtggggcccaatgatgagaccggcgtactactgtccgcctcagccgcaaacgcaaccgcctaagccatacctggagcaacagaacgcgaagaaggtgaggaatgatgtcaatgtgcatagagatacagtgaggcttgaagtggacgatctcgttcctggtcaccatctagtttccttcgtcttcgatgctcttttcgacggcagtttcactatcaccttctttgcaaaggaggaaccaaattgcaccattatcccacagtttccagaggtttattcacccacaagattccattttcagaaaggtcctggacagaagtttctgcagccttcagggacaggaactgacctgagcttctttgttcttgatgatctgtctaaacccttagaagaagatgtgtatccgcttgtaatatcagctgagacgataatctctccaaattcaatctcagagcaatcatcagttcataagcaagtcacacaagcggttctcgagaaagataatgatggatctttcaaagtgaaagttgtgaagcagattctttggattgaaggagttcgatatgaactccgtgagttgtatggctcgaccactcaaggtgcagcctcgggcttagatgagagtggttcgggtacagaatgtgttatctgcatgactgaggctaaggacacggccgtgctgccttgcagacatttgtgcatgtgtagcgactgtgctaaagaattgaggcttcagtccaacaaatgtccgatttgtcgacaacccatcgaagagctcttagagatcaaaatgaacagtagtgatgaacaacactagtacaaaaaaggttctttctttacataaaacaccattcttgattctttcttcatttttctctgaaaccctccatatctgaatctgtatttccgctatcattgttgtgcaacttccttcattccgcatatagatttgtttgatctaatgctttgtatttgcaagatataagcatcatcagtacatgtatagataacttcctaacactctcaccaaactacttaatgtttgtaattgaatgcttttgttggtttgc

SEQ ID NO: 100036 - protein, 384 aa, Arabidopsis thaliana; identical to SEQ ID NO: 25526
  peptide (1)..(384): Ceres Seq. ID no. 13604143
  misc_feature (327)..(365): Pfam Name: Zinc finger, C3HC4 type (RING finger) Pfam Description: Zinc finger, C3HC4 type (RING finger)
  misc_feature (4)..(384): Homolog of NCBI NO: 6862918 NR Description: putative RING zinc finger protein [Arabidopsis
  misc_feature (26)..(384): Homolog of NCBI NO: 18397483 NR Description: RING zinc finger protein -related [Arabidopsis >gi|21593638|gb|AAM65605.1| putative RING zinc finger protein
  misc_feature (26)..(384): Homolog of NCBI NO: 15239642 NR Description: expressed protein [Arabidopsis thaliana]
  misc_feature (26)..(384): Homolog of NCBI NO: 21928149 NR Description: AT5g19080/T16G12_120 [Arabidopsis thaliana]
  misc_feature (48)..(383): Homolog of NCBI NO: 37532246 NR Description: putative hydroxyproline-rich glycoprotein [Oryza
  misc_feature (29)..(381): Homolog of NCBI NO: 18398633 NR Description: putative RING zinc finger protein [Arabidopsis >gi|6681341|gb|AAF23258.1|AC015985_16 putative RING zinc finger [Arabidopsis thaliana] >gi|6682260|gb|AAF23312.1|AC016661_37
  misc_feature (100)..(381): Homolog of NCBI NO: 15231808 NR Description: expressed protein [Arabidopsis thaliana]
  misc_feature (50)..(378): Homolog of NCBI NO: 26449588 NR Description: unknown protein [Arabidopsis thaliana]
  misc_feature (50)..(378): Homolog of NCBI NO: 21618140 NR Description: putative RING zinc finger protein [Arabidopsis
  misc_feature (50)..(378): Homolog of NCBI NO: 15242675 NR Description: expressed protein [Arabidopsis thaliana]

SEQ ID NO: 100037 - protein, 359 aa, Arabidopsis thaliana; identical to SEQ ID NO: 25527
  peptide (1)..(359): Ceres Seq. ID no. 13604144
  misc_feature (302)..(340): Pfam Name: Zinc finger, C3HC4 type (RING finger) Pfam Description: Zinc finger, C3HC4 type (RING finger)
  misc_feature (1)..(359): Homolog of NCBI NO: 6862918 NR Description: putative RING zinc finger protein [Arabidopsis
  misc_feature (1)..(359): Homolog of NCBI NO: 18397483 NR Description: RING zinc finger protein -related [Arabidopsis >gi|21593638|gb|AAM65605.1| putative RING zinc finger protein
  misc_feature (1)..(359): Homolog of NCBI NO: 15239642 NR Description: expressed protein [Arabidopsis thaliana]
  misc_feature (1)..(359): Homolog of NCBI NO: 21928149 NR Description: AT5g19080/T16G12_120 [Arabidopsis thaliana]
  misc_feature (23)..(358): Homolog of NCBI NO: 37532246 NR Description: putative hydroxyproline-rich glycoprotein [Oryza
  misc_feature (4)..(356): Homolog of NCBI NO: 18398633 NR Description: putative RING zinc finger protein [Arabidopsis >gi|6681341|gb|AAF23258.1|AC015985_16 putative RING zinc finger [Arabidopsis thaliana] >gi|6682260|gb|AAF23312.1|AC016661_37
  misc_feature (75)..(356): Homolog of NCBI NO: 15231808 NR Description: expressed protein [Arabidopsis thaliana]
  misc_feature (25)..(353): Homolog of NCBI NO: 26449588 NR Description: unknown protein [Arabidopsis thaliana]
  misc_feature (25)..(353): Homolog of NCBI NO: 21618140 NR Description: putative RING zinc finger protein [Arabidopsis
  misc_feature (25)..(353): Homolog of NCBI NO: 15242675 NR Description: expressed protein [Arabidopsis thaliana]

SEQ ID NO: 100038 - protein, 267 aa, Arabidopsis thaliana; identical to SEQ ID NO: 25528
  peptide (1)..(267): Ceres Seq. ID no. 13604145
  misc_feature (210)..(248): Pfam Name: Zinc finger, C3HC4 type (RING finger) Pfam Description: Zinc finger, C3HC4 type (RING finger)
  misc_feature (1)..(267): Homolog of NCBI NO: 6862918 NR Description: putative RING zinc finger protein [Arabidopsis
  misc_feature (1)..(267): Homolog of NCBI NO: 18397483 NR Description: RING zinc finger protein -related [Arabidopsis >gi|21593638|gb|AAM65605.1| putative RING zinc finger protein
  misc_feature (1)..(267): Homolog of NCBI NO: 15239642 NR Description: expressed protein [Arabidopsis thaliana]
  misc_feature (1)..(267): Homolog of NCBI NO: 21928149 NR Description: AT5g19080/T16G12_120 [Arabidopsis thaliana]
  misc_feature (1)..(266): Homolog of NCBI NO: 37532246 NR Description: putative hydroxyproline-rich glycoprotein [Oryza
  misc_feature (1)..(264): Homolog of NCBI NO: 18398633 NR Description: putative RING zinc finger protein [Arabidopsis >gi|6681341|gb|AAF23258.1|AC015985_16 putative RING zinc finger [Arabidopsis thaliana] >gi|6682260|gb|AAF23312.1|AC016661_37
  misc_feature (1)..(264): Homolog of NCBI NO: 15231808 NR Description: expressed protein [Arabidopsis thaliana]
  misc_feature (1)..(261): Homolog of NCBI NO: 26449588 NR Description: unknown protein [Arabidopsis thaliana]
  misc_feature (1)..(261): Homolog of NCBI NO: 21618140 NR Description: putative RING zinc finger protein [Arabidopsis
  misc_feature (1)..(261): Homolog of NCBI NO: 15242675 NR Description: expressed protein [Arabidopsis thaliana]

SEQ ID NO: 100039 - DNA, 1838 bp, Arabidopsis thaliana
  misc_feature (1)..(1838): Ceres Seq. ID no. 13604150
  misc_feature: MA Experiment ID: 108573 Result: Up-regulated in Transcription
  misc_feature: MA Experiment 108573 PARAMETER Experiment Name: At_Drought_cDNA_P Parameter: Timepoint (hr) Value: 6
  misc_feature: MA Experiment 108573 PARAMETER Experiment Name: At_Drought_cDNA_P Parameter: Tissue Value: Aerial
  misc_feature: MA Experiment 108573 PARAMETER Experiment Name: At_Drought_cDNA_P Parameter: Treatment Value: Drought vs. No Drought
  misc_feature: MA Experiment ID: 108585 Result: Up-regulated in Transcription
  misc_feature: MA Experiment 108585 PARAMETER Experiment Name: At_5mM_NaNP_cDNA_P Parameter: Timepoint (hr) Value: 6
  misc_feature: MA Experiment 108585 PARAMETER Experiment Name: At_5mM_NaNP_cDNA_P Parameter: Tissue Value: Aerial
  misc_feature: MA Experiment 108585 PARAMETER Experiment Name: At_5mM_NaNP_cDNA_P Parameter: Treatment Value: null
  misc_feature: MA Experiment ID: 20000111 Result: Up-regulated in Transcription
  misc_feature: MA Experiment 20000111 PARAMETER Experiment Name: At_42deg_Heat_cDNA_P Parameter: Temperature (deg C) Value: 42 vs. 22
  misc_feature: MA Experiment 20000111 PARAMETER Experiment Name: At_42deg_Heat_cDNA_P Parameter: Timepoint (hr) Value: 6
  misc_feature: MA Experiment 20000111 PARAMETER Experiment Name: At_42deg_Heat_cDNA_P Parameter: Tissue Value: Aerial
  misc_feature: MA Experiment ID: 20000180 Result: Down-regulated in Transcription
  misc_feature: MA Experiment 20000180 PARAMETER Experiment Name: At_Germinating_Seeds_P Parameter: Age (hr) Value: 24 vs. 0
  misc_feature: MA Experiment 20000180 PARAMETER Experiment Name: At_Germinating_Seeds_P Parameter: Tissue Value: Germinating Seeds
  misc_feature: MA Experiment ID: 20000224 Result: Down-regulated in Transcription
  misc_feature: MA Experiment ID: 20001248 Result: Up-regulated in Transcription
  misc_feature: MA Experiment 20001248 PARAMETER Experiment Name: At_Far-red-induction_P Parameter: Age (day) Value: 7
  misc_feature: MA Experiment 20001248 PARAMETER Experiment Name: At_Far-red-induction_P Parameter: Light Value: Far-red vs. White
  misc_feature: MA Experiment 20001248 PARAMETER Experiment Name: At_Far-red-induction_P Parameter: Organism Value: A. thaliana
  misc_feature: MA Experiment 20001248 PARAMETER Experiment Name: At_Far-red-induction_P Parameter: Plant Line Value: Columbia
  misc_feature: MA Experiment 20001248 PARAMETER Experiment Name: At_Far-red-induction_P Parameter: Timepoint (hr) Value: 4
  misc_feature: MA Experiment 20001248 PARAMETER Experiment Name: At_Far-red-induction_P Parameter: Tissue Value: Whole Plant
  misc_feature: MA Experiment ID: 20001450 Result: Up-regulated in Transcription
  misc_feature: MA Experiment 20001450 PARAMETER Experiment Name: At_Far-red-induction_P Parameter: Age (day) Value: 7
  misc_feature: MA Experiment 20001450 PARAMETER Experiment Name: At_Far-red-induction_P Parameter: Light Value: Far-red vs. White
  misc_feature: MA Experiment 20001450 PARAMETER Experiment Name: At_Far-red-induction_P Parameter: Organism Value: A. thaliana
  misc_feature: MA Experiment 20001450 PARAMETER Experiment Name: At_Far-red-induction_P Parameter: Plant Line Value: Columbia
  misc_feature: MA Experiment 20001450 PARAMETER Experiment Name: At_Far-red-induction_P Parameter: Timepoint (hr) Value: 8
  misc_feature: MA Experiment 20001450 PARAMETER Experiment Name: At_Far-red-induction_P Parameter: Tissue Value: Whole Plant
  misc_feature: MA Experiment ID: 20001451 Result: Up-regulated in Transcription
  misc_feature: MA Experiment 20001451 PARAMETER Experiment Name: At_Far-red-induction_P Parameter: Age (day) Value: 7
  misc_feature: MA Experiment 20001451 PARAMETER Experiment Name: At_Far-red-induction_P Parameter: Light Value: Far-red vs. White
  misc_feature: MA Experiment 20001451 PARAMETER Experiment Name: At_Far-red-induction_P Parameter: Organism Value: A. thaliana
  misc_feature: MA Experiment 20001451 PARAMETER Experiment Name: At_Far-red-induction_P Parameter: Plant Line Value: Columbia
  misc_feature: MA Experiment 20001451 PARAMETER Experiment Name: At_Far-red-induction_P Parameter: Timepoint (hr) Value: 24
  misc_feature: MA Experiment 20001451 PARAMETER Experiment Name: At_Far-red-induction_P Parameter: Tissue Value: Whole Plant
  misc_feature: MA Experiment ID: 20001911 Result: Up-regulated in Transcription
  misc_feature: MA Experiment 20001911 PARAMETER Experiment Name: At_Drought_Reproduction_P Parameter: Age (day) Value: 40
  misc_feature: MA Experiment 20001911 PARAMETER Experiment Name: At_Drought_Reproduction_P Parameter: Organism Value: A. thaliana
  misc_feature: MA Experiment 20001911 PARAMETER Experiment Name: At_Drought_Reproduction_P Parameter: Plant Line Value: WS
  misc_feature: MA Experiment 20001911 PARAMETER Experiment Name: At_Drought_Reproduction_P Parameter: Timepoint (day) Value: 10
  misc_feature: MA Experiment 20001911 PARAMETER Experiment Name: At_Drought_Reproduction_P Parameter: Tissue Value: Flowers
  misc_feature: MA Experiment 20001911 PARAMETER Experiment Name: At_Drought_Reproduction_P Parameter: Treatment Value: Drought vs. No Drought
aaaacttaaaccgatctatcaagcaagtggttcctctctctctctacctctcgtttttggccaacgtcgtcgtcttcacgatccacgacgattcagttcttgagttccggcgattatcggtctctcacttctggttccgttgaacccctcatttctcttctcgcccgtgctctcaaattccgatatttgcccctgtgattcgaaaccctaatttcgcctatcaatctggaaaatctctcaattcgaagactttagcagcgcaaagatactctatccgggtaataagatcgaagaaaccatcaatttcttaccaaagtcgtgattcttggatctcgtctttgtttgatggacacaattagggtttccaaggaggttcctggatcttcgaaatcgaccgcacagtcgctcacggagtcgacctctcgcacggaaaccatcaatggctcccacgaattcaagatcagcggctactctttggtcaaaggcatggggattggcaaatacgttgcctcggatactttcatggtcggtggatactcctgggccatctacttctacccagatggaaagagtccagaggataattctgtctacgtgtctctcttcatagcccttgcgagtgaaggagccgatgttagggctttgtttgagcttaccctcgtggatcagagcggtaacgaaaggcacaaagttcatagccattttggtagaactctcgaaagcggaccctatactcttaaatatcgagggagtatgtggggatacaaacgatttttcaagaggtctcttttggagtcatcggactatctgaaggacaatggtctcttggtccggtgttgtgttggagtggtgaagtcacgcacagaaggaccgaggtgttacaatatcccggtgccggtttctggcttgggtcagcagtttggaaagcttttggaaagtgggaaaggagctgacgttactttcgaagttgatggagaaacatttcctgctcacaaattggttcttgcagcacgttctgcagttttcagggcacagctttttggcccgttgagaagtgaaaataccaattgtataatcatagaagacgtacaagcccctattttcaagatgttgcttcattttatctactgggatgaaatgcctgatatgcaagacttaatcggcacagacttgaaatgggcatcaactcttgtggctcagcatctgcttgcagctgcagaccgttatgctcttgagcggcttagaacaatatgcgagtcaaaactctgtgaaggaatcagcataaatacggtagcaaccaccttggctcttgcagagcagcatcattgtttccagctgaaagccgcctgcctcaaatttatagctttgccagaaaacctgaaagctgtgatggaaacggatgggtttgattatctgaaggaaagctgcccgtccctactaagtgagctattggagtatgtggctaggctgagtgagcactctttaacatcatcagggcatcgaaaggagttatttgctgatggttgtgacttaaatgggagacgtgtgaagcaacggttacattagcaactaattgagagagagagagagagagaggtcacttcgagagcctgagaagatgatggtgaagtaaacagaattttagaagagtaaagatttgtgtatttgtcattgtaaaaggattagtggttgatctgtgttgttcagctagctaatagagtgaaatgttgggtttttttcttttcttttctcttttgttttcccaggattttatgaccagaaccggttctctcaaggaaaaagtttcatgtgacttcattgataaatttggacttgcc

SEQ ID NO: 100040 - protein, 406 aa, Arabidopsis thaliana; identical to SEQ ID NO: 40291
  peptide (1)..(406): Ceres Seq. ID no. 13604151
  misc_feature (192)..(311): Pfam Name: BTB/POZ domain Pfam Description: BTB/POZ domain
  misc_feature (1)..(406): Homolog of NCBI NO: 18397497 NR Description: expressed protein [Arabidopsis thaliana] unknown protein [Arabidopsis thaliana] unknown protein [Arabidopsis thaliana]
  misc_feature (1)..(406): Homolog of NCBI NO: 22531225 NR Description: putative protein [Arabidopsis thaliana]
  misc_feature (7)..(405): Homolog of NCBI NO: 23617108 NR Description: contains ESTs to Arabidopsis thaliana chromosome 5, At5g19000~unknown protein
  misc_feature (24)..(387): Homolog of NCBI NO: 34394164 NR Description: putative speckle-type POZ protein [Oryza sativa
  misc_feature (24)..(404): Homolog of NCBI NO: 21595740 NR Description: unknown [Arabidopsis thaliana]
  misc_feature (24)..(404): Homolog of NCBI NO: 18405153 NR Description: expressed protein [Arabidopsis thaliana]
  misc_feature (14)..(404): Homolog of NCBI NO: 34900034 NR Description: OJ1641_C04.24 [Oryza sativa (japonica >gi|22202734|dbj|BAC07391.1| putative zinc finger POZ domain
  misc_feature (1)..(373): Homolog of NCBI NO: 15239625 NR Description: expressed protein [Arabidopsis thaliana]
  misc_feature (22)..(402): Homolog of NCBI NO: 21536509 NR Description: unknown [Arabidopsis thaliana]
  misc_feature (22)..(402): Homolog of NCBI NO: 30678912 NR Description: expressed protein [Arabidopsis thaliana] unknown protein [Arabidopsis thaliana] AT3g03740/F20H23_23 [Arabidopsis thaliana]

SEQ ID NO: 100041 - protein, 359 aa, Arabidopsis thaliana; identical to SEQ ID NO: 40292
  peptide (1)..(359): Ceres Seq. ID no. 13604152
  misc_feature (145)..(264): Pfam Name: BTB/POZ domain Pfam Description: BTB/POZ domain
  misc_feature (1)..(359): Homolog of NCBI NO: 18397497 NR Description: expressed protein [Arabidopsis thaliana] unknown protein [Arabidopsis thaliana] unknown protein [Arabidopsis thaliana]
  misc_feature (1)..(359): Homolog of NCBI NO: 22531225 NR Description: putative protein [Arabidopsis thaliana]
  misc_feature (1)..(358): Homolog of NCBI NO: 23617108 NR Description: contains ESTs to Arabidopsis thaliana chromosome 5, At5g19000~unknown protein
  misc_feature (1)..(340): Homolog of NCBI NO: 34394164 NR Description: putative speckle-type POZ protein [Oryza sativa
  misc_feature (1)..(357): Homolog of NCBI NO: 21595740 NR Description: unknown [Arabidopsis thaliana]
  misc_feature (1)..(357): Homolog of NCBI NO: 18405153 NR Description: expressed protein [Arabidopsis thaliana]
  misc_feature (1)..(357): Homolog of NCBI NO: 34900034 NR Description: OJ1641_C04.24 [Oryza sativa (japonica >gi|22202734|dbj|BAC07391.1| putative zinc finger POZ domain
  misc_feature (1)..(326): Homolog of NCBI NO: 15239625 NR Description: expressed protein [Arabidopsis thaliana]
  misc_feature (1)..(355): Homolog of NCBI NO: 21536509 NR Description: unknown [Arabidopsis thaliana]
  misc_feature (1)..(355): Homolog of NCBI NO: 30678912 NR Description: expressed protein [Arabidopsis thaliana] unknown protein [Arabidopsis thaliana] AT3g03740/F20H23_23 [Arabidopsis thaliana]

SEQ ID NO: 100042 - protein, 347 aa, Arabidopsis thaliana; identical to SEQ ID NO: 40293
  peptide (1)..(347): Ceres Seq. ID no. 13604153
  misc_feature (133)..(252): Pfam Name: BTB/POZ domain Pfam Description: BTB/POZ domain
  misc_feature (1)..(347): Homolog of NCBI NO: 18397497 NR Description: expressed protein [Arabidopsis thaliana] unknown protein [Arabidopsis thaliana] unknown protein [Arabidopsis thaliana]
  misc_feature (1)..(347): Homolog of NCBI NO: 22531225 NR Description: putative protein [Arabidopsis thaliana]
  misc_feature (1)..(346): Homolog of NCBI NO: 23617108 NR Description: contains ESTs to Arabidopsis thaliana chromosome 5, At5g19000~unknown protein
  misc_feature (1)..(328): Homolog of NCBI NO: 34394164 NR Description: putative speckle-type POZ protein [Oryza sativa
  misc_feature (1)..(345): Homolog of NCBI NO: 21595740 NR Description: unknown [Arabidopsis thaliana]
  misc_feature (1)..(345): Homolog of NCBI NO: 18405153 NR Description: expressed protein [Arabidopsis thaliana]
  misc_feature (1)..(345): Homolog of NCBI NO: 34900034 NR Description: OJ1641_C04.24 [Oryza sativa (japonica >gi|22202734|dbj|BAC07391.1| putative zinc finger POZ domain
  misc_feature (1)..(314): Homolog of NCBI NO: 15239625 NR Description: expressed protein [Arabidopsis thaliana]
  misc_feature (1)..(343): Homolog of NCBI NO: 21536509 NR Description: unknown [Arabidopsis thaliana]
  misc_feature (1)..(343): Homolog of NCBI NO: 30678912 NR Description: expressed protein [Arabidopsis thaliana] unknown protein [Arabidopsis thaliana] AT3g03740/F20H23_23 [Arabidopsis thaliana]

SEQ ID NO: 100043 - DNA, 1305 bp, Arabidopsis thaliana
  misc_feature (1)..(1305): Ceres Seq. ID no. 13604154
  misc_feature: MA Experiment ID: 108462 Result: Down-regulated in Transcription
  misc_feature: MA Experiment 108462 PARAMETER Experiment Name: At_Germinating_Seeds_cDNA_P Parameter: Age (day) Value: 2 vs. 0
  misc_feature: MA Experiment 108462 PARAMETER Experiment Name: At_Germinating_Seeds_cDNA_P Parameter: Tissue Value: Germinating Seeds
  misc_feature: MA Experiment ID: 108463 Result: Down-regulated in Transcription
  misc_feature: MA Experiment 108463 PARAMETER Experiment Name: At_Germinating_Seeds_cDNA_P Parameter: Age (day) Value: 3 vs. 0
  misc_feature: MA Experiment 108463 PARAMETER Experiment Name: At_Germinating_Seeds_cDNA_P Parameter: Tissue Value: Germinating Seeds
attttgaacaagtaaaccctagttgatatcgtgctaagctcttaagcgaagatacaggtcaaaatcgcggcaaagcatcggtggctcgagtgacccaatccactccaccaaacttctttgggaatcccaaaggttgctactttactcctcaaatgattcgcaagctctgttcttcattctctcgctccatcatcttccccaacaaacccatcttcatcccccgctcttttcctcaaccactccgtcactcttctgctctctcgtactcctccttgaaaatgaccgatacccatatcccaggaaaccctaattcgtcccctatccaatctcccaccaaacccgagtcgcttcgttccctcgaatttcaattgggttcttctttcaccgccgatccaatcatcccgccgccgaatcagatcgtcatcgttattagcggtccaagcggagttggtaaagacgcagtgatcaacaagcttcgtgaggttcgtgaaggtcttcattttgttgttaccgccactagtcgtccgatgcgacctggtgaagttgatggtaaagactatttctttgtctcgagagatcagttcttgtcaatggtggagaacgaagagcttcttgaatacgcacttgtttatggagaatacaaagggattccaaagaagcagattcaggaatttatggccaaaggggaagacattgttcttagagttgatattcaaggagctcagacgttaaggaggatacttggtaactctgctgtgtttatattccttgtggcggagagtgagcttgctatggtggagaggttgattgatcggaagacggagagtcaagaggagttgcttgttagagttgctacggcgagagaagaggttaggcatctaaagaactttgattacgttgtggtgaatgccaaagggaggcttgatgatgcggttaaccgcgtggaatcgattatcgatgctgagaaatctaaagttcatcaaaggattgtcaggatttgatgtgcagagatgccattgtctgtaacaacatattggcttgctgtctccagacacggatccatcgaagaccgagacaattttattatcggtatgtgcggcaacccattccaaccaaagatttagatgaatcctggcccctgactacagagaacccttttgattaagcatcgtatctttatacatagctacatggattatgttatcatcatacagtatgtgattcatactcgcattttgaattttgttactttataaatgtttatggagcattgttcataataatttaagtatcatctaacttttc

SEQ ID NO: 100044 - protein, 282 aa, Arabidopsis thaliana; identical to SEQ ID NO: 29001
  peptide (1)..(282): Ceres Seq. ID no. 13604155
  misc_feature (123)..(228): Pfam Name: Guanylate kinase Pfam Description: Guanylate kinase
  misc_feature (1)..(282): Homolog of NCBI NO: 18397500 NR Description: guanylate kinase -related [Arabidopsis thaliana] AT3g06200/F28L1_14 [Arabidopsis thaliana]
  misc_feature (43)..(282): Homolog of NCBI NO: 6862924 NR Description: putative guanylate kinase [Arabidopsis thaliana]
  misc_feature (85)..(282): Homolog of NCBI NO: 22969911 NR Description: hypothetical protein [Chloroflexus aurantiacus]
  misc_feature (89)..(275): Homolog of NCBI NO: 28210904 NR Description: guanylate kinase [Clostridium tetani E88]
  misc_feature (89)..(280): Homolog of NCBI NO: 15615075 NR Description: guanylate kinase [Bacillus halodurans]
  misc_feature (90)..(275): Homolog of NCBI NO: 15644437 NR Description: guanylate kinase [Thermotoga maritima]
  misc_feature (89)..(281): Homolog of NCBI NO: 15673881 NR Description: guanylate kinase [Lactococcus lactis subsp.
  misc_feature (89)..(275): Homolog of NCBI NO: 20807954 NR Description: Guanylate kinase [Thermoanaerobacter >gi|22095790|sp|Q8R9S6|KGUA_THETN Guanylate kinase (GMP kinase)
  misc_feature (89)..(279): Homolog of NCBI NO: 27467803 NR Description: guanylate kinase [Staphylococcus epidermidis ATCC >gi|27315347|gb|AAO04482.1|AE016746_272 guanylate kinase
  misc_feature (89)..(281): Homolog of NCBI NO: 23098957 NR Description: guanylate kinase [Oceanobacillus iheyensis >gi|22777185|dbj|BAC13458.1| guanylate kinase [Oceanobacillus

SEQ ID NO: 100045 - protein, 240 aa, Arabidopsis thaliana; identical to SEQ ID NO: 29002
  peptide (1)..(240): Ceres Seq. ID no. 13604156
  misc_feature (81)..(186): Pfam Name: Guanylate kinase Pfam Description: Guanylate kinase
  misc_feature (1)..(240): Homolog of NCBI NO: 18397500 NR Description: guanylate kinase -related [Arabidopsis thaliana] AT3g06200/F28L1_14 [Arabidopsis thaliana]
  misc_feature (1)..(240): Homolog of NCBI NO: 6862924 NR Description: putative guanylate kinase [Arabidopsis thaliana]
  misc_feature (43)..(240): Homolog of NCBI NO: 22969911 NR Description: hypothetical protein [Chloroflexus aurantiacus]
  misc_feature (47)..(233): Homolog of NCBI NO: 28210904 NR Description: guanylate kinase [Clostridium tetani E88]
  misc_feature (47)..(238): Homolog of NCBI NO: 15615075 NR Description: guanylate kinase [Bacillus halodurans]
  misc_feature (48)..(233): Homolog of NCBI NO: 15644437 NR Description: guanylate kinase [Thermotoga maritima]
  misc_feature (47)..(239): Homolog of NCBI NO: 15673881 NR Description: guanylate kinase [Lactococcus lactis subsp.
  misc_feature (47)..(233): Homolog of NCBI NO: 20807954 NR Description: Guanylate kinase [Thermoanaerobacter >gi|22095790|sp|Q8R9S6|KGUA_THETN Guanylate kinase (GMP kinase)
  misc_feature (47)..(237): Homolog of NCBI NO: 27467803 NR Description: guanylate kinase [Staphylococcus epidermidis ATCC >gi|27315347|gb|AAO04482.1|AE016746_272 guanylate kinase
  misc_feature (47)..(239): Homolog of NCBI NO: 23098957 NR Description: guanylate kinase [Oceanobacillus iheyensis >gi|22777185|dbj|BAC13458.1| guanylate kinase [Oceanobacillus

SEQ ID NO: 100046 - protein, 157 aa, Arabidopsis thaliana; identical to SEQ ID NO: 29003
  peptide (1)..(157): Ceres Seq. ID no. 13604157
  misc_feature (1)..(103): Pfam Name: Guanylate kinase Pfam Description: Guanylate kinase
  misc_feature (1)..(157): Homolog of NCBI NO: 18397500 NR Description: guanylate kinase -related [Arabidopsis thaliana] AT3g06200/F28L1_14 [Arabidopsis thaliana]
  misc_feature (1)..(157): Homolog of NCBI NO: 6862924 NR Description: putative guanylate kinase [Arabidopsis thaliana]
  misc_feature (1)..(157): Homolog of NCBI NO: 22969911 NR Description: hypothetical protein [Chloroflexus aurantiacus]
  misc_feature (1)..(150): Homolog of NCBI NO: 28210904 NR Description: guanylate kinase [Clostridium tetani E88]
  misc_feature (1)..(155): Homolog of NCBI NO: 15615075 NR Description: guanylate kinase [Bacillus halodurans]
  misc_feature (1)..(150): Homolog of NCBI NO: 15644437 NR Description: guanylate kinase [Thermotoga maritima]
  misc_feature (1)..(156): Homolog of NCBI NO: 15673881 NR Description: guanylate kinase [Lactococcus lactis subsp.
  misc_feature (1)..(150): Homolog of NCBI NO: 20807954 NR Description: Guanylate kinase [Thermoanaerobacter >gi|22095790|sp|Q8R9S6|KGUA_THETN Guanylate kinase (GMP kinase)
  misc_feature (1)..(154): Homolog of NCBI NO: 27467803 NR Description: guanylate kinase [Staphylococcus epidermidis ATCC >gi|27315347|gb|AAO04482.1|AE016746_272 guanylate kinase
  misc_feature (1)..(156): Homolog of NCBI NO: 23098957 NR Description: guanylate kinase [Oceanobacillus iheyensis >gi|22777185|dbj|BAC13458.1| guanylate kinase [Oceanobacillus

SEQ ID NO: 100047 - DNA, 1412 bp, Arabidopsis thaliana
  misc_feature (1)..(1412): Ceres Seq. ID no. 13604158
  misc_feature: MA Experiment ID: 108488 Result: Down-regulated in Transcription
  misc_feature: MA Experiment ID: 20000144 Result: Up-regulated in Transcription
  misc_feature: MA Experiment 20000144 PARAMETER Experiment Name: At_42deg_Heat_cDNA_P Parameter: Temperature (deg C) Value: 42 vs. 22
  misc_feature: MA Experiment 20000144 PARAMETER Experiment Name: At_42deg_Heat_cDNA_P Parameter: Timepoint (hr) Value: 1
  misc_feature: MA Experiment 20000144 PARAMETER Experiment Name: At_42deg_Heat_cDNA_P Parameter: Tissue Value: Aerial
  misc_feature: MA Experiment ID: 20001905 Result: Up-regulated in Transcription
  misc_feature: MA Experiment 20001905 PARAMETER Experiment Name: At_Drought_Reproduction_P Parameter: Age (day) Value: 40
  misc_feature: MA Experiment 20001905 PARAMETER Experiment Name: At_Drought_Reproduction_P Parameter: Organism Value: A. thaliana
  misc_feature: MA Experiment 20001905 PARAMETER Experiment Name: At_Drought_Reproduction_P Parameter: Plant Line Value: WS
  misc_feature: MA Experiment 20001905 PARAMETER Experiment Name: At_Drought_Reproduction_P Parameter: Timepoint (day) Value: 10
  misc_feature: MA Experiment 20001905 PARAMETER Experiment Name: At_Drought_Reproduction_P Parameter: Tissue Value: Rosettes
  misc_feature: MA Experiment 20001905 PARAMETER Experiment Name: At_Drought_Reproduction_P Parameter: Treatment Value: Drought vs. No Drought
aaagcgatccagttgctgtgggaagcgataatggaggcgacgaagagagaaagacggagagaagatgacgacggcgaaaaagcttcaccggaatcactcgttcttccaccagagatcattacagaaattcttctccgattaccagccaaatcgatcgggcgattcaggtgcgtatcaaagctcttttgcactttatcgtcagatccagggttcgcgaagattcacctcgatctgatccttcgaaacgaatccgtaagatcgctccaccgtaagctcattgtgtcttcacataatctgtactcgttagatttcaattcgatcggtgacggaattagggatttagcggctgtggaacacaattatcctcttaaagacgatccaagcattttctctgagatgattaggaattacgtgggggaccatctgtacgatgatcgtcgcgtgatgcttaagctgaatgcgaaatcgtatcgaagaaactgggttgagatcgttggatcttccaatggtttagtgtgtatctctcctggtgaaggagctgttttcttgtataatccaactaccggagattccaagagattacctgaaaattttcgtcccaaatctgtagaatacgaaagagataatttccaaacttatggatttggtttcgatggtctcactgatgattacaaattggtgaagcttgttgctaccagtgaagatattctcgatgctagtgtctattccttgaaggctgactcatggagacggatctgcaatttgaattatgagcacaacgatggctcctacacgtccggtgtgcatttcaacggtgcgattcactgggtgttcacagagagtaggcacaaccaaagagtggttgtagcatttgatattcaaaccgaggagtttcgagagatgccagtgcctgatgaagctgaagattgttcccataggtttagcaactttgtggtcggaagtctcaatggacgtctctgtgtggtcaatagttgctacgatgtgcatgatgatatatgggtgatgagtgagtacggtgaagctaaatcctggagcagaattcgaatcaacttgttgtataggtcgatgaaaccgctctgttcgactaagaacgatgaagaggttcttctggagcttgatggagacctggtgttgtacaactttgaaaccaatgcatcgagtaatctaggaatttgtggggttaagctcagtgacgggttcgaggcaaatacatacgtagagagcctcatatcacccaactcttatggtatagagagctgaggaagtctgctttttgctaagatataataaaccaacattcggattagaaatgttttagaaacataatcatgtaatatgtatcatgtaattaacaacgaatggtcaatgggtattttaagtttctttctcct

SEQ ID NO: 100048 - protein, 426 aa, Arabidopsis thaliana
  peptide (1)..(426): Ceres Seq. ID no. 13604159
  misc_feature (1)..(426): Homolog of NCBI NO: 30679777 NR Description: F-box protein family [Arabidopsis thaliana]
  misc_feature (11)..(426): Homolog of NCBI NO: 6862928 NR Description: hypothetical protein [Arabidopsis thaliana]
  misc_feature (159)..(420): Homolog of NCBI NO: 15229536 NR Description: F-box protein family [Arabidopsis thaliana] gb|AAF30317.1~gene_id:F14O13.6~similar to unknown protein thaliana] >gi|26449693|dbj|BAC41970.1| unknown protein
  misc_feature (26)..(107): Homolog of NCBI NO: 15229536 NR Description: F-box protein family [Arabidopsis thaliana] gb|AAF30317.1~gene_id:F14O13.6~similar to unknown protein thaliana] >gi|26449693|dbj|BAC41970.1| unknown protein
  misc_feature (42)..(418): Homolog of NCBI NO: 29420813 NR Description: F-box [Prunus mume]
  misc_feature (125)..(422): Homolog of NCBI NO: 33354147 NR Description: S-locus F-Box protein 6 [Prunus avium]
  misc_feature (38)..(97): Homolog of NCBI NO: 33354147 NR Description: S-locus F-Box protein 6 [Prunus avium]
  misc_feature (161)..(417): Homolog of NCBI NO: 15235636 NR Description: F-box protein-related [Arabidopsis thaliana]
  misc_feature (164)..(421): Homolog of NCBI NO: 29420803 NR Description: F-box [Prunus mume]
  misc_feature (38)..(97): Homolog of NCBI NO: 29420803 NR Description: F-box [Prunus mume]
KAIQLLWEAIMEATKRERRREDDDGEKASPESLVLPPEIITEILLRLPAKSIGRFRCVSKLFCTLSSDPGFAKIHLDLILRNESVRSLHRKLIVSSHNLYSLDFNSIGDGIRDLAAVEHNYPLKDDPSIFSEMIRNYVGDHLYDDRRVMLKLNAKSYRRNWVEIVGSSNGLVCISPGEGAVFLYNPTTGDSKRLPENFRPKSVEYERDNFQTYGFGFDGLTDDYKLVKLVATSEDILDASVYSLKADSWRRICNLNYEHNDGSYTSGVHFNGAIHWVFTESRHNQRVVVAFDIQTEEFREMPVPDEAEDCSHRFSNFVVGSLNGRLCVVNSCYDVHDDIWVMSEYGEAKSWSRIRINLLYRSMKPLCSTKNDEEVLLELDGDLVLYNFETNASSNLGICGVKLSDGFEANTYVESLISPNSYGIES

SEQ ID NO: 100049 - protein, 416 aa, Arabidopsis thaliana; identical to SEQ ID NO: 39545
  peptide (1)..(416): Ceres Seq. ID no. 13604160
  misc_feature (1)..(416): Homolog of NCBI NO: 30679777 NR Description: F-box protein family [Arabidopsis thaliana]
  misc_feature (1)..(416): Homolog of NCBI NO: 6862928 NR Description: hypothetical protein [Arabidopsis thaliana]
  misc_feature (149)..(410): Homolog of NCBI NO: 15229536 NR Description: F-box protein family [Arabidopsis thaliana] gb|AAF30317.1~gene_id:F14O13.6~similar to unknown protein thaliana] >gi|26449693|dbj|BAC41970.1| unknown protein
  misc_feature (16)..(97): Homolog of NCBI NO: 15229536 NR Description: F-box protein family [Arabidopsis thaliana] gb|AAF30317.1~gene_id:F14O13.6~similar to unknown protein thaliana] >gi|26449693|dbj|BAC41970.1| unknown protein
  misc_feature (32)..(408): Homolog of NCBI NO: 29420813 NR Description: F-box [Prunus mume]
  misc_feature (115)..(412): Homolog of NCBI NO: 33354147 NR Description: S-locus F-Box protein 6 [Prunus avium]
  misc_feature (28)..(87): Homolog of NCBI NO: 33354147 NR Description: S-locus F-Box protein 6 [Prunus avium]
  misc_feature (151)..(407): Homolog of NCBI NO: 15235636 NR Description: F-box protein-related [Arabidopsis thaliana]
  misc_feature (154)..(411): Homolog of NCBI NO: 29420803 NR Description: F-box [Prunus mume]
  misc_feature (28)..(87): Homolog of NCBI NO: 29420803 NR Description: F-box [Prunus mume]

SEQ ID NO: 100050 - protein, 294 aa, Arabidopsis thaliana
  peptide (1)..(294): Ceres Seq. ID no. 13604161
  misc_feature (1)..(294): Homolog of NCBI NO: 30679777 NR Description: F-box protein family [Arabidopsis thaliana]
  misc_feature (1)..(294): Homolog of NCBI NO: 6862928 NR Description: hypothetical protein [Arabidopsis thaliana]
  misc_feature (27)..(288): Homolog of NCBI NO: 15229536 NR Description: F-box protein family [Arabidopsis thaliana] gb|AAF30317.1~gene_id:F14O13.6~similar to unknown protein thaliana] >gi|26449693|dbj|BAC41970.1| unknown protein
  misc_feature (1)..(286): Homolog of NCBI NO: 29420813 NR Description: F-box [Prunus mume]
  misc_feature (1)..(290): Homolog of NCBI NO: 33354147 NR Description: S-locus F-Box protein 6 [Prunus avium]
  misc_feature (29)..(285): Homolog of NCBI NO: 15235636 NR Description: F-box protein-related [Arabidopsis thaliana]
  misc_feature (32)..(289): Homolog of NCBI NO: 29420803 NR Description: F-box [Prunus mume]
  misc_feature (32)..(290): Homolog of NCBI NO: 29420801 NR Description: F-box [Prunus mume]
  misc_feature (1)..(286): Homolog of NCBI NO: 28866899 NR Description: S locus F-box protein d [Prunus dulcis]
  misc_feature (1)..(288): Homolog of NCBI NO: 29420819 NR Description: F-box [Prunus mume]
MIRNYVGDHLYDDRRVMLKLNAKSYRRNWVEIVGSSNGLVCISPGEGAVFLYNPTTGDSKRLPENFRPKSVEYERDNFQTYGFGFDGLTDDYKLVKLVATSEDILDASVYSLKADSWRRICNLNYEHNDGSYTSGVHFNGAIHWVFTESRHNQRVVVAFDIQTEEFREMPVPDEAEDCSHRFSNFVVGSLNGRLCVVNSCYDVHDDIWVMSEYGEAKSWSRIRINLLYRSMKPLCSTKNDEEVLLELDGDLVLYNFETNASSNLGICGVKLSDGFEANTYVESLISPNSYGIES

SEQ ID NO: 100051 - DNA, 1047 bp, Arabidopsis thaliana
  misc_feature (1)..(1047): Ceres Seq. ID no. 13604162
  misc_feature: MA Experiment ID: 108461 Result: Up-regulated in Transcription
  misc_feature: MA Experiment 108461 PARAMETER Experiment Name: At_Germinating_Seeds_cDNA_P Parameter: Age (day) Value: 1 vs. 0
  misc_feature: MA Experiment 108461 PARAMETER Experiment Name: At_Germinating_Seeds_cDNA_P Parameter: Tissue Value: Germinating Seeds
  misc_feature: MA Experiment ID: 108462 Result: Up-regulated in Transcription
  misc_feature: MA Experiment 108462 PARAMETER Experiment Name: At_Germinating_Seeds_cDNA_P Parameter: Age (day) Value: 2 vs. 0
  misc_feature: MA Experiment 108462 PARAMETER Experiment Name: At_Germinating_Seeds_cDNA_P Parameter: Tissue Value: Germinating Seeds
  misc_feature: MA Experiment ID: 108501 Result: Down-regulated in Transcription
  misc_feature: MA Experiment 108501 PARAMETER Experiment Name: At_ap2_floral_buds_cDNA_P Parameter: Plant Line Value: ap2 (Ler.)
  misc_feature: MA Experiment 108501 PARAMETER Experiment Name: At_ap2_floral_buds_cDNA_P Parameter: Tissue Value: Closed Flower
  misc_feature: MA Experiment ID: 108668 Result: Up-regulated in Transcription
  misc_feature: MA Experiment 108668 PARAMETER Experiment Name: At_2mM_SA_cDNA_P Parameter: Plant Line Value: WS
  misc_feature: MA Experiment 108668 PARAMETER Experiment Name: At_2mM_SA_cDNA_P Parameter: Timepoint (hr) Value: 6
  misc_feature: MA Experiment 108668 PARAMETER Experiment Name: At_2mM_SA_cDNA_P Parameter: Treatment Value: 2mM SA vs. No Treatment
  misc_feature: MA Experiment ID: 20000179 Result: Up-regulated in Transcription
  misc_feature: MA Experiment 20000179 PARAMETER Experiment Name: At_Germinating_Seeds_P Parameter: Age (hr) Value: 6 vs. 0
  misc_feature: MA Experiment 20000179 PARAMETER Experiment Name: At_Germinating_Seeds_P Parameter: Tissue Value: Germinating Seeds
  misc_feature: MA Experiment ID: 20000180 Result: Up-regulated in Transcription
  misc_feature: MA Experiment 20000180 PARAMETER Experiment Name: At_Germinating_Seeds_P Parameter: Age (hr) Value: 24 vs. 0
  misc_feature: MA Experiment 20000180 PARAMETER Experiment Name: At_Germinating_Seeds_P Parameter: Tissue Value: Germinating Seeds
  misc_feature: MA Experiment ID: 20000182 Result: Up-regulated in Transcription
  misc_feature: MA Experiment 20000182 PARAMETER Experiment Name: At_2mM_SA_P Parameter: Age (day) Value: 14
  misc_feature: MA Experiment 20000182 PARAMETER Experiment Name: At_2mM_SA_P Parameter: Organism Value: A. thaliana
  misc_feature: MA Experiment 20000182 PARAMETER Experiment Name: At_2mM_SA_P Parameter: Plant Line Value: WS
  misc_feature: MA Experiment 20000182 PARAMETER Experiment Name: At_2mM_SA_P Parameter: Timepoint (hr) Value: 6
  misc_feature: MA Experiment 20000182 PARAMETER Experiment Name: At_2mM_SA_P Parameter: Tissue Value: Aerial
  misc_feature: MA Experiment 20000182 PARAMETER Experiment Name: At_2mM_SA_P Parameter: Treatment Value: 2mM SA vs. No Treatment
  misc_feature: MA Experiment ID: 20000185 Result: Up-regulated in Transcription
  misc_feature: MA Experiment 20000185 PARAMETER Experiment Name: At_Roots__P Parameter: Age (day) Value: 7 vs. 21
  misc_feature: MA Experiment 20000185 PARAMETER Experiment Name: At_Roots__P Parameter: Organism Value: A. thaliana
  misc_feature: MA Experiment 20000185 PARAMETER Experiment Name: At_Roots__P Parameter: Tissue Value: Roots vs. Whole Plant
  misc_feature: MA Experiment ID: 20000264 Result: Down-regulated in Transcription
  misc_feature: MA Experiment 20000264 PARAMETER Experiment Name: At_Open_Flower_P Parameter: Age (day) Value: 21
  misc_feature: MA Experiment 20000264 PARAMETER Experiment Name: At_Open_Flower_P Parameter: Plant Line Value: WS
  misc_feature: MA Experiment 20000264 PARAMETER Experiment Name: At_Open_Flower_P Parameter: Tissue Value: Open Flower vs. Whole Plant
  misc_feature: MA Experiment ID: 20000437 Result: Down-regulated in Transcription
  misc_feature: MA Experiment 20000437 PARAMETER Experiment Name: At_Drought_P Parameter: Age (day) Value: 8
  misc_feature: MA Experiment 20000437 PARAMETER Experiment Name: At_Drought_P Parameter: Organism Value: A. thaliana
  misc_feature: MA Experiment 20000437 PARAMETER Experiment Name: At_Drought_P Parameter: Plant Line Value: WS
  misc_feature: MA Experiment 20000437 PARAMETER Experiment Name: At_Drought_P Parameter: Timepoint (hr) Value: 24
  misc_feature: MA Experiment 20000437 PARAMETER Experiment Name: At_Drought_P Parameter: Tissue Value: Whole Plant
  misc_feature: MA Experiment 20000437 PARAMETER Experiment Name: At_Drought_P Parameter: Treatment Value: Drought vs. No Drought
  misc_feature: MA Experiment ID: 20000496 Result: Up-regulated in Transcription
  misc_feature: MA Experiment 20000496 PARAMETER Experiment Name: At_Guard_Cells_P Parameter: Harvest Date Value: 7/19/2002
  misc_feature: MA Experiment 20000496 PARAMETER Experiment Name: At_Guard_Cells_P Parameter: Organism Value: Canola
  misc_feature: MA Experiment 20000496 PARAMETER Experiment Name: At_Guard_Cells_P Parameter: Tissue Value: Guard Cells vs. Leaves
  misc_feature: MA Experiment ID: 20000794 Result: Down-regulated in Transcription
  misc_feature: MA Experiment 20000794 PARAMETER Experiment Name: At_Petals_P Parameter: Age (day) Value: 23-25 days
  misc_feature: MA Experiment 20000794 PARAMETER Experiment Name: At_Petals_P Parameter: Plant Line Value: WS
  misc_feature: MA Experiment 20000794 PARAMETER Experiment Name: At_Petals_P Parameter: Tissue Value: Petals vs. Whole plant
  misc_feature: MA Experiment ID: 20001905 Result: Down-regulated in Transcription
  misc_feature: MA Experiment 20001905 PARAMETER Experiment Name: At_Drought_Reproduction_P Parameter: Age (day) Value: 40
  misc_feature: MA Experiment 20001905 PARAMETER Experiment Name: At_Drought_Reproduction_P Parameter: Organism Value: A. thaliana
  misc_feature: MA Experiment 20001905 PARAMETER Experiment Name: At_Drought_Reproduction_P Parameter: Plant Line Value: WS
  misc_feature: MA Experiment 20001905 PARAMETER Experiment Name: At_Drought_Reproduction_P Parameter: Timepoint (day) Value: 10
  misc_feature: MA Experiment 20001905 PARAMETER Experiment Name: At_Drought_Reproduction_P Parameter: Tissue Value: Rosettes
  misc_feature: MA Experiment 20001905 PARAMETER Experiment Name: At_Drought_Reproduction_P Parameter: Treatment Value: Drought vs. No Drought
  misc_feature: MA Experiment ID: 20001911 Result: Down-regulated in Transcription
  misc_feature: MA Experiment 20001911 PARAMETER Experiment Name: At_Drought_Reproduction_P Parameter: Age (day) Value: 40
  misc_feature: MA Experiment 20001911 PARAMETER Experiment Name: At_Drought_Reproduction_P Parameter: Organism Value: A. thaliana
  misc_feature: MA Experiment 20001911 PARAMETER Experiment Name: At_Drought_Reproduction_P Parameter: Plant Line Value: WS
  misc_feature: MA Experiment 20001911 PARAMETER Experiment Name: At_Drought_Reproduction_P Parameter: Timepoint (day) Value: 10
  misc_feature: MA Experiment 20001911 PARAMETER Experiment Name: At_Drought_Reproduction_P Parameter: Tissue Value: Flowers
  misc_feature: MA Experiment 20001911 PARAMETER Experiment Name: At_Drought_Reproduction_P Parameter: Treatment Value: Drought vs. No Drought
aaattactacgattgctataatgtcgatgtctcggctcggattgttgttgttcgtcgctatattgctcgtcttgcttcagtcttccacttgtctgattagttctccaagttctatcatcaatccttctaaagtcaaacaggtttcgtcgaagcccagggcatttgtgtatgaaggttttttgacggacttggaatgtgatcatctaatctctcttgcgaaagagaatctgcagagatctgcggttgctgataacgataatggcgagagtcaagtcagtgatgttcgtaccagctccggcacttttatctccaaaggaaaggatcctattgtttccggtatcgaggacaagctctcaacatggacatttctcccaaaagaaaacggggaagaccttcaggtattgagatatgagcacggtcagaaatatgatgctcactttgactacttccacgacaaagtcaacattgcccgtggtggacaccgcatagcaacggttctcttgtatctgtccaatgtcacaaagggtggagaaactgttttccccgatgcacaggaattctctcgccgctcgctttctgagaataaagacgatctttctgattgtgcaaagaaaggaatcgctgtgaaaccgaagaaagggaatgctctgttgttcttcaacctccaacaagacgcaatcccagacccctttagccttcacggaggttgtccagtgatcgaaggagagaaatggtcggctactaagtggatccacgtggactcattcgataagatattgacacatgatggtaactgtactgacgtaaacgagagctgtgagagatgggcagtgcttggagaatgtggaaagaatccagagtatatggttggaactccagagatccctgggaattgcagacgtagctgtaaagcttgttaaagactttaaactcctctttttctctgtaacattaaaagtttttttttcttgatcgagtttcattttcttgtttctgattgttgttacatgtatcgtctcgctttatagaatgatttttttcgtctgg

SEQ ID NO: 100052 - protein, 305 aa, Arabidopsis thaliana
  peptide (1)..(305): Ceres Seq. ID no. 13604163
  misc_feature (127)..(252): Pfam Name: 2OG-Fe(II) oxygenase superfamily Pfam Description: 2OG-Fe(II) oxygenase superfamily
  misc_feature (7)..(305): Homolog of NCBI NO: 18397528 NR Description: oxidoreductase, 2OG-Fe(II) oxygenase family
  misc_feature (9)..(305): Homolog of NCBI NO: 21618073 NR Description: prolyl 4-hydroxylase alpha subunit-like protein
  misc_feature (7)..(184): Homolog of NCBI NO: 6437556 NR Description: unknown protein [Arabidopsis thaliana]
  misc_feature (206)..(305): Homolog of NCBI NO: 6437556 NR Description: unknown protein [Arabidopsis thaliana]
  misc_feature (9)..(305): Homolog of NCBI NO: 15239594 NR Description: oxidoreductase, 2OG-Fe(II) oxygenase family
  misc_feature (9)..(305): Homolog of NCBI NO: 20260280 NR Description: unknown protein [Arabidopsis thaliana]
  misc_feature (14)..(305): Homolog of NCBI NO: 29150365 NR Description: putative oxidoreductase [Oryza sativa (japonica
  misc_feature (33)..(305): Homolog of NCBI NO: 9294583 NR Description: prolyl 4-hydroxylase alpha subunit-like protein
  misc_feature (33)..(305): Homolog of NCBI NO: 18405808 NR Description: oxidoreductase, 2OG-Fe(II) oxygenase family
  misc_feature (33)..(305): Homolog of NCBI NO: 18086437 NR Description: AT3g28480/MFJ20_16 [Arabidopsis thaliana]
ITTIAIMSMSRLGLLLFVAILLVLLQSSTCLISSPSSIINPSKVKQVSSKPRAFVYEGFLTDLECDHLISLAKENLQRSAVADNDNGESQVSDVRTSSGTFISKGKDPIVSGIEDKLSTWTFLPKENGEDLQVLRYEHGQKYDAHFDYFHDKVNIARGGHRIATVLLYLSNVTKGGETVFPDAQEFSRRSLSENKDDLSDCAKKGIAVKPKKGNALLFFNLQQDAIPDPFSLHGGCPVIEGEKWSATKWIHVDSFDKILTHDGNCTDVNESCERWAVLGECGKNPEYMVGTPEIPGNCRRSCKAC

SEQ ID NO: 100053 - protein, 299 aa, Arabidopsis thaliana; identical to SEQ ID NO: 38301
  peptide (1)..(299): Ceres Seq. ID no. 13604164
  misc_feature (121)..(246): Pfam Name: 2OG-Fe(II) oxygenase superfamily Pfam Description: 2OG-Fe(II) oxygenase superfamily
  misc_feature (1)..(299): Homolog of NCBI NO: 18397528 NR Description: oxidoreductase, 2OG-Fe(II) oxygenase family
  misc_feature (3)..(299): Homolog of NCBI NO: 21618073 NR Description: prolyl 4-hydroxylase alpha subunit-like protein
  misc_feature (1)..(178): Homolog of NCBI NO: 6437556 NR Description: unknown protein [Arabidopsis thaliana]
  misc_feature (200)..(299): Homolog of NCBI NO: 6437556 NR Description: unknown protein [Arabidopsis thaliana]
  misc_feature (3)..(299): Homolog of NCBI NO: 15239594 NR Description: oxidoreductase, 2OG-Fe(II) oxygenase family
  misc_feature (3)..(299): Homolog of NCBI NO: 20260280 NR Description: unknown protein [Arabidopsis thaliana]
  misc_feature (8)..(299): Homolog of NCBI NO: 29150365 NR Description: putative oxidoreductase [Oryza sativa (japonica
  misc_feature (27)..(299): Homolog of NCBI NO: 9294583 NR Description: prolyl 4-hydroxylase alpha subunit-like protein
  misc_feature (27)..(299): Homolog of NCBI NO: 18405808 NR Description: oxidoreductase, 2OG-Fe(II) oxygenase family
  misc_feature (27)..(299): Homolog of NCBI NO: 18086437 NR Description: AT3g28480/MFJ20_16 [Arabidopsis thaliana]

SEQ ID NO: 100054 - protein, 297 aa, Arabidopsis thaliana; identical to SEQ ID NO: 38302
  peptide (1)..(297): Ceres Seq. ID no. 13604165
  misc_feature (119)..(244): Pfam Name: 2OG-Fe(II) oxygenase superfamily Pfam Description: 2OG-Fe(II) oxygenase superfamily
  misc_feature (1)..(297): Homolog of NCBI NO: 18397528 NR Description: oxidoreductase, 2OG-Fe(II) oxygenase family
  misc_feature (1)..(297): Homolog of NCBI NO: 21618073 NR Description: prolyl 4-hydroxylase alpha subunit-like protein
  misc_feature (1)..(176): Homolog of NCBI NO: 6437556 NR Description: unknown protein [Arabidopsis thaliana]
  misc_feature (198)..(297): Homolog of NCBI NO: 6437556 NR Description: unknown protein [Arabidopsis thaliana]
  misc_feature (1)..(297): Homolog of NCBI NO: 15239594 NR Description: oxidoreductase, 2OG-Fe(II) oxygenase family
  misc_feature (1)..(297): Homolog of NCBI NO: 20260280 NR Description: unknown protein [Arabidopsis thaliana]
  misc_feature (6)..(297): Homolog of NCBI NO: 29150365 NR Description: putative oxidoreductase [Oryza sativa (japonica
  misc_feature (25)..(297): Homolog of NCBI NO: 9294583 NR Description: prolyl 4-hydroxylase alpha subunit-like protein
  misc_feature (25)..(297): Homolog of NCBI NO: 18405808 NR Description: oxidoreductase, 2OG-Fe(II) oxygenase family
  misc_feature (25)..(297): Homolog of NCBI NO: 18086437 NR Description: AT3g28480/MFJ20_16 [Arabidopsis thaliana]

SEQ ID NO: 100055 - DNA, 703 bp, Arabidopsis thaliana
  misc_feature (1)..(703): Ceres Seq. ID no. 13604170
  misc_feature: MA Experiment ID: 108463 Result: Up-regulated in Transcription
  misc_feature: MA Experiment 108463 PARAMETER Experiment Name: At_Germinating_Seeds_cDNA_P Parameter: Age (day) Value: 3 vs. 0
  misc_feature: MA Experiment 108463 PARAMETER Experiment Name: At_Germinating_Seeds_cDNA_P Parameter: Tissue Value: Germinating Seeds
  misc_feature: MA Experiment ID: 108464 Result: Up-regulated in Transcription
  misc_feature: MA Experiment 108464 PARAMETER Experiment Name: At_Germinating_Seeds_cDNA_P Parameter: Age (day) Value: 4 vs. 0
  misc_feature: MA Experiment 108464 PARAMETER Experiment Name: At_Germinating_Seeds_cDNA_P Parameter: Tissue Value: Germinating Seeds
  misc_feature: MA Experiment ID: 108488 Result: Down-regulated in Transcription
  misc_feature: MA Experiment ID: 108489 Result: Up-regulated in Transcription
  misc_feature: MA Experiment ID: 20000113 Result: Up-regulated in Transcription
  misc_feature: MA Experiment 20000113 PARAMETER Experiment Name: At_42deg_Heat_cDNA_P Parameter: Temperature (deg C) Value: 42 vs. 22
  misc_feature: MA Experiment 20000113 PARAMETER Experiment Name: At_42deg_Heat_cDNA_P Parameter: Timepoint (hr) Value: 8
  misc_feature: MA Experiment 20000113 PARAMETER Experiment Name: At_42deg_Heat_cDNA_P Parameter: Tissue Value: Aerial
  misc_feature: MA Experiment ID: 20000169 Result: Up-regulated in Transcription
  misc_feature: MA Experiment 20000169 PARAMETER Experiment Name: At_100uM_ABA_P Parameter: Age (day) Value: 14
  misc_feature: MA Experiment 20000169 PARAMETER Experiment Name: At_100uM_ABA_P Parameter: Organism Value: A. thaliana
  misc_feature: MA Experiment 20000169 PARAMETER Experiment Name: At_100uM_ABA_P Parameter: Plant Line Value: WS
  misc_feature: MA Experiment 20000169 PARAMETER Experiment Name: At_100uM_ABA_P Parameter: Timepoint (hr) Value: 6
  misc_feature: MA Experiment 20000169 PARAMETER Experiment Name: At_100uM_ABA_P Parameter: Tissue Value: Aerial
  misc_feature: MA Experiment 20000169 PARAMETER Experiment Name: At_100uM_ABA_P Parameter: Treatment Value: 100uM ABA vs. No Treatment
  misc_feature: MA Experiment ID: 20000171 Result: Up-regulated in Transcription
  misc_feature: MA Experiment 20000171 PARAMETER Experiment Name: At_42deg_Heat_P Parameter: Age (day) Value: 14
  misc_feature: MA Experiment 20000171 PARAMETER Experiment Name: At_42deg_Heat_P Parameter: Organism Value: A. thaliana
  misc_feature: MA Experiment 20000171 PARAMETER Experiment Name: At_42deg_Heat_P Parameter: Plant Line Value: WS
  misc_feature: MA Experiment 20000171 PARAMETER Experiment Name: At_42deg_Heat_P Parameter: Temperature (deg C) Value: 42 vs. 22
  misc_feature: MA Experiment 20000171 PARAMETER Experiment Name: At_42deg_Heat_P Parameter: Timepoint (hr) Value: 1
  misc_feature: MA Experiment 20000171 PARAMETER Experiment Name: At_42deg_Heat_P Parameter: Tissue Value: Aerial
  misc_feature: MA Experiment ID: 20000173 Result: Up-regulated in Transcription
  misc_feature: MA Experiment 20000173 PARAMETER Experiment Name: At_42deg_Heat_P Parameter: Age (day) Value: 14
  misc_feature: MA Experiment 20000173 PARAMETER Experiment Name: At_42deg_Heat_P Parameter: Organism Value: A. thaliana
  misc_feature: MA Experiment 20000173 PARAMETER Experiment Name: At_42deg_Heat_P Parameter: Plant Line Value: WS
  misc_feature: MA Experiment 20000173 PARAMETER Experiment Name: At_42deg_Heat_P Parameter: Temperature (deg C) Value: 42 vs. 22
  misc_feature: MA Experiment 20000173 PARAMETER Experiment Name: At_42deg_Heat_P Parameter: Timepoint (hr) Value: 6
  misc_feature: MA Experiment 20000173 PARAMETER Experiment Name: At_42deg_Heat_P Parameter: Tissue Value: Aerial
  misc_feature: MA Experiment ID: 20000182 Result: Up-regulated in Transcription
  misc_feature: MA Experiment 20000182 PARAMETER Experiment Name: At_2mM_SA_P Parameter: Age (day) Value: 14
  misc_feature: MA Experiment 20000182 PARAMETER Experiment Name: At_2mM_SA_P Parameter: Organism Value: A. thaliana
  misc_feature: MA Experiment 20000182 PARAMETER Experiment Name: At_2mM_SA_P Parameter: Plant Line Value: WS
  misc_feature: MA Experiment 20000182 PARAMETER Experiment Name: At_2mM_SA_P Parameter: Timepoint (hr) Value: 6
  misc_feature: MA Experiment 20000182 PARAMETER Experiment Name: At_2mM_SA_P Parameter: Tissue Value: Aerial
  misc_feature: MA Experiment 20000182 PARAMETER Experiment Name: At_2mM_SA_P Parameter: Treatment Value: 2mM SA vs. No Treatment
  misc_feature: MA Experiment ID: 20000185 Result: Up-regulated in Transcription
  misc_feature: MA Experiment 20000185 PARAMETER Experiment Name: At_Roots__P Parameter: Age (day) Value: 7 vs. 21
  misc_feature: MA Experiment 20000185 PARAMETER Experiment Name: At_Roots__P Parameter: Organism Value: A. thaliana
  misc_feature: MA Experiment 20000185 PARAMETER Experiment Name: At_Roots__P Parameter: Tissue Value: Roots vs. Whole Plant
  misc_feature: MA Experiment ID: 20000437 Result: Up-regulated in Transcription
  misc_feature: MA Experiment 20000437 PARAMETER Experiment Name: At_Drought_P Parameter: Age (day) Value: 8
  misc_feature: MA Experiment 20000437 PARAMETER Experiment Name: At_Drought_P Parameter: Organism Value: A. thaliana
  misc_feature: MA Experiment 20000437 PARAMETER Experiment Name: At_Drought_P Parameter: Plant Line Value: WS
  misc_feature: MA Experiment 20000437 PARAMETER Experiment Name: At_Drought_P Parameter: Timepoint (hr) Value: 24
  misc_feature: MA Experiment 20000437 PARAMETER Experiment Name: At_Drought_P Parameter: Tissue Value: Whole Plant
  misc_feature: MA Experiment 20000437 PARAMETER Experiment Name: At_Drought_P Parameter: Treatment Value: Drought vs. No Drought
  misc_feature: MA Experiment ID: 20000438 Result: Down-regulated in Transcription
  misc_feature: MA Experiment 20000438 PARAMETER Experiment Name: At_Shoots__P Parameter: Age (day) Value: 14
  misc_feature: MA Experiment 20000438 PARAMETER Experiment Name: At_Shoots__P Parameter: Tissue Value: Shoots vs. Whole Plant
  misc_feature: MA Experiment ID: 20000439 Result: Up-regulated in Transcription
  misc_feature: MA Experiment 20000439 PARAMETER Experiment Name: At_Roots__P Parameter: Age (day) Value: 14 vs. 21
  misc_feature: MA Experiment 20000439 PARAMETER Experiment Name: At_Roots__P Parameter: Organism Value: A. thaliana
  misc_feature: MA Experiment 20000439 PARAMETER Experiment Name: At_Roots__P Parameter: Tissue Value: Roots vs. Whole Plant
  misc_feature: MA Experiment ID: 20000453 Result: Up-regulated in Transcription
  misc_feature: MA Experiment 20000453 PARAMETER Experiment Name: At_100uM_ABA_P Parameter: Age (day) Value: 15
  misc_feature: MA Experiment 20000453 PARAMETER Experiment Name: At_100uM_ABA_P Parameter: Organism Value: A. thaliana
  misc_feature: MA Experiment 20000453 PARAMETER Experiment Name: At_100uM_ABA_P Parameter: Plant Line Value: WS
  misc_feature: MA Experiment 20000453 PARAMETER Experiment Name: At_100uM_ABA_P Parameter: Timepoint (hr) Value: 24
  misc_feature: MA Experiment 20000453 PARAMETER Experiment Name: At_100uM_ABA_P Parameter: Tissue Value: Aerial
  misc_feature: MA Experiment 20000453 PARAMETER Experiment Name: At_100uM_ABA_P Parameter: Treatment Value: 100uM ABA vs. No Treatment
  misc_feature: MA Experiment ID: 20000527 Result: Down-regulated in Transcription
  misc_feature: MA Experiment 20000527 PARAMETER Experiment Name: At_10percent_PEG_P Parameter: Age (day) Value: 20
  misc_feature: MA Experiment 20000527 PARAMETER Experiment Name: At_10percent_PEG_P Parameter: Organism Value: A. thaliana
  misc_feature: MA Experiment 20000527 PARAMETER Experiment Name: At_10percent_PEG_P Parameter: Plant Line Value: WS
  misc_feature: MA Experiment 20000527 PARAMETER Experiment Name: At_10percent_PEG_P Parameter: Timepoint (day) Value: 20
  misc_feature: MA Experiment 20000527 PARAMETER Experiment Name: At_10percent_PEG_P Parameter: Tissue Value: Whole Plant
  misc_feature: MA Experiment 20000527 PARAMETER Experiment Name: At_10percent_PEG_P Parameter: Treatment Value: 10percent PEG vs. No Treatment
  misc_feature: MA Experiment ID: 20000794 Result: Up-regulated in Transcription
  misc_feature: MA Experiment 20000794 PARAMETER Experiment Name: At_Petals_P Parameter: Age (day) Value: 23-25 days
  misc_feature: MA Experiment 20000794 PARAMETER Experiment Name: At_Petals_P Parameter: Plant Line Value: WS
  misc_feature: MA Experiment 20000794 PARAMETER Experiment Name: At_Petals_P Parameter: Tissue Value: Petals vs. Whole plant
  misc_feature: MA Experiment ID: 20001556 Result: Up-regulated in Transcription
  misc_feature: MA Experiment 20001556 PARAMETER Experiment Name: At_Drought_Soil_Dry_P Parameter: Age (day) Value: 26
  misc_feature: MA Experiment 20001556 PARAMETER Experiment Name: At_Drought_Soil_Dry_P Parameter: Organism Value: A. thaliana
  misc_feature: MA Experiment 20001556 PARAMETER Experiment Name: At_Drought_Soil_Dry_P Parameter: Plant Line Value: WS
  misc_feature: MA Experiment 20001556 PARAMETER Experiment Name: At_Drought_Soil_Dry_P Parameter: Post Timepoint (hr) Value: None
  misc_feature: MA Experiment 20001556 PARAMETER Experiment Name: At_Drought_Soil_Dry_P Parameter: Post-Treatment Value: None
  misc_feature: MA Experiment 20001556 PARAMETER Experiment Name: At_Drought_Soil_Dry_P Parameter: Timepoint (day) Value: 12
  misc_feature: MA Experiment 20001556 PARAMETER Experiment Name: At_Drought_Soil_Dry_P Parameter: Treatment Value: Drought vs. No Drought
  misc_feature: MA Experiment ID: 20001904 Result: Up-regulated in Transcription
  misc_feature: MA Experiment 20001904 PARAMETER Experiment Name: At_Drought_Reproduction_P Parameter: Age (day) Value: 37
  misc_feature: MA Experiment 20001904 PARAMETER Experiment Name: At_Drought_Reproduction_P Parameter: Organism Value: A. thaliana
  misc_feature: MA Experiment 20001904 PARAMETER Experiment Name: At_Drought_Reproduction_P Parameter: Plant Line Value: WS
  misc_feature: MA Experiment 20001904 PARAMETER Experiment Name: At_Drought_Reproduction_P Parameter: Timepoint (day) Value: 7
  misc_feature: MA Experiment 20001904 PARAMETER Experiment Name: At_Drought_Reproduction_P Parameter: Tissue Value: Rosettes
  misc_feature: MA Experiment 20001904 PARAMETER Experiment Name: At_Drought_Reproduction_P Parameter: Treatment Value: Drought vs. No Drought
  misc_feature: MA Experiment ID: 20001905 Result: Up-regulated in Transcription
  misc_feature: MA Experiment 20001905 PARAMETER Experiment Name: At_Drought_Reproduction_P Parameter: Age (day) Value: 40
  misc_feature: MA Experiment 20001905 PARAMETER Experiment Name: At_Drought_Reproduction_P Parameter: Organism Value: A. thaliana
  misc_feature: MA Experiment 20001905 PARAMETER Experiment Name: At_Drought_Reproduction_P Parameter: Plant Line Value: WS
  misc_feature: MA Experiment 20001905 PARAMETER Experiment Name: At_Drought_Reproduction_P Parameter: Timepoint (day) Value: 10
  misc_feature: MA Experiment 20001905 PARAMETER Experiment Name: At_Drought_Reproduction_P Parameter: Tissue Value: Rosettes
  misc_feature: MA Experiment 20001905 PARAMETER Experiment Name: At_Drought_Reproduction_P Parameter: Treatment Value: Drought vs. No Drought
cttctcgaacaatcaaaaacgaactaaccaaacataaaattgaacacatcctcttcctctgctctctgcaaacaaaaaaacaccgattcggtcaggaatcattcgtcgtgaaatctgtaatggggattgttgtcaagtctttcaaggatcaattctcctctgatgagagattgaaggagtcgaacaacatcattgcgaaatatccagatagaatacctgtgatcattgagaaatattcaaacgcagatctgccagacatggagaagaacaaatacttggtcccacgagacatgactgttggacatttcatccatatgctaagcaaaaggatgcagttagatccatccaaagctctctttgttttcgtacacaacactcttcctcaaaccgctagtcgcatggactctctctacaatactttcaaggaagaagacgggttcttgtacatgtgctacagcaccgagaaaactttcggctaacaaaagatttgtcgcttcatatcgaaatcgaagcgcactctgaataatccatttgtttgattcctatgtttgtgaataacgtcagctcttgttgttactgttattgttgttgttagctgacattgtacagaaaagctaaaaaaaagaaagacatttgactttgtaaattatgtataatccaactatggcaataataataagaccaagtgatgatgattcacacg

SEQ ID NO: 100056 - protein, 158 aa, Arabidopsis thaliana; identical to SEQ ID NO: 42235
  peptide (1)..(158): Ceres Seq. ID no. 13604171
  misc_feature (55)..(158): Pfam Name: Microtubule associated protein 1A/1B, light chain 3 Pfam Description: Microtubule associated protein 1A/1B, light
  misc_feature (40)..(158): Homolog of NCBI NO: 18397569 NR Description: (AtAPG8h) autophagy 8h [Arabidopsis thaliana]
  misc_feature (40)..(158): Homolog of NCBI NO: 6437547 NR Description: hypothetical protein [Arabidopsis thaliana]
  misc_feature (44)..(158): Homolog of NCBI NO: 18400815 NR Description: autophagy protein APG8H (AtAPG8i) [Arabidopsis >gi|11994225|dbj|BAB01347.1| to unknown protein [Arabidopsis thaliana]
  misc_feature (46)..(158): Homolog of NCBI NO: 18415813 NR Description: symbiosis-related like protein [Arabidopsis >gi|19912151|dbj|BAB88387.1| autophagy 8a [Arabidopsis thaliana] autophagy APG8 [Arabidopsis protein [Arabidopsis thaliana]
  misc_feature (46)..(158): Homolog of NCBI NO: 21553487 NR Description: symbiosis-related like protein [Arabidopsis
  misc_feature (46)..(158): Homolog of NCBI NO: 40253647 NR Description: putative microtubial binding protein [Oryza
  misc_feature (46)..(158): Homolog of NCBI NO: 38344173 NR Description: OSJNBa0053K19.12 [Oryza sativa (japonica
  misc_feature (42)..(158): Homolog of NCBI NO: 21592920 NR Description: putative microtubule-associated protein
  misc_feature (46)..(158): Homolog of NCBI NO: 15233593 NR Description: symbiosis-related protein -related [Arabidopsis
  misc_feature (42)..(158): Homolog of NCBI NO: 15224577 NR Description: microtubule-associated protein -related

SEQ ID NO: 100057 - protein, 119 aa, Arabidopsis thaliana; identical to SEQ ID NO: 42236
  peptide (1)..(119): Ceres Seq. ID no. 13604172
  misc_feature (16)..(119): Pfam Name: Microtubule associated protein 1A/1B, light chain 3 Pfam Description: Microtubule associated protein 1A/1B, light
  misc_feature (1)..(119): Homolog of NCBI NO: 18397569 NR Description: (AtAPG8h) autophagy 8h [Arabidopsis thaliana]
  misc_feature (1)..(119): Homolog of NCBI NO: 6437547 NR Description: hypothetical protein [Arabidopsis thaliana]
  misc_feature (5)..(119): Homolog of NCBI NO: 18400815 NR Description: autophagy protein APG8H (AtAPG8i) [Arabidopsis >gi|11994225|dbj|BAB01347.1| to unknown protein [Arabidopsis thaliana]
  misc_feature (7)..(119): Homolog of NCBI NO: 18415813 NR Description: symbiosis-related like protein [Arabidopsis >gi|19912151|dbj|BAB88387.1| autophagy 8a [Arabidopsis thaliana] autophagy APG8 [Arabidopsis protein [Arabidopsis thaliana]
  misc_feature (7)..(119): Homolog of NCBI NO: 21553487 NR Description: symbiosis-related like protein [Arabidopsis
  misc_feature (7)..(119): Homolog of NCBI NO: 40253647 NR Description: putative microtubial binding protein [Oryza
  misc_feature (7)..(119): Homolog of NCBI NO: 38344173 NR Description: OSJNBa0053K19.12 [Oryza sativa (japonica
  misc_feature (3)..(119): Homolog of NCBI NO: 21592920 NR Description: putative microtubule-associated protein
  misc_feature (7)..(119): Homolog of NCBI NO: 15233593 NR Description: symbiosis-related protein -related [Arabidopsis
  misc_feature (3)..(119): Homolog of NCBI NO: 15224577 NR Description: microtubule-associated protein -related

SEQ ID NO: 100058 - DNA, 712 bp, Arabidopsis thaliana
  misc_feature (1)..(712): Ceres Seq. ID no. 13604191
  misc_feature: MA Experiment ID: 108595 Result: Up-regulated in Transcription
  misc_feature: MA Experiment 108595 PARAMETER Experiment Name: At_Ler-pi_Ovule_cDNA_P Parameter: Plant Line Value: null
  misc_feature: MA Experiment ID: 108668 Result: Up-regulated in Transcription
  misc_feature: MA Experiment 108668 PARAMETER Experiment Name: At_2mM_SA_cDNA_P Parameter: Plant Line Value: WS
  misc_feature: MA Experiment 108668 PARAMETER Experiment Name: At_2mM_SA_cDNA_P Parameter: Timepoint (hr) Value: 6
  misc_feature: MA Experiment 108668 PARAMETER Experiment Name: At_2mM_SA_cDNA_P Parameter: Treatment Value: 2mM SA vs. No Treatment
  misc_feature: MA Experiment ID: 20000182 Result: Up-regulated in Transcription
  misc_feature: MA Experiment 20000182 PARAMETER Experiment Name: At_2mM_SA_P Parameter: Age (day) Value: 14
  misc_feature: MA Experiment 20000182 PARAMETER Experiment Name: At_2mM_SA_P Parameter: Organism Value: A. thaliana
  misc_feature: MA Experiment 20000182 PARAMETER Experiment Name: At_2mM_SA_P Parameter: Plant Line Value: WS
  misc_feature: MA Experiment 20000182 PARAMETER Experiment Name: At_2mM_SA_P Parameter: Timepoint (hr) Value: 6
  misc_feature: MA Experiment 20000182 PARAMETER Experiment Name: At_2mM_SA_P Parameter: Tissue Value: Aerial
  misc_feature: MA Experiment 20000182 PARAMETER Experiment Name: At_2mM_SA_P Parameter: Treatment Value: 2mM SA vs. No Treatment
  misc_feature: MA Experiment ID: 20000227 Result: Down-regulated in Transcription
  misc_feature: MA Experiment 20000227 PARAMETER Experiment Name: At_Root-Tips-vs-Tops_P Parameter: Tissue Value: Root Tips vs. Root Tops
  misc_feature: MA Experiment ID: 20000460 Result: Up-regulated in Transcription
  misc_feature: MA Experiment 20000460 PARAMETER Experiment Name: At_10percent_PEG_P Parameter: Age (day) Value: 12
  misc_feature: MA Experiment 20000460 PARAMETER Experiment Name: At_10percent_PEG_P Parameter: Organism Value: A. thaliana
  misc_feature: MA Experiment 20000460 PARAMETER Experiment Name: At_10percent_PEG_P Parameter: Plant Line Value: WS
  misc_feature: MA Experiment 20000460 PARAMETER Experiment Name: At_10percent_PEG_P Parameter: Timepoint (day) Value: 12
  misc_feature: MA Experiment 20000460 PARAMETER Experiment Name: At_10percent_PEG_P Parameter: Tissue Value: Whole Plant
  misc_feature: MA Experiment 20000460 PARAMETER Experiment Name: At_10percent_PEG_P Parameter: Treatment Value: 10percent PEG vs. No Treatment
  misc_feature: MA Experiment ID: 20000527 Result: Up-regulated in Transcription
  misc_feature: MA Experiment 20000527 PARAMETER Experiment Name: At_10percent_PEG_P Parameter: Age (day) Value: 20
  misc_feature: MA Experiment 20000527 PARAMETER Experiment Name: At_10percent_PEG_P Parameter: Organism Value: A. thaliana
  misc_feature: MA Experiment 20000527 PARAMETER Experiment Name: At_10percent_PEG_P Parameter: Plant Line Value: WS
  misc_feature: MA Experiment 20000527 PARAMETER Experiment Name: At_10percent_PEG_P Parameter: Timepoint (day) Value: 20
  misc_feature: MA Experiment 20000527 PARAMETER Experiment Name: At_10percent_PEG_P Parameter: Tissue Value: Whole Plant
  misc_feature: MA Experiment 20000527 PARAMETER Experiment Name: At_10percent_PEG_P Parameter: Treatment Value: 10percent PEG vs. No Treatment
  misc_feature: MA Experiment ID: 20000794 Result: Down-regulated in Transcription
  misc_feature: MA Experiment 20000794 PARAMETER Experiment Name: At_Petals_P Parameter: Age (day) Value: 23-25 days
  misc_feature: MA Experiment 20000794 PARAMETER Experiment Name: At_Petals_P Parameter: Plant Line Value: WS
  misc_feature: MA Experiment 20000794 PARAMETER Experiment Name: At_Petals_P Parameter: Tissue Value: Petals vs. Whole plant
gacaaatctccattccaactgtaaccaaaaaaagagaaaagcaaaaaaaacactctctgcgattcacactaagtatctaatgtatcaagatcgtcaaggcgttgtaggaggcggaggcggtggcggttctgcgccacacggaatcatactcgccgtcgttgttgcattagtggtgcttgttccgttcttcatcggagacagtggtgaggccattacagatgcgatcgcagagcttcttagtccggtgggacttctattgcttcctatcatcctcctcctcactatacagtttctctcgtcggaacgtggttccttcgtgtcggccattttctccaccggagaaccagaatcgattcacagggttagcggatctcccgtgggtgttgctctcttcctcgtactgatcttgttcttactctactaccgcttctctatcttcggcggagatgatggttccgatgactgatgcgacgtcgtcttttcagatctagttttttccctctttttcttttttagggaaaacaatatatttatgtctttattcgattttcgtttttattttattttgtttgacagttgaaagtcaaactatatacagcagttgcatttcatgtaggtacgcacgtgtgagtcacgtgagtgatgagtgtactgaggttgtataatttagtaaacatgatgtgattacgattaatatgaatcccgaactttt

SEQ ID NO: 100059 - protein, 154 aa, Arabidopsis thaliana
  peptide (1)..(154): Ceres Seq. ID no. 13604192
  misc_feature (27)..(154): Homolog of NCBI NO: 18397751 NR Description: expressed protein [Arabidopsis thaliana] hypothetical protein [Arabidopsis thaliana]
  misc_feature (36)..(152): Homolog of NCBI NO: 22831149 NR Description: hypothetical protein~similar to Arabidopsis
  misc_feature (42)..(142): Homolog of NCBI NO: 18402822 NR Description: expressed protein [Arabidopsis thaliana]
TNLHSNCNQKKRKAKKTLSAIHTKYLMYQDRQGVVGGGGGGGSAPHGIILAVVVALVVLVPFFIGDSGEAITDAIAELLSPVGLLLLPIILLLTIQFLSSERGSFVSAIFSTGEPESIHRVSGSPVGVALFLVLILFLLYYRFSIFGGDDGSDD

SEQ ID NO: 100060 - protein, 128 aa, Arabidopsis thaliana; identical to SEQ ID NO: 37024
  peptide (1)..(128): Ceres Seq. ID no. 13604193
  misc_feature (1)..(128): Homolog of NCBI NO: 18397751 NR Description: expressed protein [Arabidopsis thaliana] hypothetical protein [Arabidopsis thaliana]
  misc_feature (10)..(126): Homolog of NCBI NO: 22831149 NR Description: hypothetical protein~similar to Arabidopsis
  misc_feature (16)..(116): Homolog of NCBI NO: 18402822 NR Description: expressed protein [Arabidopsis thaliana]

SEQ ID NO: 100061 - DNA, 1434 bp, Arabidopsis thaliana
  misc_feature (1)..(1434): Ceres Seq. ID no. 13604209
  misc_feature: MA Experiment ID: 108434 Result: Down-regulated in Transcription
  misc_feature: MA Experiment 108434 PARAMETER Experiment Name: At_Root_Tips_cDNA_P Parameter: Tissue Value: Root Tips
  misc_feature: MA Experiment ID: 108464 Result: Up-regulated in Transcription
  misc_feature: MA Experiment 108464 PARAMETER Experiment Name: At_Germinating_Seeds_cDNA_P Parameter: Age (day) Value: 4 vs. 0
  misc_feature: MA Experiment 108464 PARAMETER Experiment Name: At_Germinating_Seeds_cDNA_P Parameter: Tissue Value: Germinating Seeds
  misc_feature: MA Experiment ID: 108607 Result: Up-regulated in Transcription
  misc_feature: MA Experiment 108607 PARAMETER Experiment Name: At_100uM_ABA_cDNA_P Parameter: Timepoint (hr) Value: 4
  misc_feature: MA Experiment 108607 PARAMETER Experiment Name: At_100uM_ABA_cDNA_P Parameter: Tissue Value: Aerial
  misc_feature: MA Experiment 108607 PARAMETER Experiment Name: At_100uM_ABA_cDNA_P Parameter: Treatment Value: 100uM ABA vs. No Treatment
  misc_feature: MA Experiment ID: 108668 Result: Up-regulated in Transcription
  misc_feature: MA Experiment 108668 PARAMETER Experiment Name: At_2mM_SA_cDNA_P Parameter: Plant Line Value: WS
  misc_feature: MA Experiment 108668 PARAMETER Experiment Name: At_2mM_SA_cDNA_P Parameter: Timepoint (hr) Value: 6
  misc_feature: MA Experiment 108668 PARAMETER Experiment Name: At_2mM_SA_cDNA_P Parameter: Treatment Value: 2mM SA vs. No Treatment
  misc_feature: MA Experiment ID: 20000069 Result: Up-regulated in Transcription
  misc_feature: MA Experiment 20000069 PARAMETER Experiment Name: At_100uM_ABA_Mutants_cDNA_P Parameter: Plant Line Value: CS23
  misc_feature: MA Experiment 20000069 PARAMETER Experiment Name: At_100uM_ABA_Mutants_cDNA_P Parameter: Timepoint (hr) Value: 6
  misc_feature: MA Experiment 20000069 PARAMETER Experiment Name: At_100uM_ABA_Mutants_cDNA_P Parameter: Tissue Value: Aerial
  misc_feature: MA Experiment 20000069 PARAMETER Experiment Name: At_100uM_ABA_Mutants_cDNA_P Parameter: Treatment Value: 100uM ABA vs. No Treatment
  misc_feature: MA Experiment ID: 20000070 Result: Up-regulated in Transcription
  misc_feature: MA Experiment 20000070 PARAMETER Experiment Name: At_100uM_ABA_Mutants_cDNA_P Parameter: Plant Line Value: CS24
  misc_feature: MA Experiment 20000070 PARAMETER Experiment Name: At_100uM_ABA_Mutants_cDNA_P Parameter: Timepoint (hr) Value: 6
  misc_feature: MA Experiment 20000070 PARAMETER Experiment Name: At_100uM_ABA_Mutants_cDNA_P Parameter: Tissue Value: Aerial
  misc_feature: MA Experiment 20000070 PARAMETER Experiment Name: At_100uM_ABA_Mutants_cDNA_P Parameter: Treatment Value: 100uM ABA vs. No Treatment
  misc_feature: MA Experiment ID: 20000072 Result: Up-regulated in Transcription
  misc_feature: MA Experiment 20000072 PARAMETER Experiment Name: At_100uM_ABA_Mutants_cDNA_P Parameter: Plant Line Value: CS8105
  misc_feature: MA Experiment 20000072 PARAMETER Experiment Name: At_100uM_ABA_Mutants_cDNA_P Parameter: Timepoint (hr) Value: 6
  misc_feature: MA Experiment 20000072 PARAMETER Experiment Name: At_100uM_ABA_Mutants_cDNA_P Parameter: Tissue Value: Aerial
  misc_feature: MA Experiment 20000072 PARAMETER Experiment Name: At_100uM_ABA_Mutants_cDNA_P Parameter: Treatment Value: 100uM ABA vs. No Treatment
  misc_feature: MA Experiment ID: 20000090 Result: Up-regulated in Transcription
  misc_feature: MA Experiment ID: 20000144 Result: Down-regulated in Transcription
  misc_feature: MA Experiment 20000144 PARAMETER Experiment Name: At_42deg_Heat_cDNA_P Parameter: Temperature (deg C) Value: 42 vs. 22
  misc_feature: MA Experiment 20000144 PARAMETER Experiment Name: At_42deg_Heat_cDNA_P Parameter: Timepoint (hr) Value: 1
  misc_feature: MA Experiment 20000144 PARAMETER Experiment Name: At_42deg_Heat_cDNA_P Parameter: Tissue Value: Aerial
  misc_feature: MA Experiment ID: 20000171 Result: Down-regulated in Transcription
  misc_feature: MA Experiment 20000171 PARAMETER Experiment Name: At_42deg_Heat_P Parameter: Age (day) Value: 14
  misc_feature: MA Experiment 20000171 PARAMETER Experiment Name: At_42deg_Heat_P Parameter: Organism Value: A. thaliana
  misc_feature: MA Experiment 20000171 PARAMETER Experiment Name: At_42deg_Heat_P Parameter: Plant Line Value: WS
  misc_feature: MA Experiment 20000171 PARAMETER Experiment Name: At_42deg_Heat_P Parameter: Temperature (deg C) Value: 42 vs. 22
  misc_feature: MA Experiment 20000171 PARAMETER Experiment Name: At_42deg_Heat_P Parameter: Timepoint (hr) Value: 1
  misc_feature: MA Experiment 20000171 PARAMETER Experiment Name: At_42deg_Heat_P Parameter: Tissue Value: Aerial
  misc_feature: MA Experiment ID: 20000173 Result: Down-regulated in Transcription
  misc_feature: MA Experiment 20000173 PARAMETER Experiment Name: At_42deg_Heat_P Parameter: Age (day) Value: 14
  misc_feature: MA Experiment 20000173 PARAMETER Experiment Name: At_42deg_Heat_P Parameter: Organism Value: A. thaliana
  misc_feature: MA Experiment 20000173 PARAMETER Experiment Name: At_42deg_Heat_P Parameter: Plant Line Value: WS
  misc_feature: MA Experiment 20000173 PARAMETER Experiment Name: At_42deg_Heat_P Parameter: Temperature (deg C) Value: 42 vs. 22
  misc_feature: MA Experiment 20000173 PARAMETER Experiment Name: At_42deg_Heat_P Parameter: Timepoint (hr) Value: 6
  misc_feature: MA Experiment 20000173 PARAMETER Experiment Name: At_42deg_Heat_P Parameter: Tissue Value: Aerial
  misc_feature: MA Experiment ID: 20000182 Result: Up-regulated in Transcription
  misc_feature: MA Experiment 20000182 PARAMETER Experiment Name: At_2mM_SA_P Parameter: Age (day) Value: 14
  misc_feature: MA Experiment 20000182 PARAMETER Experiment Name: At_2mM_SA_P Parameter: Organism Value: A. thaliana
  misc_feature: MA Experiment 20000182 PARAMETER Experiment Name: At_2mM_SA_P Parameter: Plant Line Value: WS
  misc_feature: MA Experiment 20000182 PARAMETER Experiment Name: At_2mM_SA_P Parameter: Timepoint (hr) Value: 6
  misc_feature: MA Experiment 20000182 PARAMETER Experiment Name: At_2mM_SA_P Parameter: Tissue Value: Aerial
  misc_feature: MA Experiment 20000182 PARAMETER Experiment Name: At_2mM_SA_P Parameter: Treatment Value: 2mM SA vs. No Treatment
  misc_feature: MA Experiment ID: 20000184 Result: Down-regulated in Transcription
  misc_feature: MA Experiment 20000184 PARAMETER Experiment Name: At_Shoots__P Parameter: Age (day) Value: 7
  misc_feature: MA Experiment 20000184 PARAMETER Experiment Name: At_Shoots__P Parameter: Tissue Value: Shoots vs. Whole Plant
  misc_feature: MA Experiment ID: 20000224 Result: Up-regulated in Transcription
  misc_feature: MA Experiment ID: 20000234 Result: Down-regulated in Transcription
  misc_feature: MA Experiment 20000234 PARAMETER Experiment Name: At_Siliques_P Parameter: Age (day) Value: 21
  misc_feature: MA Experiment 20000234 PARAMETER Experiment Name: At_Siliques_P Parameter: Organism Value: A. thaliana
  misc_feature: MA Experiment 20000234 PARAMETER Experiment Name: At_Siliques_P Parameter: Plant Line Value: WS
  misc_feature: MA Experiment 20000234 PARAMETER Experiment Name: At_Siliques_P Parameter: Tissue Value: Less Than 5mm Siliques vs. Whole Plant
  misc_feature: MA Experiment ID: 20000235 Result: Down-regulated in Transcription
  misc_feature: MA Experiment 20000235 PARAMETER Experiment Name: At_Siliques_P Parameter: Age (day) Value: 21
  misc_feature: MA Experiment 20000235 PARAMETER Experiment Name: At_Siliques_P Parameter: Organism Value: A. thaliana
  misc_feature: MA Experiment 20000235 PARAMETER Experiment Name: At_Siliques_P Parameter: Plant Line Value: WS
  misc_feature: MA Experiment 20000235 PARAMETER Experiment Name: At_Siliques_P Parameter: Tissue Value: 5-10mm Siliques vs. Whole Plant
  misc_feature: MA Experiment ID: 20000264 Result: Down-regulated in Transcription
  misc_feature: MA Experiment 20000264 PARAMETER Experiment Name: At_Open_Flower_P Parameter: Age (day) Value: 21
  misc_feature: MA Experiment 20000264 PARAMETER Experiment Name: At_Open_Flower_P Parameter: Plant Line Value: WS
  misc_feature: MA Experiment 20000264 PARAMETER Experiment Name: At_Open_Flower_P Parameter: Tissue Value: Open Flower vs. Whole Plant
  misc_feature: MA Experiment ID: 20000286 Result: Down-regulated in Transcription
  misc_feature: MA Experiment 20000286 PARAMETER Experiment Name: At_Open_Flower_P Parameter: Age (day) Value: 21
  misc_feature: MA Experiment 20000286 PARAMETER Experiment Name: At_Open_Flower_P Parameter: Plant Line Value: WS
  misc_feature: MA Experiment 20000286 PARAMETER Experiment Name: At_Open_Flower_P Parameter: Tissue Value: Half Open vs. Whole Plant
  misc_feature: MA Experiment ID: 20000438 Result: Down-regulated in Transcription
  misc_feature: MA Experiment 20000438 PARAMETER Experiment Name: At_Shoots__P Parameter: Age (day) Value: 14
  misc_feature: MA Experiment 20000438 PARAMETER Experiment Name: At_Shoots__P Parameter: Tissue Value: Shoots vs. Whole Plant
  misc_feature: MA Experiment ID: 20001560 Result: Down-regulated in Transcription
  misc_feature: MA Experiment 20001560 PARAMETER Experiment Name: At_Drought_Soil_Dry_P Parameter: Age (day) Value: 28
  misc_feature: MA Experiment 20001560 PARAMETER Experiment Name: At_Drought_Soil_Dry_P Parameter: Organism Value: A. thaliana
  misc_feature: MA Experiment 20001560 PARAMETER Experiment Name: At_Drought_Soil_Dry_P Parameter: Plant Line Value: WS
  misc_feature: MA Experiment 20001560 PARAMETER Experiment Name: At_Drought_Soil_Dry_P Parameter: Post Timepoint (hr) Value: None
  misc_feature: MA Experiment 20001560 PARAMETER Experiment Name: At_Drought_Soil_Dry_P Parameter: Post-Treatment Value: None
  misc_feature: MA Experiment 20001560 PARAMETER Experiment Name: At_Drought_Soil_Dry_P Parameter: Timepoint (day) Value: 14
  misc_feature: MA Experiment 20001560 PARAMETER Experiment Name: At_Drought_Soil_Dry_P Parameter: Treatment Value: Drought vs. No Drought
attatatgaatatatatacgtacacaaaatcatacgtttttccacaaatggatcaagaagaggaagagatcgagattcctaattactttatctgcccaatctcactagagatcatgaaagatccagtcacgaccgtttctggcatcacttacgaccgtcaaaacatcgttaaatggctcgaaaaggtcccttcttgtcccgtcacgaagcaacctcttcccttagactccgatcttacacctaaccacatgcttcgccgtcttatccaacactggtgcgtcgagaacgagacacgtggcgttgtcagaatctctacacctcgagttcctcctggaaaacttaacgtcgtcgaagagatcaagaatctcaaaaagttcggccaagaagccttaggaagagaagaaacgttgcagaagcttgaagttttggcaatggacggaaataacagaagattgatgtgtgaatgtggcgtacataagtctttgatcttgttcgtagtcaagtgtactagtgaagacgaagacggacgacgtcgtatcaaaggactagatgagtctcttcgtcttcttcacttgatcggtattccatcaaacgacgcaaaaacaatcttgatggaaaacgatcgagttatggaatcgttgacttgggttttacaccaagaagactttctcagtaaggcttatacaattgtgctattgaggaatctaacggaatacacttcctctcatatcgtagagagattgaatcccgagatttttaaagggatcatagggtttctcaaggatgttgtaaatagtgttaatcggacgagccctaccgtgagagaaacggtacagtcatcatcaaggcctagcttgggaaaaacggaaccatcaaaacttgatcatagtttggtcatcaaacaagcggtgactgccgcgctgatgattcttttagagacttcttcgtggagccgaaaccgatcactccttgtggatctcggtgcggtttctgaactcatcgaactcgaaataagctacactggcgagaaaagaatcacagaacttatgttaggagttttatctcgtttatgttgctgtgcgaacggtagagccgagattcttgctcataggggcggaatcgcggttgtgacaaagcggctattgagggtttcacctgcggcagacgatagagctatctctatcctaactacagtgtcaaaattctcgccggaaaacatggtggtggaagagatggttaatgttgggacggtagagaagctctgttccgttctaggaatggattgtggtttgaacttgaaggagaaagcaaaagagatactaaaagatcattttgatgagtggaagaagtttccatgtattgacataactcttctcactaagctgctaagcatctcacccaaagggccaaagatctaagtaaataatctgctgc

SEQ ID NO: 100062 - protein, 471 aa, Arabidopsis thaliana
  peptide (1)..(471): Ceres Seq. ID no. 13604210
  misc_feature (24)..(98): Pfam Name: U-box domain Pfam Description: U-box domain
  misc_feature (2)..(471): Homolog of NCBI NO: 18399375 NR Description: expressed protein [Arabidopsis thaliana]
  misc_feature (16)..(471): Homolog of NCBI NO: 6671940 NR Description: hypothetical protein [Arabidopsis thaliana]
  misc_feature (295)..(453): Homolog of NCBI NO: 15231222 NR Description: expressed protein [Arabidopsis thaliana]
  misc_feature (20)..(152): Homolog of NCBI NO: 15231222 NR Description: expressed protein [Arabidopsis thaliana]
  misc_feature (24)..(265): Homolog of NCBI NO: 34908566 NR Description: P0505D12.10 [Oryza sativa (japonica
  misc_feature (298)..(458): Homolog of NCBI NO: 34908566 NR Description: P0505D12.10 [Oryza sativa (japonica
  misc_feature (22)..(302): Homolog of NCBI NO: 30013683 NR Description: Avr9/Cf-9 rapidly elicited protein 74 [Nicotiana
  misc_feature (313)..(441): Homolog of NCBI NO: 30013683 NR Description: Avr9/Cf-9 rapidly elicited protein 74 [Nicotiana
  misc_feature (20)..(264): Homolog of NCBI NO: 25408431 NR Description: hypothetical protein At2g35930 [imported] - thaliana >gi|4510376|gb|AAD21464.1| unknown protein [Arabidopsis
  misc_feature (20)..(264): Homolog of NCBI NO: 30686609 NR Description: expressed protein [Arabidopsis thaliana]
YMNIYTYTKSYVFPQMDQEEEEIEIPNYFICPISLEIMKDPVTTVSGITYDRQNIVKWLEKVPSCPVTKQPLPLDSDLTPNHMLRRLIQHWCVENETRGVVRISTPRVPPGKLNVVEEIKNLKKFGQEALGREETLQKLEVLAMDGNNRRLMCECGVHKSLILFVVKCTSEDEDGRRRIKGLDESLRLLHLIGIPSNDAKTILMENDRVMESLTWVLHQEDFLSKAYTIVLLRNLTEYTSSHIVERLNPEIFKGIIGFLKDVVNSVNRTSPTVRETVQSSSRPSLGKTEPSKLDHSLVIKQAVTAALMILLETSSWSRNRSLLVDLGAVSELIELEISYTGEKRITELMLGVLSRLCCCANGRAEILAHRGGIAVVTKRLLRVSPAADDRAISILTTVSKFSPENMVVEEMVNVGTVEKLCSVLGMDCGLNLKEKAKEILKDHFDEWKKFPCIDITLLTKLLSISPKGPKI

SEQ ID NO: 100063 - protein, 470 aa, Arabidopsis thaliana
  peptide (1)..(470): Ceres Seq. ID no. 13604211
  misc_feature (23)..(97): Pfam Name: U-box domain Pfam Description: U-box domain
  misc_feature (1)..(470): Homolog of NCBI NO: 18399375 NR Description: expressed protein [Arabidopsis thaliana]
  misc_feature (15)..(470): Homolog of NCBI NO: 6671940 NR Description: hypothetical protein [Arabidopsis thaliana]
  misc_feature (294)..(452): Homolog of NCBI NO: 15231222 NR Description: expressed protein [Arabidopsis thaliana]
  misc_feature (19)..(151): Homolog of NCBI NO: 15231222 NR Description: expressed protein [Arabidopsis thaliana]
  misc_feature (23)..(264): Homolog of NCBI NO: 34908566 NR Description: P0505D12.10 [Oryza sativa (japonica
  misc_feature (297)..(457): Homolog of NCBI NO: 34908566 NR Description: P0505D12.10 [Oryza sativa (japonica
  misc_feature (21)..(301): Homolog of NCBI NO: 30013683 NR Description: Avr9/Cf-9 rapidly elicited protein 74 [Nicotiana
  misc_feature (312)..(440): Homolog of NCBI NO: 30013683 NR Description: Avr9/Cf-9 rapidly elicited protein 74 [Nicotiana
  misc_feature (19)..(263): Homolog of NCBI NO: 25408431 NR Description: hypothetical protein At2g35930 [imported] - thaliana >gi|4510376|gb|AAD21464.1| unknown protein [Arabidopsis
  misc_feature (19)..(263): Homolog of NCBI NO: 30686609 NR Description: expressed protein [Arabidopsis thaliana]
MNIYTYTKSYVFPQMDQEEEEIEIPNYFICPISLEIMKDPVTTVSGITYDRQNIVKWLEKVPSCPVTKQPLPLDSDLTPNHMLRRLIQHWCVENETRGVVRISTPRVPPGKLNVVEEIKNLKKFGQEALGREETLQKLEVLAMDGNNRRLMCECGVHKSLILFVVKCTSEDEDGRRRIKGLDESLRLLHLIGIPSNDAKTILMENDRVMESLTWVLHQEDFLSKAYTIVLLRNLTEYTSSHIVERLNPEIFKGIIGFLKDVVNSVNRTSPTVRETVQSSSRPSLGKTEPSKLDHSLVIKQAVTAALMILLETSSWSRNRSLLVDLGAVSELIELEISYTGEKRITELMLGVLSRLCCCANGRAEILAHRGGIAVVTKRLLRVSPAADDRAISILTTVSKFSPENMVVEEMVNVGTVEKLCSVLGMDCGLNLKEKAKEILKDHFDEWKKFPCIDITLLTKLLSISPKGPKI

SEQ ID NO: 100064 - protein, 456 aa, Arabidopsis thaliana; identical to SEQ ID NO: 38779
  peptide (1)..(456): Ceres Seq. ID no. 13604212
  misc_feature (9)..(83): Pfam Name: U-box domain Pfam Description: U-box domain
  misc_feature (1)..(456): Homolog of NCBI NO: 18399375 NR Description: expressed protein [Arabidopsis thaliana]
  misc_feature (1)..(456): Homolog of NCBI NO: 6671940 NR Description: hypothetical protein [Arabidopsis thaliana]
  misc_feature (280)..(438): Homolog of NCBI NO: 15231222 NR Description: expressed protein [Arabidopsis thaliana]
  misc_feature (5)..(137): Homolog of NCBI NO: 15231222 NR Description: expressed protein [Arabidopsis thaliana]
  misc_feature (9)..(250): Homolog of NCBI NO: 34908566 NR Description: P0505D12.10 [Oryza sativa (japonica
  misc_feature (283)..(443): Homolog of NCBI NO: 34908566 NR Description: P0505D12.10 [Oryza sativa (japonica
  misc_feature (7)..(287): Homolog of NCBI NO: 30013683 NR Description: Avr9/Cf-9 rapidly elicited protein 74 [Nicotiana
  misc_feature (298)..(426): Homolog of NCBI NO: 30013683 NR Description: Avr9/Cf-9 rapidly elicited protein 74 [Nicotiana
  misc_feature (5)..(249): Homolog of NCBI NO: 25408431 NR Description: hypothetical protein At2g35930 [imported] - thaliana >gi|4510376|gb|AAD21464.1| unknown protein [Arabidopsis
  misc_feature (5)..(249): Homolog of NCBI NO: 30686609 NR Description: expressed protein [Arabidopsis thaliana]

SEQ ID NO: 100065 - DNA, 710 bp, Arabidopsis thaliana
  misc_feature (1)..(710): Ceres Seq. ID no. 13604225
  misc_feature: MA Experiment ID: 108434 Result: Up-regulated in Transcription
  misc_feature: MA Experiment 108434 PARAMETER Experiment Name: At_Root_Tips_cDNA_P Parameter: Tissue Value: Root Tips
  misc_feature: MA Experiment ID: 20000794 Result: Down-regulated in Transcription
  misc_feature: MA Experiment 20000794 PARAMETER Experiment Name: At_Petals_P Parameter: Age (day) Value: 23-25 days
  misc_feature: MA Experiment 20000794 PARAMETER Experiment Name: At_Petals_P Parameter: Plant Line Value: WS
  misc_feature: MA Experiment 20000794 PARAMETER Experiment Name: At_Petals_P Parameter: Tissue Value: Petals vs. Whole plant
gcaagtttgcgcaacaatggcgactacgattccactcttcgcctctttcaaatacgccgatagcttaacggtcgtaggaatctccttctgcaccgcgttggtctgcgaagccatctcatggatcttaatctaccgtaccagctcatacaaatccttgaaatactccattgacaaggccacgaagaaactcgagacaatgaagacagagaatccatcgtcaaagctatccataaagaaatcaaagacgaagaagatcgatcgcgttgaaaccagcttaaaggaatcgagccgagatctgtcactcttcaagttcaaatccggcgccgttgtggcactggttctcttcgtcgtcttcggattgctcaattcactattcgaaggtaaagtcgtcgcgaagcttcctttccatccgatcacgatagtgaagaagatgagtcacaggggactgaaaggtgatgatccgacggattgttccatggcttttctctatctgctgtgttcaattagtatcagaaccaatctacagaaatttctagggttttctccgccgcgaggagctgctggtgctggtggtttgttccccatgcctgatcctaagaccaactgatcactcctttgaggttttttttttttgtttttgttgagatttttggaacaattttcatataaacacacagttacaagtttttgcaatcatctgatgattttgg

SEQ ID NO: 100066 - protein, 201 aa, Arabidopsis thaliana
  peptide (1)..(201): Ceres Seq. ID no. 13604226
  misc_feature (6)..(201): Homolog of NCBI NO: 18399454 NR Description: expressed protein [Arabidopsis thaliana]
  misc_feature (6)..(201): Homolog of NCBI NO: 21553820 NR Description: unknown [Arabidopsis thaliana]
  misc_feature (6)..(201): Homolog of NCBI NO: 15240119 NR Description: expressed protein [Arabidopsis thaliana] dbj|BAA86974.1~gene_id:F15M7.19~similar to unknown protein thaliana] >gi|14532446|gb|AAK63951.1| AT5g06660/F15M7_19
  misc_feature (6)..(201): Homolog of NCBI NO: 21554161 NR Description: unknown [Arabidopsis thaliana]
  misc_feature (15)..(198): Homolog of NCBI NO: 3283893 NR Description: unknown [Homo sapiens]
  misc_feature (15)..(198): Homolog of NCBI NO: 23956188 NR Description: RIKEN cDNA 1190006A08 [Mus musculus] putative membrane protein [Homo sapiens] membrane protein [Homo sapiens]
  misc_feature (4)..(196): Homolog of NCBI NO: 31238723 NR Description: ENSANGP00000016559 [Anopheles gambiae]
  misc_feature (19)..(187): Homolog of NCBI NO: 39587169 NR Description: Hypothetical protein CBG00622 [Caenorhabditis
  misc_feature (18)..(196): Homolog of NCBI NO: 24585112 NR Description: CG10470-PA [Drosophila melanogaster]
  misc_feature (24)..(198): Homolog of NCBI NO: 33328806 NR Description: meg-2-like protein [Rattus norvegicus]
QVCATMATTIPLFASFKYADSLTVVGISFCTALVCEAISWILIYRTSSYKSLKYSIDKATKKLETMKTENPSSKLSIKKSKTKKIDRVETSLKESSRDLSLFKFKSGAVVALVLFVVFGLLNSLFEGKVVAKLPFHPITIVKKMSHRGLKGDDPTDCSMAFLYLLCSISIRTNLQKFLGFSPPRGAAGAGGLFPMPDPKTN

SEQ ID NO: 100067 - protein, 196 aa, Arabidopsis thaliana; identical to SEQ ID NO: 30219
  peptide (1)..(196): Ceres Seq. ID no. 13604227
  misc_feature (1)..(196): Homolog of NCBI NO: 18399454 NR Description: expressed protein [Arabidopsis thaliana]
  misc_feature (1)..(196): Homolog of NCBI NO: 21553820 NR Description: unknown [Arabidopsis thaliana]
  misc_feature (1)..(196): Homolog of NCBI NO: 15240119 NR Description: expressed protein [Arabidopsis thaliana] dbj|BAA86974.1~gene_id:F15M7.19~similar to unknown protein thaliana] >gi|14532446|gb|AAK63951.1| AT5g06660/F15M7_19
  misc_feature (1)..(196): Homolog of NCBI NO: 21554161 NR Description: unknown [Arabidopsis thaliana]
  misc_feature (10)..(193): Homolog of NCBI NO: 3283893 NR Description: unknown [Homo sapiens]
  misc_feature (10)..(193): Homolog of NCBI NO: 23956188 NR Description: RIKEN cDNA 1190006A08 [Mus musculus] putative membrane protein [Homo sapiens] membrane protein [Homo sapiens]
  misc_feature (1)..(191): Homolog of NCBI NO: 31238723 NR Description: ENSANGP00000016559 [Anopheles gambiae]
  misc_feature (14)..(182): Homolog of NCBI NO: 39587169 NR Description: Hypothetical protein CBG00622 [Caenorhabditis
  misc_feature (13)..(191): Homolog of NCBI NO: 24585112 NR Description: CG10470-PA [Drosophila melanogaster]
  misc_feature (19)..(193): Homolog of NCBI NO: 33328806 NR Description: meg-2-like protein [Rattus norvegicus]

SEQ ID NO: 100068 - protein, 136 aa, Arabidopsis thaliana; identical to SEQ ID NO: 30220
  peptide (1)..(136): Ceres Seq. ID no. 13604228
  misc_feature (1)..(136): Homolog of NCBI NO: 18399454 NR Description: expressed protein [Arabidopsis thaliana]
  misc_feature (1)..(136): Homolog of NCBI NO: 21553820 NR Description: unknown [Arabidopsis thaliana]
  misc_feature (1)..(136): Homolog of NCBI NO: 15240119 NR Description: expressed protein [Arabidopsis thaliana] dbj|BAA86974.1~gene_id:F15M7.19~similar to unknown protein thaliana] >gi|14532446|gb|AAK63951.1| AT5g06660/F15M7_19
  misc_feature (1)..(136): Homolog of NCBI NO: 21554161 NR Description: unknown [Arabidopsis thaliana]
  misc_feature (1)..(133): Homolog of NCBI NO: 3283893 NR Description: unknown [Homo sapiens]
  misc_feature (1)..(133): Homolog of NCBI NO: 23956188 NR Description: RIKEN cDNA 1190006A08 [Mus musculus] putative membrane protein [Homo sapiens] membrane protein [Homo sapiens]
  misc_feature (1)..(131): Homolog of NCBI NO: 31238723 NR Description: ENSANGP00000016559 [Anopheles gambiae]
  misc_feature (1)..(122): Homolog of NCBI NO: 39587169 NR Description: Hypothetical protein CBG00622 [Caenorhabditis
  misc_feature (1)..(131): Homolog of NCBI NO: 24585112 NR Description: CG10470-PA [Drosophila melanogaster]
  misc_feature (1)..(133): Homolog of NCBI NO: 33328806 NR Description: meg-2-like protein [Rattus norvegicus]

SEQ ID NO: 100069 - DNA, 1561 bp, Arabidopsis thaliana
  misc_feature (1)..(1561): Ceres Seq. ID no. 13604245
  misc_feature: MA Experiment ID: 108462 Result: Down-regulated in Transcription
  misc_feature: MA Experiment 108462 PARAMETER Experiment Name: At_Germinating_Seeds_cDNA_P Parameter: Age (day) Value: 2 vs. 0
  misc_feature: MA Experiment 108462 PARAMETER Experiment Name: At_Germinating_Seeds_cDNA_P Parameter: Tissue Value: Germinating Seeds
  misc_feature: MA Experiment ID: 108463 Result: Down-regulated in Transcription
  misc_feature: MA Experiment 108463 PARAMETER Experiment Name: At_Germinating_Seeds_cDNA_P Parameter: Age (day) Value: 3 vs. 0
  misc_feature: MA Experiment 108463 PARAMETER Experiment Name: At_Germinating_Seeds_cDNA_P Parameter: Tissue Value: Germinating Seeds
  misc_feature: MA Experiment ID: 108464 Result: Down-regulated in Transcription
  misc_feature: MA Experiment 108464 PARAMETER Experiment Name: At_Germinating_Seeds_cDNA_P Parameter: Age (day) Value: 4 vs. 0
  misc_feature: MA Experiment 108464 PARAMETER Experiment Name: At_Germinating_Seeds_cDNA_P Parameter: Tissue Value: Germinating Seeds
  misc_feature: MA Experiment ID: 108577 Result: Down-regulated in Transcription
  misc_feature: MA Experiment 108577 PARAMETER Experiment Name: At_42deg_Heat_cDNA_P Parameter: Temperature (deg C) Value: 42 vs. 22
  misc_feature: MA Experiment 108577 PARAMETER Experiment Name: At_42deg_Heat_cDNA_P Parameter: Timepoint (hr) Value: 6
  misc_feature: MA Experiment 108577 PARAMETER Experiment Name: At_42deg_Heat_cDNA_P Parameter: Tissue Value: Aerial
  misc_feature: MA Experiment ID: 108579 Result: Down-regulated in Transcription
  misc_feature: MA Experiment 108579 PARAMETER Experiment Name: At_4deg_Cold_cDNA_P Parameter: Temperature (deg C) Value: 4 vs. 22
  misc_feature: MA Experiment 108579 PARAMETER Experiment Name: At_4deg_Cold_cDNA_P Parameter: Timepoint (hr) Value: 6
  misc_feature: MA Experiment 108579 PARAMETER Experiment Name: At_4deg_Cold_cDNA_P Parameter: Tissue Value: Aerial
  misc_feature: MA Experiment ID: 20000070 Result: Up-regulated in Transcription
  misc_feature: MA Experiment 20000070 PARAMETER Experiment Name: At_100uM_ABA_Mutants_cDNA_P Parameter: Plant Line Value: CS24
  misc_feature: MA Experiment 20000070 PARAMETER Experiment Name: At_100uM_ABA_Mutants_cDNA_P Parameter: Timepoint (hr) Value: 6
  misc_feature: MA Experiment 20000070 PARAMETER Experiment Name: At_100uM_ABA_Mutants_cDNA_P Parameter: Tissue Value: Aerial
  misc_feature: MA Experiment 20000070 PARAMETER Experiment Name: At_100uM_ABA_Mutants_cDNA_P Parameter: Treatment Value: 100uM ABA vs. No Treatment
  misc_feature: MA Experiment ID: 20000071 Result: Up-regulated in Transcription
  misc_feature: MA Experiment 20000071 PARAMETER Experiment Name: At_100uM_ABA_Mutants_cDNA_P Parameter: Plant Line Value: CS8104
  misc_feature: MA Experiment 20000071 PARAMETER Experiment Name: At_100uM_ABA_Mutants_cDNA_P Parameter: Timepoint (hr) Value: 6
  misc_feature: MA Experiment 20000071 PARAMETER Experiment Name: At_100uM_ABA_Mutants_cDNA_P Parameter: Tissue Value: Aerial
  misc_feature: MA Experiment 20000071 PARAMETER Experiment Name: At_100uM_ABA_Mutants_cDNA_P Parameter: Treatment Value: 100uM ABA vs. No Treatment
  misc_feature: MA Experiment ID: 20000072 Result: Up-regulated in Transcription
  misc_feature: MA Experiment 20000072 PARAMETER Experiment Name: At_100uM_ABA_Mutants_cDNA_P Parameter: Plant Line Value: CS8105
  misc_feature: MA Experiment 20000072 PARAMETER Experiment Name: At_100uM_ABA_Mutants_cDNA_P Parameter: Timepoint (hr) Value: 6
  misc_feature: MA Experiment 20000072 PARAMETER Experiment Name: At_100uM_ABA_Mutants_cDNA_P Parameter: Tissue Value: Aerial
  misc_feature: MA Experiment 20000072 PARAMETER Experiment Name: At_100uM_ABA_Mutants_cDNA_P Parameter: Treatment Value: 100uM ABA vs. No Treatment
  misc_feature: MA Experiment ID: 20000086 Result: Up-regulated in Transcription
  misc_feature: MA Experiment 20000086 PARAMETER Experiment Name: At_100uM_ABA_Mutants_cDNA_P Parameter: Plant Line Value: CS22
  misc_feature: MA Experiment 20000086 PARAMETER Experiment Name: At_100uM_ABA_Mutants_cDNA_P Parameter: Timepoint (hr) Value: 6
  misc_feature: MA Experiment 20000086 PARAMETER Experiment Name: At_100uM_ABA_Mutants_cDNA_P Parameter: Tissue Value: Aerial
  misc_feature: MA Experiment 20000086 PARAMETER Experiment Name: At_100uM_ABA_Mutants_cDNA_P Parameter: Treatment Value: 100uM ABA vs. No Treatment
  misc_feature: MA Experiment ID: 20000087 Result: Up-regulated in Transcription
  misc_feature: MA Experiment 20000087 PARAMETER Experiment Name: At_100uM_ABA_Mutants_cDNA_P Parameter: Plant Line Value: WS
  misc_feature: MA Experiment 20000087 PARAMETER Experiment Name: At_100uM_ABA_Mutants_cDNA_P Parameter: Timepoint (hr) Value: 6
  misc_feature: MA Experiment 20000087 PARAMETER Experiment Name: At_100uM_ABA_Mutants_cDNA_P Parameter: Tissue Value: Aerial
  misc_feature: MA Experiment 20000087 PARAMETER Experiment Name: At_100uM_ABA_Mutants_cDNA_P Parameter: Treatment Value: 100uM ABA vs. No Treatment
  misc_feature: MA Experiment ID: 20000113 Result: Down-regulated in Transcription
  misc_feature: MA Experiment 20000113 PARAMETER Experiment Name: At_42deg_Heat_cDNA_P Parameter: Temperature (deg C) Value: 42 vs. 22
  misc_feature: MA Experiment 20000113 PARAMETER Experiment Name: At_42deg_Heat_cDNA_P Parameter: Timepoint (hr) Value: 8
  misc_feature: MA Experiment 20000113 PARAMETER Experiment Name: At_42deg_Heat_cDNA_P Parameter: Tissue Value: Aerial
  misc_feature: MA Experiment ID: 20000184 Result: Down-regulated in Transcription
  misc_feature: MA Experiment 20000184 PARAMETER Experiment Name: At_Shoots__P Parameter: Age (day) Value: 7
  misc_feature: MA Experiment 20000184 PARAMETER Experiment Name: At_Shoots__P Parameter: Tissue Value: Shoots vs. Whole Plant
  misc_feature: MA Experiment ID: 20000438 Result: Down-regulated in Transcription
  misc_feature: MA Experiment 20000438 PARAMETER Experiment Name: At_Shoots__P Parameter: Age (day) Value: 14
  misc_feature: MA Experiment 20000438 PARAMETER Experiment Name: At_Shoots__P Parameter: Tissue Value: Shoots vs. Whole Plant
  misc_feature: MA Experiment ID: 20000794 Result: Up-regulated in Transcription
  misc_feature: MA Experiment 20000794 PARAMETER Experiment Name: At_Petals_P Parameter: Age (day) Value: 23-25 days
  misc_feature: MA Experiment 20000794 PARAMETER Experiment Name: At_Petals_P Parameter: Plant Line Value: WS
  misc_feature: MA Experiment 20000794 PARAMETER Experiment Name: At_Petals_P Parameter: Tissue Value: Petals vs. Whole plant
attcgcttttctgaatcctttagagtattgttttctccgtcgaattcgcatgaacacttgagctcaacaagacggcgtggaagtggacggtgaggtagttttttttagtttttgaaagacatggcgcaaaacgggtacttggttccagcggatccttcggcggttgtgacggtgaagaagaaaacgccacaagcgtcgtgggctcttattgacgcgacgggacagagtgagccactcgatgttgataagtatgagatcatgcaccgtgtccagatccacgctcgcgatctccggattctagaccccaatttatcttacccttccactattcttggccgagagagagccattgttctcaatttggagcatatcaaggctattatcacttccgaagaggttttgcttcgggatccgtctgatgaaaatgttattccagttgtggaggagcttcgaagacgcttacctgttggaaatgcatcacacaatggtggtcaaggagacgggaaagagatcgcaggtgctcaaaacgacggtgatactggtgacgaagatgaatccccatttgaatttcgggcgctggaagtagctttggaagcaatctgtagcttcttagctgcaaggacagcagaattagaaacagctgcttatcctgctttggatgagcttacctcaaagattagtagccgtaatttggatagagttcggaaattgaagagtgccatgactcggttgacagctcgggttcaaaaggtaagagatgaactcgaacagttgctggatgatgacgatgatatggcagatctttacctttcaaggaaactttcaagtgcttcctcaccgattagtagtattggtgaaccaaattggtatactacttccccaacaataggctctaagatttcaagagcaagtagagcgagtttagccacagttcatggggatgagaatgatgttgaagaacttgaaatgttactcgaggcatacttcatgcagatcgacagcactttgaacagattaacaacactacgtgagtatattgatgacacagaggactacattaacatccagcttgacaatcatcggaatcagcttattcagttggagctagtgttaagttctggaacagtttgcttatcgatgtactctcttgtcgctggaattttcgggatgaacattccatacacatggaacgacggtcatggatacatgttcaaatacgtggtgggcttgacggggacactttgtgtagtcgtgtttgtgatcataatgtcgtacgctaggtacaaaggacttgtgggatcttgatggctgaatttgggttagatggagagattgtgaaggggcattgggcagatcttgttttcgattattatacttgtggtcgttctgagttttgaacgagcttcacaattattttagttgtcgcatcataaaatttaatcaaacatattgaaaaaagcagaagcattgtgacttgtaattgcaaagataagctctaccatcgattccttacaattagagcatagaaatcaaatttaggatccttgattccttattagct

SEQ ID NO: 100070 - protein, 394 aa, Arabidopsis thaliana; identical to SEQ ID NO: 39360
  peptide (1)..(394): Ceres Seq. ID no. 13604246
  misc_feature (1)..(394): Homolog of NCBI NO: 30698045 NR Description: expressed protein [Arabidopsis thaliana] contains similarity to unknown [Arabidopsis thaliana] >gi|17529326|gb|AAL38890.1| unknown
  misc_feature (1)..(367): Homolog of NCBI NO: 30698047 NR Description: expressed protein [Arabidopsis thaliana]
  misc_feature (1)..(394): Homolog of NCBI NO: 25360941 NR Description: MRS2-7 [Arabidopsis thaliana]
  misc_feature (1)..(394): Homolog of NCBI NO: 30682808 NR Description: expressed protein [Arabidopsis thaliana]
  misc_feature (1)..(394): Homolog of NCBI NO: 11282359 NR Description: hypothetical protein F17I14.120 - Arabidopsis >gi|7671420|emb|CAB89361.1| putative protein [Arabidopsis
  misc_feature (1)..(332): Homolog of NCBI NO: 9758997 NR Description: gene_id:MTH16.11~unknown protein [Arabidopsis
  misc_feature (15)..(393): Homolog of NCBI NO: 25360964 NR Description: MRS2-8 [Arabidopsis thaliana]
  misc_feature (1)..(326): Homolog of NCBI NO: 30682814 NR Description: expressed protein [Arabidopsis thaliana]
  misc_feature (85)..(394): Homolog of NCBI NO: 40539050 NR Description: putative CorA-like Mg2+ transporter protein
  misc_feature (15)..(292): Homolog of NCBI NO: 9759003 NR Description: contains similarity to unknown

SEQ ID NO: 100071 - protein, 348 aa, Arabidopsis thaliana; identical to SEQ ID NO: 39361
  peptide (1)..(348): Ceres Seq. ID no. 13604247
  misc_feature (1)..(348): Homolog of NCBI NO: 30698045 NR Description: expressed protein [Arabidopsis thaliana] contains similarity to unknown [Arabidopsis thaliana] >gi|17529326|gb|AAL38890.1| unknown
  misc_feature (1)..(321): Homolog of NCBI NO: 30698047 NR Description: expressed protein [Arabidopsis thaliana]
  misc_feature (1)..(348): Homolog of NCBI NO: 25360941 NR Description: MRS2-7 [Arabidopsis thaliana]
  misc_feature (1)..(348): Homolog of NCBI NO: 30682808 NR Description: expressed protein [Arabidopsis thaliana]
  misc_feature (1)..(348): Homolog of NCBI NO: 11282359 NR Description: hypothetical protein F17I14.120 - Arabidopsis >gi|7671420|emb|CAB89361.1| putative protein [Arabidopsis
  misc_feature (1)..(286): Homolog of NCBI NO: 9758997 NR Description: gene_id:MTH16.11~unknown protein [Arabidopsis
  misc_feature (1)..(347): Homolog of NCBI NO: 25360964 NR Description: MRS2-8 [Arabidopsis thaliana]
  misc_feature (1)..(280): Homolog of NCBI NO: 30682814 NR Description: expressed protein [Arabidopsis thaliana]
  misc_feature (39)..(348): Homolog of NCBI NO: 40539050 NR Description: putative CorA-like Mg2+ transporter protein
  misc_feature (1)..(246): Homolog of NCBI NO: 9759003 NR Description: contains similarity to unknown

SEQ ID NO: 100072 - DNA, 1696 bp, Arabidopsis thaliana
  misc_feature (1)..(1696): Ceres Seq. ID no. 13604256
  misc_feature: MA Experiment ID: 108434 Result: Up-regulated in Transcription
  misc_feature: MA Experiment 108434 PARAMETER Experiment Name: At_Root_Tips_cDNA_P Parameter: Tissue Value: Root Tips
  misc_feature: MA Experiment ID: 108462 Result: Down-regulated in Transcription
  misc_feature: MA Experiment 108462 PARAMETER Experiment Name: At_Germinating_Seeds_cDNA_P Parameter: Age (day) Value: 2 vs. 0
  misc_feature: MA Experiment 108462 PARAMETER Experiment Name: At_Germinating_Seeds_cDNA_P Parameter: Tissue Value: Germinating Seeds
  misc_feature: MA Experiment ID: 108463 Result: Down-regulated in Transcription
  misc_feature: MA Experiment 108463 PARAMETER Experiment Name: At_Germinating_Seeds_cDNA_P Parameter: Age (day) Value: 3 vs. 0
  misc_feature: MA Experiment 108463 PARAMETER Experiment Name: At_Germinating_Seeds_cDNA_P Parameter: Tissue Value: Germinating Seeds
  misc_feature: MA Experiment ID: 108464 Result: Down-regulated in Transcription
  misc_feature: MA Experiment 108464 PARAMETER Experiment Name: At_Germinating_Seeds_cDNA_P Parameter: Age (day) Value: 4 vs. 0
  misc_feature: MA Experiment 108464 PARAMETER Experiment Name: At_Germinating_Seeds_cDNA_P Parameter: Tissue Value: Germinating Seeds
  misc_feature: MA Experiment ID: 108585 Result: Up-regulated in Transcription
  misc_feature: MA Experiment 108585 PARAMETER Experiment Name: At_5mM_NaNP_cDNA_P Parameter: Timepoint (hr) Value: 6
  misc_feature: MA Experiment 108585 PARAMETER Experiment Name: At_5mM_NaNP_cDNA_P Parameter: Tissue Value: Aerial
  misc_feature: MA Experiment 108585 PARAMETER Experiment Name: At_5mM_NaNP_cDNA_P Parameter: Treatment Value: null
  misc_feature: MA Experiment ID: 20000224 Result: Up-regulated in Transcription
  misc_feature: MA Experiment ID: 20000315 Result: Down-regulated in Transcription
  misc_feature: MA Experiment 20000315 PARAMETER Experiment Name: At_14day_Shoots-Roots_Sub_P Parameter: Age (day) Value: 14
  misc_feature: MA Experiment 20000315 PARAMETER Experiment Name: At_14day_Shoots-Roots_Sub_P Parameter: Organism Value: A. thaliana
  misc_feature: MA Experiment 20000315 PARAMETER Experiment Name: At_14day_Shoots-Roots_Sub_P Parameter: Plant Line Value: WS
  misc_feature: MA Experiment 20000315 PARAMETER Experiment Name: At_14day_Shoots-Roots_Sub_P Parameter: Tissue Value: Shoots vs. Whole Plant
  misc_feature: MA Experiment ID: 20000440 Result: Up-regulated in Transcription
  misc_feature: MA Experiment 20000440 PARAMETER Experiment Name: At_Closed-Flower__Sub_P Parameter: Tissue Value: Closed Flower vs. Whole Plant
cttgttcaaggggttggggtttcgacgctaacattctctctctcagtgaacctttagaagttaaatctgtttcatcaccggaaagtttcactaactcttcttctctctctcggagtattgattcccggcgtttagcaatggaagaaagtagacaactcgaatcgtcgattgatcggctgctgaacgaagagaaacagatgaggctcgcagaaaatgtcgccggaactagaaaagcagctaccgagattcttaagctttgtttcgaagctaaggattggaaacttctcaacgaacagattttgaatctctcgaagaaacgtggtcagcttaagcaggctgtacaatccatggtgcaacaagcaatgcagtatattgatcagacactagacatagaaactcggattgagcttattaagactctaaacaatgtagctgctggaaagatatatgtcgaaatcgagagagctcgtttgaccaagatgcttgctaagattaaggaagaacaaggtttgattgctgaagctgcggatctcatgcaagaagttgctgtggagacatttggtgctatggcaaaaactgagaaaattgctttcattcttgaacaagtccgcttgtgtttggatcaaaaagattttgtccgtgcacaaattttatctaggaagatcaacccaagagtgtttgatgcagataccacgaaggagaaaaagaagcctaaggaaggtgaaaacatggtagaggaggctccggctgatatacctacattgttggtgctaaaacggatttactatgagctaatgattcggtattattctcacaacaatgagtacattgagatatgccgtagctacaaggcgatatatgatatcccttctgtaaaggaaaacccagaacaatggattccagtcctgagaaagatttgctggtttttggccttggcaccacatgatccaatgcaatcgagcctactcaatgcaaccttggaagataaaaagttatcagagattcctgatttcaagatgcttctaaaacagattgttacaatggaggtgattcagtggacatctctctggaataaatacaaggacgagtttgagaatgagaaaaacatgattggaggctctttgggtgacaaagctggtgaagatctcaaactaagaataatcgaacacaatattctcgttgtctcaaagtactactcaaggattacctttaagagacttgcagaacttttatgcctaaccactgaggaagcagagaagcatctatctgaaatggttgtgtccaaagccttgatagcaaaaatcgacagaccatcaggaataatctgcttccagattgttaaagacagcaacgaaatcctcaactcgtgggcaacaaacttggagaagcttttggatcttgttgaaaagagttgtcaccaaattcacaaagaaacaatggttcataaagttgcactaagagcttgagaacccggtctagccacacacatcggtggaaagaatctttcaggctctcgttctaacataatcatttgagttttctttctctgcttggttcgaacacattttttttgtgttctttaggagaccttgcaagattatatacaaaactctcttttttttcctttctccatgtggtctttttaatgtttgttacaatgaaacgaaattataatgcaaaaatataataaattaag

SEQ ID NO: 100073 - protein, 487 aa, Arabidopsis thaliana
  peptide (1)..(487): Ceres Seq. ID no. 13604257
  misc_feature (335)..(445): Pfam Name: PCI domain Pfam Description: PCI domain
  misc_feature (3)..(487): Homolog of NCBI NO: 10177207 NR Description: proteasome regulatory subunit-like [Arabidopsis
  misc_feature (46)..(487): Homolog of NCBI NO: 30698065 NR Description: 26S proteasome regulatory subunit (RPN5), [Arabidopsis thaliana] >gi|17063181|gb|AAL32985.1| [Arabidopsis thaliana] >gi|17063193|gb|AAL32972.1|
  misc_feature (46)..(486): Homolog of NCBI NO: 15242545 NR Description: 26S proteasome regulatory subunit (RPN5), putative
  misc_feature (46)..(487): Homolog of NCBI NO: 27573351 NR Description: putative proteasome regulatory non-ATPase subunit
  misc_feature (220)..(487): Homolog of NCBI NO: 17298157 NR Description: 26S proteasome regulatory particle non-ATPase
  misc_feature (36)..(483): Homolog of NCBI NO: 13385384 NR Description: proteasome 26S non-ATPase subunit 12 [Mus >gi|12841378|dbj|BAB25184.1| unnamed protein product [Mus >gi|12845096|dbj|BAB26619.1| unnamed protein product [Mus
  misc_feature (36)..(483): Homolog of NCBI NO: 12857304 NR Description: unnamed protein product [Mus musculus]
  misc_feature (46)..(483): Homolog of NCBI NO: 27503944 NR Description: Similar to proteasome (prosome, macropain) 26S
  misc_feature (28)..(483): Homolog of NCBI NO: 32422811 NR Description: hypothetical protein [Neurospora crassa]
  misc_feature (257)..(483): Homolog of NCBI NO: 31213181 NR Description: ENSANGP00000021809 [Anopheles gambiae]
CSRGWGFDANILSLSEPLEVKSVSSPESFTNSSSLSRSIDSRRLAMEESRQLESSIDRLLNEEKQMRLAENVAGTRKAATEILKLCFEAKDWKLLNEQILNLSKKRGQLKQAVQSMVQQAMQYIDQTLDIETRIELIKTLNNVAAGKIYVEIERARLTKMLAKIKEEQGLIAEAADLMQEVAVETFGAMAKTEKIAFILEQVRLCLDQKDFVRAQILSRKINPRVFDADTTKEKKKPKEGENMVEEAPADIPTLLVLKRIYYELMIRYYSHNNEYIEICRSYKAIYDIPSVKENPEQWIPVLRKICWFLALAPHDPMQSSLLNATLEDKKLSEIPDFKMLLKQIVTMEVIQWTSLWNKYKDEFENEKNMIGGSLGDKAGEDLKLRIIEHNILVVSKYYSRITFKRLAELLCLTTEEAEKHLSEMVVSKALIAKIDRPSGIICFQIVKDSNEILNSWATNLEKLLDLVEKSCHQIHKETMVHKVALRA

SEQ ID NO: 100074 - protein, 442 aa, Arabidopsis thaliana; identical to SEQ ID NO: 25305
  peptide (1)..(442): Ceres Seq. ID no. 13604258
  misc_feature (290)..(400): Pfam Name: PCI domain Pfam Description: PCI domain
  misc_feature (1)..(442): Homolog of NCBI NO: 10177207 NR Description: proteasome regulatory subunit-like [Arabidopsis
  misc_feature (1)..(442): Homolog of NCBI NO: 30698065 NR Description: 26S proteasome regulatory subunit (RPN5), [Arabidopsis thaliana] >gi|17063181|gb|AAL32985.1| [Arabidopsis thaliana] >gi|17063193|gb|AAL32972.1|
  misc_feature (1)..(441): Homolog of NCBI NO: 15242545 NR Description: 26S proteasome regulatory subunit (RPN5), putative
  misc_feature (1)..(442): Homolog of NCBI NO: 27573351 NR Description: putative proteasome regulatory non-ATPase subunit
  misc_feature (175)..(442): Homolog of NCBI NO: 17298157 NR Description: 26S proteasome regulatory particle non-ATPase
  misc_feature (1)..(438): Homolog of NCBI NO: 13385384 NR Description: proteasome 26S non-ATPase subunit 12 [Mus >gi|12841378|dbj|BAB25184.1| unnamed protein product [Mus >gi|12845096|dbj|BAB26619.1| unnamed protein product [Mus
  misc_feature (1)..(438): Homolog of NCBI NO: 12857304 NR Description: unnamed protein product [Mus musculus]
  misc_feature (1)..(438): Homolog of NCBI NO: 27503944 NR Description: Similar to proteasome (prosome, macropain) 26S
  misc_feature (1)..(438): Homolog of NCBI NO: 32422811 NR Description: hypothetical protein [Neurospora crassa]
  misc_feature (212)..(438): Homolog of NCBI NO: 31213181 NR Description: ENSANGP00000021809 [Anopheles gambiae]

SEQ ID NO: 100075 - protein, 422 aa, Arabidopsis thaliana; identical to SEQ ID NO: 25306
  peptide (1)..(422): Ceres Seq. ID no. 13604259
  misc_feature (270)..(380): Pfam Name: PCI domain Pfam Description: PCI domain
  misc_feature (1)..(422): Homolog of NCBI NO: 10177207 NR Description: proteasome regulatory subunit-like [Arabidopsis
  misc_feature (1)..(422): Homolog of NCBI NO: 30698065 NR Description: 26S proteasome regulatory subunit (RPN5), [Arabidopsis thaliana] >gi|17063181|gb|AAL32985.1| [Arabidopsis thaliana] >gi|17063193|gb|AAL32972.1|
  misc_feature (1)..(421): Homolog of NCBI NO: 15242545 NR Description: 26S proteasome regulatory subunit (RPN5), putative
  misc_feature (1)..(422): Homolog of NCBI NO: 27573351 NR Description: putative proteasome regulatory non-ATPase subunit
  misc_feature (155)..(422): Homolog of NCBI NO: 17298157 NR Description: 26S proteasome regulatory particle non-ATPase
  misc_feature (1)..(418): Homolog of NCBI NO: 13385384 NR Description: proteasome 26S non-ATPase subunit 12 [Mus >gi|12841378|dbj|BAB25184.1| unnamed protein product [Mus >gi|12845096|dbj|BAB26619.1| unnamed protein product [Mus
  misc_feature (1)..(418): Homolog of NCBI NO: 12857304 NR Description: unnamed protein product [Mus musculus]
  misc_feature (1)..(418): Homolog of NCBI NO: 27503944 NR Description: Similar to proteasome (prosome, macropain) 26S
  misc_feature (1)..(418): Homolog of NCBI NO: 32422811 NR Description: hypothetical protein [Neurospora crassa]
  misc_feature (192)..(418): Homolog of NCBI NO: 31213181 NR Description: ENSANGP00000021809 [Anopheles gambiae]

SEQ ID NO: 100076 - DNA, 1701 bp, Arabidopsis thaliana
  misc_feature (1)..(1701): Ceres Seq. ID no. 13604264
  misc_feature: MA Experiment ID: 20000264 Result: Up-regulated in Transcription
  misc_feature: MA Experiment 20000264 PARAMETER Experiment Name: At_Open_Flower_P Parameter: Age (day) Value: 21
  misc_feature: MA Experiment 20000264 PARAMETER Experiment Name: At_Open_Flower_P Parameter: Plant Line Value: WS
  misc_feature: MA Experiment 20000264 PARAMETER Experiment Name: At_Open_Flower_P Parameter: Tissue Value: Open Flower vs. Whole Plant
  misc_feature: MA Experiment ID: 20000286 Result: Up-regulated in Transcription
  misc_feature: MA Experiment 20000286 PARAMETER Experiment Name: At_Open_Flower_P Parameter: Age (day) Value: 21
  misc_feature: MA Experiment 20000286 PARAMETER Experiment Name: At_Open_Flower_P Parameter: Plant Line Value: WS
  misc_feature: MA Experiment 20000286 PARAMETER Experiment Name: At_Open_Flower_P Parameter: Tissue Value: Half Open vs. Whole Plant
  misc_feature: MA Experiment ID: 20000794 Result: Up-regulated in Transcription
  misc_feature: MA Experiment 20000794 PARAMETER Experiment Name: At_Petals_P Parameter: Age (day) Value: 23-25 days
  misc_feature: MA Experiment 20000794 PARAMETER Experiment Name: At_Petals_P Parameter: Plant Line Value: WS
  misc_feature: MA Experiment 20000794 PARAMETER Experiment Name: At_Petals_P Parameter: Tissue Value: Petals vs. Whole plant
aagacacgaaaaagaattttaccgactggaagaagaaaaaacatcaaccagacaaaagaaaagaaaacaaaaacacatcttcgagatcaaacaaaccctaattatcatccatcgtcgccttctcaatatatatggccggaagagcagcgatgctcgttaacgtcgggacggttataatgaccgttttgaccctggctagtttggtcggaggcttcggtgtgaattggggcaatatcgcatcacatccgttgaatcccaacattgttgttcagatgcttaaggacaataagatcaataaagtgaagctttttgacgctgattcatggacgatgaatgctttggctggtacgggcatggaggttatggttggaatccctaataaccttcttgagtctctcgcagatgattacgataatgctaaagattgggttaaagaaaacgtgacccagtatattcgtaagggtggcgtcgacatcaagtacgtagccgtggggaacgagccgtttttgtctgcatacaacggatcgttcttgaagacaacatttccagcgttaaagaacattcacaaggcgttaaaagaagctggacacaccaatataatgaaagccacgatcccacaaaacgcagaagtttaccaatcagccaacgacaagccatcagaaggtgatttccgcaaggatgtcaaacaaacgatgcttgatatcgtcaatttcttccacgaaaacgacttacctttcaccgtcaacatttaccctttccttagtctttacctaaacgagcattttcccgttgagttcgcttttcttgacggtgatggtcagacaatgactgacaaaggaaagaattatgataacgtgtttgacgccaattacgacacacttgtttacgcgttgaagaaggctgggattcacgatatgaagattatcgttggagaggttggatggccaacggatggtcacaaatatgcatcgccgaagctagcggagaaattctatgcagggcttatgaaaagacttgctaaggacggtgggactccaacgaggcctgaaagattagaggtctatctcttcggtttcctcgacgaagacatgaagagtattcttccagggccttttgagagacattggggaatctttagatacgatgggacaccaaagtttatgctagatttcacgggacaaggacgccaaatggtgcccgttgcagctaaaggtgtgcagtacttggaaaaacaatggtgcgtagtgaacaaagacacggtcaatctagacgaagttggtcctgatctagactatgcgtgttaccacggggactgcaccgcgatggaagccgggtcaacttgtagtaagctaaccaaagtccaaaacatatcatacgcatttaacatgtatttccagatacaagaccaagacgttagggcttgcgatttcaaaggagctgcaatgatcaccaaggtcaatgcatccgtgggaagttgcttgttccctgttcagatcgttagtggaagtgatgatttcaggatcaactttgtgttcggaagattcgtcgtctttggacttgttcttcttggattgctcacggttatataatttgtttttttgttgttgtttggttttctttttgcaatttggagggatttattcgacacgattaattgttatttgttattcgttttaaaaatgtttacttttgagttagttc

SEQ ID NO: 100077 - protein, 485 aa, Arabidopsis thaliana
  peptide (1)..(485): Ceres Seq. ID no. 13604265
  misc_feature (28)..(347): Pfam Name: Glycosyl hydrolases family 17 Pfam Description: Glycosyl hydrolases family 17
  misc_feature (1)..(485): Homolog of NCBI NO: 15238256 NR Description: glycosyl hydrolase family 17 [Arabidopsis
  misc_feature (5)..(482): Homolog of NCBI NO: 34395009 NR Description: putative 3-glucanase [Oryza sativa (japonica
  misc_feature (14)..(485): Homolog of NCBI NO: 6223646 NR Description: putative beta-1,3-glucanase [Arabidopsis thaliana]
  misc_feature (11)..(459): Homolog of NCBI NO: 15217739 NR Description: glycosyl hydrolase family 17 [Arabidopsis
  misc_feature (25)..(459): Homolog of NCBI NO: 37223500 NR Description: beta-1,3-glucanase, acidic [Coffea arabica]
  misc_feature (29)..(463): Homolog of NCBI NO: 28269434 NR Description: putative beta-1,3 glucanase [Oryza sativa
  misc_feature (1)..(455): Homolog of NCBI NO: 31415977 NR Description: putative beta-1,3-glucanase [Oryza sativa
  misc_feature (1)..(482): Homolog of NCBI NO: 15238768 NR Description: glycosyl hydrolase family 17 [Arabidopsis
  misc_feature (11)..(459): Homolog of NCBI NO: 15224778 NR Description: glycosyl hydrolase family 17 [Arabidopsis
  misc_feature (8)..(484): Homolog of NCBI NO: 18483232 NR Description: 3-glucanase [Sorghum bicolor]
MAGRAAMLVNVGTVIMTVLTLASLVGGFGVNWGNIASHPLNPNIVVQMLKDNKINKVKLFDADSWTMNALAGTGMEVMVGIPNNLLESLADDYDNAKDWVKENVTQYIRKGGVDIKYVAVGNEPFLSAYNGSFLKTTFPALKNIHKALKEAGHTNIMKATIPQNAEVYQSANDKPSEGDFRKDVKQTMLDIVNFFHENDLPFTVNIYPFLSLYLNEHFPVEFAFLDGDGQTMTDKGKNYDNVFDANYDTLVYALKKAGIHDMKIIVGEVGWPTDGHKYASPKLAEKFYAGLMKRLAKDGGTPTRPERLEVYLFGFLDEDMKSILPGPFERHWGIFRYDGTPKFMLDFTGQGRQMVPVAAKGVQYLEKQWCVVNKDTVNLDEVGPDLDYACYHGDCTAMEAGSTCSKLTKVQNISYAFNMYFQIQDQDVRACDFKGAAMITKVNASVGSCLFPVQIVSGSDDFRINFVFGRFVVFGLVLLGLLTVI

SEQ ID NO: 100078 - protein, 479 aa, Arabidopsis thaliana; identical to SEQ ID NO: 40548
  peptide (1)..(479): Ceres Seq. ID no. 13604266
  misc_feature (22)..(341): Pfam Name: Glycosyl hydrolases family 17 Pfam Description: Glycosyl hydrolases family 17
  misc_feature (1)..(479): Homolog of NCBI NO: 15238256 NR Description: glycosyl hydrolase family 17 [Arabidopsis
  misc_feature (1)..(476): Homolog of NCBI NO: 34395009 NR Description: putative 3-glucanase [Oryza sativa (japonica
  misc_feature (8)..(479): Homolog of NCBI NO: 6223646 NR Description: putative beta-1,3-glucanase [Arabidopsis thaliana]
  misc_feature (5)..(453): Homolog of NCBI NO: 15217739 NR Description: glycosyl hydrolase family 17 [Arabidopsis
  misc_feature (19)..(453): Homolog of NCBI NO: 37223500 NR Description: beta-1,3-glucanase, acidic [Coffea arabica]
  misc_feature (23)..(457): Homolog of NCBI NO: 28269434 NR Description: putative beta-1,3 glucanase [Oryza sativa
  misc_feature (1)..(449): Homolog of NCBI NO: 31415977 NR Description: putative beta-1,3-glucanase [Oryza sativa
  misc_feature (1)..(476): Homolog of NCBI NO: 15238768 NR Description: glycosyl hydrolase family 17 [Arabidopsis
  misc_feature (5)..(453): Homolog of NCBI NO: 15224778 NR Description: glycosyl hydrolase family 17 [Arabidopsis
  misc_feature (2)..(478): Homolog of NCBI NO: 18483232 NR Description: 3-glucanase [Sorghum bicolor]

SEQ ID NO: 100079 - protein, 470 aa, Arabidopsis thaliana; identical to SEQ ID NO: 40549
  peptide (1)..(470): Ceres Seq. ID no. 13604267
  misc_feature (13)..(332): Pfam Name: Glycosyl hydrolases family 17 Pfam Description: Glycosyl hydrolases family 17
  misc_feature (1)..(470): Homolog of NCBI NO: 15238256 NR Description: glycosyl hydrolase family 17 [Arabidopsis
  misc_feature (1)..(467): Homolog of NCBI NO: 34395009 NR Description: putative 3-glucanase [Oryza sativa (japonica
  misc_feature (1)..(470): Homolog of NCBI NO: 6223646 NR Description: putative beta-1,3-glucanase [Arabidopsis thaliana]
  misc_feature (1)..(444): Homolog of NCBI NO: 15217739 NR Description: glycosyl hydrolase family 17 [Arabidopsis
  misc_feature (10)..(444): Homolog of NCBI NO: 37223500 NR Description: beta-1,3-glucanase, acidic [Coffea arabica]
  misc_feature (14)..(448): Homolog of NCBI NO: 28269434 NR Description: putative beta-1,3 glucanase [Oryza sativa
  misc_feature (1)..(440): Homolog of NCBI NO: 31415977 NR Description: putative beta-1,3-glucanase [Oryza sativa
  misc_feature (1)..(467): Homolog of NCBI NO: 15238768 NR Description: glycosyl hydrolase family 17 [Arabidopsis
  misc_feature (1)..(444): Homolog of NCBI NO: 15224778 NR Description: glycosyl hydrolase family 17 [Arabidopsis
  misc_feature (1)..(469): Homolog of NCBI NO: 18483232 NR Description: 3-glucanase [Sorghum bicolor]

SEQ ID NO: 100080 - DNA, 1317 bp, Arabidopsis thaliana
  misc_feature (1)..(1317): Ceres Seq. ID no. 13604298
  misc_feature: MA Experiment ID: 108576 Result: Up-regulated in Transcription
  misc_feature: MA Experiment 108576 PARAMETER Experiment Name: At_42deg_Heat_cDNA_P Parameter: Temperature (deg C) Value: 42 vs. 22
  misc_feature: MA Experiment 108576 PARAMETER Experiment Name: At_42deg_Heat_cDNA_P Parameter: Timepoint (hr) Value: 1
  misc_feature: MA Experiment 108576 PARAMETER Experiment Name: At_42deg_Heat_cDNA_P Parameter: Tissue Value: Aerial
  misc_feature: MA Experiment ID: 20000093 Result: Up-regulated in Transcription
  misc_feature: MA Experiment 20000093 PARAMETER Experiment Name: At_42deg_Heat_cDNA_P Parameter: Temperature (deg C) Value: 42 vs. 22
  misc_feature: MA Experiment 20000093 PARAMETER Experiment Name: At_42deg_Heat_cDNA_P Parameter: Timepoint (hr) Value: 0.5
  misc_feature: MA Experiment 20000093 PARAMETER Experiment Name: At_42deg_Heat_cDNA_P Parameter: Tissue Value: Aerial
  misc_feature: MA Experiment ID: 20000171 Result: Up-regulated in Transcription
  misc_feature: MA Experiment 20000171 PARAMETER Experiment Name: At_42deg_Heat_P Parameter: Age (day) Value: 14
  misc_feature: MA Experiment 20000171 PARAMETER Experiment Name: At_42deg_Heat_P Parameter: Organism Value: A. thaliana
  misc_feature: MA Experiment 20000171 PARAMETER Experiment Name: At_42deg_Heat_P Parameter: Plant Line Value: WS
  misc_feature: MA Experiment 20000171 PARAMETER Experiment Name: At_42deg_Heat_P Parameter: Temperature (deg C) Value: 42 vs. 22
  misc_feature: MA Experiment 20000171 PARAMETER Experiment Name: At_42deg_Heat_P Parameter: Timepoint (hr) Value: 1
  misc_feature: MA Experiment 20000171 PARAMETER Experiment Name: At_42deg_Heat_P Parameter: Tissue Value: Aerial
  misc_feature: MA Experiment ID: 20000173 Result: Up-regulated in Transcription
  misc_feature: MA Experiment 20000173 PARAMETER Experiment Name: At_42deg_Heat_P Parameter: Age (day) Value: 14
  misc_feature: MA Experiment 20000173 PARAMETER Experiment Name: At_42deg_Heat_P Parameter: Organism Value: A. thaliana
  misc_feature: MA Experiment 20000173 PARAMETER Experiment Name: At_42deg_Heat_P Parameter: Plant Line Value: WS
  misc_feature: MA Experiment 20000173 PARAMETER Experiment Name: At_42deg_Heat_P Parameter: Temperature (deg C) Value: 42 vs. 22
  misc_feature: MA Experiment 20000173 PARAMETER Experiment Name: At_42deg_Heat_P Parameter: Timepoint (hr) Value: 6
  misc_feature: MA Experiment 20000173 PARAMETER Experiment Name: At_42deg_Heat_P Parameter: Tissue Value: Aerial
aaaataataagctttggtaaaaccctaaactttcgtttccaagatgcaatttctagcttctctcgtttccaattccagaaagtttggtcggagatgggatcgagctctctcgttgcatcatttctcttcgaatgcgacaccagcttcgatatcaaatccagcgttcgtcgagtttctcagggacaatgggttccagaaacctctagcaattgccatcgcaatgcgttaccctaacctcaaatccctagaacaacctcggtcagtgattcaaatgcttaaaagttacagtttttccgatacccagatccagaaatcgatccgggtccatcctcgaatgatgttctacaacgtggagaaaattctagaacccaaacttcgattctttaaagatattggatttactggctctggtcttggtaagttcgtctctcaaaactcatcagtcgttggtgtaagtctagtgaagaaattgattcctaccgttgagattctgaaatcgattgttgccccaaaacatgaagaccttcctgtcattcttagtagatgtggttggcttcttctcagtagagaccctaacttgtttctcttaccaaacatctcataccttgaaacctgtggaattgttgggtctcagcttgcttctttacttagaagacagccaagaatcttcaatctctctgaggaaaaactcagaggatatgtctctcgtgctttggatcttggttttactttgaactcgaggatgcttgtgcacgctgttatctcgttaagttctttgagcgagaaaacgtttgatcgaaaggttaagttgtttatggctaatggattctctgaagatgagataacagatattatacgaagatctccaggtttgatccggtgctcagaagataagcttacactggggtttgagttttacttgaagagaatggggttagagagggaagctttggcgaaacgtccttgtgtgttgtcgtataatcttgagaagagggtgattcctaggcttaaagttttgcagatcttgagggaaaaagggttgttgttaaaagaggagaagaagaagaagaacatggttggcattgttgagatgactgaggaagcttttctagagaaatatgttgtgagatttggagatgagattgctgaggaactgctggttgcttacaagtgcgtgtgtttagtcgatgaaacgctacttgatcgtatcaagatctaattgtagatttcacaagtccaaacttgaaattttgtcattgtatccaaacttcgctcatccgtaactgtgttgaacattataatttggaagtaactctt

SEQ ID NO: 100081 - protein, 391 aa, Arabidopsis thaliana
  peptide (1)..(391): Ceres Seq. ID no. 13604299
  misc_feature (75)..(357): Pfam Name: mTERF Pfam Description: mTERF
  misc_feature (1)..(391): Homolog of NCBI NO: 15238313 NR Description: expressed protein [Arabidopsis thaliana] emb|CAB62602.1~gene_id:MXK3.18~similar to unknown protein
  misc_feature (1)..(391): Homolog of NCBI NO: 21553423 NR Description: unknown [Arabidopsis thaliana]
  misc_feature (1)..(380): Homolog of NCBI NO: 18415647 NR Description: expressed protein [Arabidopsis thaliana]
  misc_feature (61)..(369): Homolog of NCBI NO: 15218140 NR Description: hypothetical protein [Arabidopsis thaliana]
  misc_feature (61)..(369): Homolog of NCBI NO: 25511650 NR Description: T22I11.2 protein - Arabidopsis thaliana
  misc_feature (28)..(378): Homolog of NCBI NO: 34394750 NR Description: unknown protein [Oryza sativa (japonica
  misc_feature (31)..(361): Homolog of NCBI NO: 39545750 NR Description: OSJNBb0034I13.16 [Oryza sativa (japonica
  misc_feature (73)..(376): Homolog of NCBI NO: 18412304 NR Description: expressed protein [Arabidopsis thaliana]
  misc_feature (27)..(324): Homolog of NCBI NO: 15232683 NR Description: expressed protein [Arabidopsis thaliana]
  misc_feature (42)..(347): Homolog of NCBI NO: 15237856 NR Description: hypothetical protein [Arabidopsis thaliana] gene_id:MRO11.3~pir||T02140~strong similarity to unknown protein
MQFLASLVSNSRKFGRRWDRALSLHHFSSNATPASISNPAFVEFLRDNGFQKPLAIAIAMRYPNLKSLEQPRSVIQMLKSYSFSDTQIQKSIRVHPRMMFYNVEKILEPKLRFFKDIGFTGSGLGKFVSQNSSVVGVSLVKKLIPTVEILKSIVAPKHEDLPVILSRCGWLLLSRDPNLFLLPNISYLETCGIVGSQLASLLRRQPRIFNLSEEKLRGYVSRALDLGFTLNSRMLVHAVISLSSLSEKTFDRKVKLFMANGFSEDEITDIIRRSPGLIRCSEDKLTLGFEFYLKRMGLEREALAKRPCVLSYNLEKRVIPRLKVLQILREKGLLLKEEKKKKNMVGIVEMTEEAFLEKYVVRFGDEIAEELLVAYKCVCLVDETLLDRIKI

SEQ ID NO: 100082 - protein, 332 aa, Arabidopsis thaliana
  peptide (1)..(332): Ceres Seq. ID no. 13604300
  misc_feature (16)..(298): Pfam Name: mTERF Pfam Description: mTERF
  misc_feature (1)..(332): Homolog of NCBI NO: 15238313 NR Description: expressed protein [Arabidopsis thaliana] emb|CAB62602.1~gene_id:MXK3.18~similar to unknown protein
  misc_feature (1)..(332): Homolog of NCBI NO: 21553423 NR Description: unknown [Arabidopsis thaliana]
  misc_feature (1)..(321): Homolog of NCBI NO: 18415647 NR Description: expressed protein [Arabidopsis thaliana]
  misc_feature (2)..(310): Homolog of NCBI NO: 15218140 NR Description: hypothetical protein [Arabidopsis thaliana]
  misc_feature (2)..(310): Homolog of NCBI NO: 25511650 NR Description: T22I11.2 protein - Arabidopsis thaliana
  misc_feature (1)..(319): Homolog of NCBI NO: 34394750 NR Description: unknown protein [Oryza sativa (japonica
  misc_feature (1)..(302): Homolog of NCBI NO: 39545750 NR Description: OSJNBb0034I13.16 [Oryza sativa (japonica
  misc_feature (14)..(317): Homolog of NCBI NO: 18412304 NR Description: expressed protein [Arabidopsis thaliana]
  misc_feature (1)..(265): Homolog of NCBI NO: 15232683 NR Description: expressed protein [Arabidopsis thaliana]
  misc_feature (1)..(288): Homolog of NCBI NO: 15237856 NR Description: hypothetical protein [Arabidopsis thaliana] gene_id:MRO11.3~pir||T02140~strong similarity to unknown protein
MRYPNLKSLEQPRSVIQMLKSYSFSDTQIQKSIRVHPRMMFYNVEKILEPKLRFFKDIGFTGSGLGKFVSQNSSVVGVSLVKKLIPTVEILKSIVAPKHEDLPVILSRCGWLLLSRDPNLFLLPNISYLETCGIVGSQLASLLRRQPRIFNLSEEKLRGYVSRALDLGFTLNSRMLVHAVISLSSLSEKTFDRKVKLFMANGFSEDEITDIIRRSPGLIRCSEDKLTLGFEFYLKRMGLEREALAKRPCVLSYNLEKRVIPRLKVLQILREKGLLLKEEKKKKNMVGIVEMTEEAFLEKYVVRFGDEIAEELLVAYKCVCLVDETLLDRIKI

SEQ ID NO: 100083 - protein, 315 aa, Arabidopsis thaliana
  peptide (1)..(315): Ceres Seq. ID no. 13604301
  misc_feature (1)..(281): Pfam Name: mTERF Pfam Description: mTERF
  misc_feature (1)..(315): Homolog of NCBI NO: 15238313 NR Description: expressed protein [Arabidopsis thaliana] emb|CAB62602.1~gene_id:MXK3.18~similar to unknown protein
  misc_feature (1)..(315): Homolog of NCBI NO: 21553423 NR Description: unknown [Arabidopsis thaliana]
  misc_feature (1)..(304): Homolog of NCBI NO: 18415647 NR Description: expressed protein [Arabidopsis thaliana]
  misc_feature (1)..(293): Homolog of NCBI NO: 15218140 NR Description: hypothetical protein [Arabidopsis thaliana]
  misc_feature (1)..(293): Homolog of NCBI NO: 25511650 NR Description: T22I11.2 protein - Arabidopsis thaliana
  misc_feature (1)..(302): Homolog of NCBI NO: 34394750 NR Description: unknown protein [Oryza sativa (japonica
  misc_feature (1)..(285): Homolog of NCBI NO: 39545750 NR Description: OSJNBb0034I13.16 [Oryza sativa (japonica
  misc_feature (1)..(300): Homolog of NCBI NO: 18412304 NR Description: expressed protein [Arabidopsis thaliana]
  misc_feature (1)..(248): Homolog of NCBI NO: 15232683 NR Description: expressed protein [Arabidopsis thaliana]
  misc_feature (1)..(271): Homolog of NCBI NO: 15237856 NR Description: hypothetical protein [Arabidopsis thaliana] gene_id:MRO11.3~pir||T02140~strong similarity to unknown protein
MLKSYSFSDTQIQKSIRVHPRMMFYNVEKILEPKLRFFKDIGFTGSGLGKFVSQNSSVVGVSLVKKLIPTVEILKSIVAPKHEDLPVILSRCGWLLLSRDPNLFLLPNISYLETCGIVGSQLASLLRRQPRIFNLSEEKLRGYVSRALDLGFTLNSRMLVHAVISLSSLSEKTFDRKVKLFMANGFSEDEITDIIRRSPGLIRCSEDKLTLGFEFYLKRMGLEREALAKRPCVLSYNLEKRVIPRLKVLQILREKGLLLKEEKKKKNMVGIVEMTEEAFLEKYVVRFGDEIAEELLVAYKCVCLVDETLLDRIKI

SEQ ID NO: 100084 - DNA, 970 bp, Arabidopsis thaliana
  misc_feature (1)..(970): Ceres Seq. ID no. 13604302
  misc_feature: MA Experiment ID: 108462 Result: Down-regulated in Transcription
  misc_feature: MA Experiment 108462 PARAMETER Experiment Name: At_Germinating_Seeds_cDNA_P Parameter: Age (day) Value: 2 vs. 0
  misc_feature: MA Experiment 108462 PARAMETER Experiment Name: At_Germinating_Seeds_cDNA_P Parameter: Tissue Value: Germinating Seeds
  misc_feature: MA Experiment ID: 108463 Result: Down-regulated in Transcription
  misc_feature: MA Experiment 108463 PARAMETER Experiment Name: At_Germinating_Seeds_cDNA_P Parameter: Age (day) Value: 3 vs. 0
  misc_feature: MA Experiment 108463 PARAMETER Experiment Name: At_Germinating_Seeds_cDNA_P Parameter: Tissue Value: Germinating Seeds
  misc_feature: MA Experiment ID: 108501 Result: Down-regulated in Transcription
  misc_feature: MA Experiment 108501 PARAMETER Experiment Name: At_ap2_floral_buds_cDNA_P Parameter: Plant Line Value: ap2 (Ler.)
  misc_feature: MA Experiment 108501 PARAMETER Experiment Name: At_ap2_floral_buds_cDNA_P Parameter: Tissue Value: Closed Flower
  misc_feature: MA Experiment ID: 108585 Result: Down-regulated in Transcription
  misc_feature: MA Experiment 108585 PARAMETER Experiment Name: At_5mM_NaNP_cDNA_P Parameter: Timepoint (hr) Value: 6
  misc_feature: MA Experiment 108585 PARAMETER Experiment Name: At_5mM_NaNP_cDNA_P Parameter: Tissue Value: Aerial
  misc_feature: MA Experiment 108585 PARAMETER Experiment Name: At_5mM_NaNP_cDNA_P Parameter: Treatment Value: null
  misc_feature: MA Experiment ID: 20000173 Result: Down-regulated in Transcription
  misc_feature: MA Experiment 20000173 PARAMETER Experiment Name: At_42deg_Heat_P Parameter: Age (day) Value: 14
  misc_feature: MA Experiment 20000173 PARAMETER Experiment Name: At_42deg_Heat_P Parameter: Organism Value: A. thaliana
  misc_feature: MA Experiment 20000173 PARAMETER Experiment Name: At_42deg_Heat_P Parameter: Plant Line Value: WS
  misc_feature: MA Experiment 20000173 PARAMETER Experiment Name: At_42deg_Heat_P Parameter: Temperature (deg C) Value: 42 vs. 22
  misc_feature: MA Experiment 20000173 PARAMETER Experiment Name: At_42deg_Heat_P Parameter: Timepoint (hr) Value: 6
  misc_feature: MA Experiment 20000173 PARAMETER Experiment Name: At_42deg_Heat_P Parameter: Tissue Value: Aerial
  misc_feature: MA Experiment ID: 20000184 Result: Down-regulated in Transcription
  misc_feature: MA Experiment 20000184 PARAMETER Experiment Name: At_Shoots__P Parameter: Age (day) Value: 7
  misc_feature: MA Experiment 20000184 PARAMETER Experiment Name: At_Shoots__P Parameter: Tissue Value: Shoots vs. Whole Plant
  misc_feature: MA Experiment ID: 20000185 Result: Down-regulated in Transcription
  misc_feature: MA Experiment 20000185 PARAMETER Experiment Name: At_Roots__P Parameter: Age (day) Value: 7 vs. 21
  misc_feature: MA Experiment 20000185 PARAMETER Experiment Name: At_Roots__P Parameter: Organism Value: A. thaliana
  misc_feature: MA Experiment 20000185 PARAMETER Experiment Name: At_Roots__P Parameter: Tissue Value: Roots vs. Whole Plant
  misc_feature: MA Experiment ID: 20000234 Result: Down-regulated in Transcription
  misc_feature: MA Experiment 20000234 PARAMETER Experiment Name: At_Siliques_P Parameter: Age (day) Value: 21
  misc_feature: MA Experiment 20000234 PARAMETER Experiment Name: At_Siliques_P Parameter: Organism Value: A. thaliana
  misc_feature: MA Experiment 20000234 PARAMETER Experiment Name: At_Siliques_P Parameter: Plant Line Value: WS
  misc_feature: MA Experiment 20000234 PARAMETER Experiment Name: At_Siliques_P Parameter: Tissue Value: Less Than 5mm Siliques vs. Whole Plant
  misc_feature: MA Experiment ID: 20000235 Result: Down-regulated in Transcription
  misc_feature: MA Experiment 20000235 PARAMETER Experiment Name: At_Siliques_P Parameter: Age (day) Value: 21
  misc_feature: MA Experiment 20000235 PARAMETER Experiment Name: At_Siliques_P Parameter: Organism Value: A. thaliana
  misc_feature: MA Experiment 20000235 PARAMETER Experiment Name: At_Siliques_P Parameter: Plant Line Value: WS
  misc_feature: MA Experiment 20000235 PARAMETER Experiment Name: At_Siliques_P Parameter: Tissue Value: 5-10mm Siliques vs. Whole Plant
  misc_feature: MA Experiment ID: 20000265 Result: Up-regulated in Transcription
  misc_feature: MA Experiment 20000265 PARAMETER Experiment Name: At_Open_Flower_P Parameter: Age (day) Value: 21
  misc_feature: MA Experiment 20000265 PARAMETER Experiment Name: At_Open_Flower_P Parameter: Plant Line Value: WS
  misc_feature: MA Experiment 20000265 PARAMETER Experiment Name: At_Open_Flower_P Parameter: Tissue Value: Closed Flower vs. Whole Plant
  misc_feature: MA Experiment ID: 20000439 Result: Down-regulated in Transcription
  misc_feature: MA Experiment 20000439 PARAMETER Experiment Name: At_Roots__P Parameter: Age (day) Value: 14 vs. 21
  misc_feature: MA Experiment 20000439 PARAMETER Experiment Name: At_Roots__P Parameter: Organism Value: A. thaliana
  misc_feature: MA Experiment 20000439 PARAMETER Experiment Name: At_Roots__P Parameter: Tissue Value: Roots vs. Whole Plant
  misc_feature: MA Experiment ID: 20001247 Result: Down-regulated in Transcription
  misc_feature: MA Experiment 20001247 PARAMETER Experiment Name: At_Far-red-induction_P Parameter: Age (day) Value: 7
  misc_feature: MA Experiment 20001247 PARAMETER Experiment Name: At_Far-red-induction_P Parameter: Light Value: Far-red vs. White
  misc_feature: MA Experiment 20001247 PARAMETER Experiment Name: At_Far-red-induction_P Parameter: Organism Value: A. thaliana
  misc_feature: MA Experiment 20001247 PARAMETER Experiment Name: At_Far-red-induction_P Parameter: Plant Line Value: Columbia
  misc_feature: MA Experiment 20001247 PARAMETER Experiment Name: At_Far-red-induction_P Parameter: Timepoint (hr) Value: 1
  misc_feature: MA Experiment 20001247 PARAMETER Experiment Name: At_Far-red-induction_P Parameter: Tissue Value: Whole Plant
  misc_feature: MA Experiment ID: 20001556 Result: Up-regulated in Transcription
  misc_feature: MA Experiment 20001556 PARAMETER Experiment Name: At_Drought_Soil_Dry_P Parameter: Age (day) Value: 26
  misc_feature: MA Experiment 20001556 PARAMETER Experiment Name: At_Drought_Soil_Dry_P Parameter: Organism Value: A. thaliana
  misc_feature: MA Experiment 20001556 PARAMETER Experiment Name: At_Drought_Soil_Dry_P Parameter: Plant Line Value: WS
  misc_feature: MA Experiment 20001556 PARAMETER Experiment Name: At_Drought_Soil_Dry_P Parameter: Post Timepoint (hr) Value: None
  misc_feature: MA Experiment 20001556 PARAMETER Experiment Name: At_Drought_Soil_Dry_P Parameter: Post-Treatment Value: None
  misc_feature: MA Experiment 20001556 PARAMETER Experiment Name: At_Drought_Soil_Dry_P Parameter: Timepoint (day) Value: 12
  misc_feature: MA Experiment 20001556 PARAMETER Experiment Name: At_Drought_Soil_Dry_P Parameter: Treatment Value: Drought vs. No Drought
  misc_feature: MA Experiment ID: 20001910 Result: Down-regulated in Transcription
  misc_feature: MA Experiment 20001910 PARAMETER Experiment Name: At_Drought_Reproduction_P Parameter: Age (day) Value: 37
  misc_feature: MA Experiment 20001910 PARAMETER Experiment Name: At_Drought_Reproduction_P Parameter: Organism Value: A. thaliana
  misc_feature: MA Experiment 20001910 PARAMETER Experiment Name: At_Drought_Reproduction_P Parameter: Plant Line Value: WS
  misc_feature: MA Experiment 20001910 PARAMETER Experiment Name: At_Drought_Reproduction_P Parameter: Timepoint (day) Value: 7
  misc_feature: MA Experiment 20001910 PARAMETER Experiment Name: At_Drought_Reproduction_P Parameter: Tissue Value: Flowers
  misc_feature: MA Experiment 20001910 PARAMETER Experiment Name: At_Drought_Reproduction_P Parameter: Treatment Value: Drought vs. No Drought
attcaaaattatataaaatgggaagcagcagcgacgagacgccagtggttctcatcacaggatgttctcagggaggaatcggtcacgcgttggcgcgtgagttctcggctaatggttgtcgtgtggtggcgacgagtcgatcgcagaagacgatgactgaattggagaaagattccaagttctttgtgcaagagctcgatgttcagtctgagcagagcgtgagtaaagttgtgtcgaaagttatcgacaaatttggtcagattgatgttttggttaataacgccggagttcagtgtatcggacctttggcggagattccaatttcagccatggattacaccttcaacaccaatgtgctcggttccatgaggatgactcaagctgttgtacctcacatggcgtctaagaaaaagggaaagattgtgaacataggaagtattagcataatggcaccaggaccatgggctggggtttatactgcatcaaaagctgctcttcatgctcttaccgacactttaaggttggagcttaagccatttgggattgatgtaatcaacattgtaccaggaggtattcaatcaaacatagctaactcagggatatcgagtttcaacaatttacctgaattgaaactatacaaaccgttcgaggacgctatccgtgagagagcgtttctgtcgcaaaacataaagccgatacccacagagacttttgcgaaagagactgtttccgtggtgctgaagaaaaacccaccggcttggtactctacaggtaggttatctacagtcatggcgatcatgcaccatataccgattttcatgaaagattttctgttgactaagagttttatgaaaaagggagtaaaacctgaatagttgtgttcttggttagaaactgttttaaatgtatccaacaaagtaaatgtgttgcctaaccatgttacatctttagtaaaaggattaatcaaggt

SEQ ID NO: 100085 - protein, 290 aa, Arabidopsis thaliana
  peptide (1)..(290): Ceres Seq. ID no. 13604303
  misc_feature (6)..(290): Homolog of NCBI NO: 18424923 NR Description: short-chain dehydrogenase/reductase family [Arabidopsis thaliana] >gi|15983432|gb|AAL11584.1|AF424590_1 [Arabidopsis thaliana] >gi|20466145|gb|AAM19994.1|
  misc_feature (6)..(290): Homolog of NCBI NO: 10178182 NR Description: contains similarity to
  misc_feature (51)..(290): Homolog of NCBI NO: 26450169 NR Description: unknown protein [Arabidopsis thaliana]
  misc_feature (9)..(285): Homolog of NCBI NO: 30682984 NR Description: short-chain dehydrogenase/reductase family
  misc_feature (9)..(285): Homolog of NCBI NO: 26453106 NR Description: unknown protein [Arabidopsis thaliana]
  misc_feature (112)..(285): Homolog of NCBI NO: 11358313 NR Description: hypothetical protein T31P16.40 - Arabidopsis >gi|7960724|emb|CAB92046.1| putative protein [Arabidopsis
  misc_feature (9)..(121): Homolog of NCBI NO: 11358313 NR Description: hypothetical protein T31P16.40 - Arabidopsis >gi|7960724|emb|CAB92046.1| putative protein [Arabidopsis
  misc_feature (51)..(284): Homolog of NCBI NO: 38567881 NR Description: OSJNBa0036B21.7 [Oryza sativa (japonica
  misc_feature (14)..(282): Homolog of NCBI NO: 23058177 NR Description: hypothetical protein [Pseudomonas fluorescens
  misc_feature (14)..(282): Homolog of NCBI NO: 32039035 NR Description: hypothetical protein [Pseudomonas aeruginosa
SKLYKMGSSSDETPVVLITGCSQGGIGHALAREFSANGCRVVATSRSQKTMTELEKDSKFFVQELDVQSEQSVSKVVSKVIDKFGQIDVLVNNAGVQCIGPLAEIPISAMDYTFNTNVLGSMRMTQAVVPHMASKKKGKIVNIGSISIMAPGPWAGVYTASKAALHALTDTLRLELKPFGIDVINIVPGGIQSNIANSGISSFNNLPELKLYKPFEDAIRERAFLSQNIKPIPTETFAKETVSVVLKKNPPAWYSTGRLSTVMAIMHHIPIFMKDFLLTKSFMKKGVKPE

SEQ ID NO: 100086 - protein, 285 aa, Arabidopsis thaliana; identical to SEQ ID NO: 28398
  peptide (1)..(285): Ceres Seq. ID no. 13604304
  misc_feature (1)..(285): Homolog of NCBI NO: 18424923 NR Description: short-chain dehydrogenase/reductase family [Arabidopsis thaliana] >gi|15983432|gb|AAL11584.1|AF424590_1 [Arabidopsis thaliana] >gi|20466145|gb|AAM19994.1|
  misc_feature (1)..(285): Homolog of NCBI NO: 10178182 NR Description: contains similarity to
  misc_feature (46)..(285): Homolog of NCBI NO: 26450169 NR Description: unknown protein [Arabidopsis thaliana]
  misc_feature (4)..(280): Homolog of NCBI NO: 30682984 NR Description: short-chain dehydrogenase/reductase family
  misc_feature (4)..(280): Homolog of NCBI NO: 26453106 NR Description: unknown protein [Arabidopsis thaliana]
  misc_feature (107)..(280): Homolog of NCBI NO: 11358313 NR Description: hypothetical protein T31P16.40 - Arabidopsis >gi|7960724|emb|CAB92046.1| putative protein [Arabidopsis
  misc_feature (4)..(116): Homolog of NCBI NO: 11358313 NR Description: hypothetical protein T31P16.40 - Arabidopsis >gi|7960724|emb|CAB92046.1| putative protein [Arabidopsis
  misc_feature (46)..(279): Homolog of NCBI NO: 38567881 NR Description: OSJNBa0036B21.7 [Oryza sativa (japonica
  misc_feature (9)..(277): Homolog of NCBI NO: 23058177 NR Description: hypothetical protein [Pseudomonas fluorescens
  misc_feature (9)..(277): Homolog of NCBI NO: 32039035 NR Description: hypothetical protein [Pseudomonas aeruginosa

SEQ ID NO: 100087 - protein, 240 aa, Arabidopsis thaliana; identical to SEQ ID NO: 28399
  peptide (1)..(240): Ceres Seq. ID no. 13604305
  misc_feature (1)..(240): Homolog of NCBI NO: 18424923 NR Description: short-chain dehydrogenase/reductase family [Arabidopsis thaliana] >gi|15983432|gb|AAL11584.1|AF424590_1 [Arabidopsis thaliana] >gi|20466145|gb|AAM19994.1|
  misc_feature (1)..(240): Homolog of NCBI NO: 10178182 NR Description: contains similarity to
  misc_feature (1)..(240): Homolog of NCBI NO: 26450169 NR Description: unknown protein [Arabidopsis thaliana]
  misc_feature (1)..(235): Homolog of NCBI NO: 30682984 NR Description: short-chain dehydrogenase/reductase family
  misc_feature (1)..(235): Homolog of NCBI NO: 26453106 NR Description: unknown protein [Arabidopsis thaliana]
  misc_feature (62)..(235): Homolog of NCBI NO: 11358313 NR Description: hypothetical protein T31P16.40 - Arabidopsis >gi|7960724|emb|CAB92046.1| putative protein [Arabidopsis
  misc_feature (1)..(71): Homolog of NCBI NO: 11358313 NR Description: hypothetical protein T31P16.40 - Arabidopsis >gi|7960724|emb|CAB92046.1| putative protein [Arabidopsis
  misc_feature (1)..(234): Homolog of NCBI NO: 38567881 NR Description: OSJNBa0036B21.7 [Oryza sativa (japonica
  misc_feature (1)..(232): Homolog of NCBI NO: 23058177 NR Description: hypothetical protein [Pseudomonas fluorescens
  misc_feature (1)..(232): Homolog of NCBI NO: 32039035 NR Description: hypothetical protein [Pseudomonas aeruginosa

SEQ ID NO: 100088 - DNA, 1289 bp, Arabidopsis thaliana
  misc_feature (1)..(1289): Ceres Seq. ID no. 13604316
  misc_feature: MA Experiment ID: 108434 Result: Up-regulated in Transcription
  misc_feature: MA Experiment 108434 PARAMETER Experiment Name: At_Root_Tips_cDNA_P Parameter: Tissue Value: Root Tips
  misc_feature: MA Experiment ID: 108461 Result: Up-regulated in Transcription
  misc_feature: MA Experiment 108461 PARAMETER Experiment Name: At_Germinating_Seeds_cDNA_P Parameter: Age (day) Value: 1 vs. 0
  misc_feature: MA Experiment 108461 PARAMETER Experiment Name: At_Germinating_Seeds_cDNA_P Parameter: Tissue Value: Germinating Seeds
  misc_feature: MA Experiment ID: 108464 Result: Down-regulated in Transcription
  misc_feature: MA Experiment 108464 PARAMETER Experiment Name: At_Germinating_Seeds_cDNA_P Parameter: Age (day) Value: 4 vs. 0
  misc_feature: MA Experiment 108464 PARAMETER Experiment Name: At_Germinating_Seeds_cDNA_P Parameter: Tissue Value: Germinating Seeds
  misc_feature: MA Experiment ID: 108573 Result: Down-regulated in Transcription
  misc_feature: MA Experiment 108573 PARAMETER Experiment Name: At_Drought_cDNA_P Parameter: Timepoint (hr) Value: 6
  misc_feature: MA Experiment 108573 PARAMETER Experiment Name: At_Drought_cDNA_P Parameter: Tissue Value: Aerial
  misc_feature: MA Experiment 108573 PARAMETER Experiment Name: At_Drought_cDNA_P Parameter: Treatment Value: Drought vs. No Drought
  misc_feature: MA Experiment ID: 20000180 Result: Up-regulated in Transcription
  misc_feature: MA Experiment 20000180 PARAMETER Experiment Name: At_Germinating_Seeds_P Parameter: Age (hr) Value: 24 vs. 0
  misc_feature: MA Experiment 20000180 PARAMETER Experiment Name: At_Germinating_Seeds_P Parameter: Tissue Value: Germinating Seeds
  misc_feature: MA Experiment ID: 20001911 Result: Down-regulated in Transcription
  misc_feature: MA Experiment 20001911 PARAMETER Experiment Name: At_Drought_Reproduction_P Parameter: Age (day) Value: 40
  misc_feature: MA Experiment 20001911 PARAMETER Experiment Name: At_Drought_Reproduction_P Parameter: Organism Value: A. thaliana
  misc_feature: MA Experiment 20001911 PARAMETER Experiment Name: At_Drought_Reproduction_P Parameter: Plant Line Value: WS
  misc_feature: MA Experiment 20001911 PARAMETER Experiment Name: At_Drought_Reproduction_P Parameter: Timepoint (day) Value: 10
  misc_feature: MA Experiment 20001911 PARAMETER Experiment Name: At_Drought_Reproduction_P Parameter: Tissue Value: Flowers
  misc_feature: MA Experiment 20001911 PARAMETER Experiment Name: At_Drought_Reproduction_P Parameter: Treatment Value: Drought vs. No Drought
atcttaccctaaaaaccacatttcttaacttcctcaataaaaaaaagaaaagcttcaccctttaattttaccctcaaccccaaaacaaaaaccccttcctccacgagggcatacagaaatatcaaagacccaatctttctttcacttccccaatctctagatgacaatctaacgatacagttccttttagatcgattaccaaatacaaaggatcaatttttcttacatgaacactctgttgtaatggcagaggagaatctagaactgagtcttttatgtacagagagcaacgttgatgatgagggcatgattgttgacgaaactccgattgaaatttcgattcctcagatgggtttttctcaatcggagagtgaggagattatcatggagatggtggagaaggagaagcagcatttgccaagtgatgattacatcaagagacttagaagtggagatttggatttgaatgttggaagaagagatgccctcaattggatttggaaggcttgtgaagtacaccagtttggaccattgtgtttttgcttagcaatgaactacttggatcgattcttatcggttcatgatttgcctagtggcaaaggttggatattgcagttgttggctgtggcttgtttatcattggcagccaaaattgaagaaactgaagttccaatgttgatagatcttcaggttggagatcctcagtttgtgtttgaggctaaatcagtccaaagaatggagcttttggtgttgaacaaattgaaatggagattgagagcaataactccatgctcatacataagatatttcctgagaaagatgagtaaatgtgatcaagaaccatccaacacattgatatctagatcattacaagtgatagccagcacaaccaaaggtattgactttttggagtttagaccttctgaagttgctgctgctgtggcactttctgtttctggagaattgcagagagtacactttgacaactcttccttctctcctcttttctcactacttcaaaaggagagagtgaagaagataggggaaatgatagagagtgatggctcagacttatgttcacaaacacccaatggggttttagaagtatcggcttgttgtttcagctttaagacccatgattcttcttcttcttatacacatctttcttaaaaaaaaaactgtttttttcttacattattataatcagtatgatgtctgatgagaggttgaaaaaagaggacaataaatcaaagcaaaaatttttaaataaataaaagtgtattaatttc

SEQ ID NO: 100089 - protein, 308 aa, Arabidopsis thaliana
  peptide (1)..(308): Ceres Seq. ID no. 13604317
  misc_feature (45)..(178): Pfam Name: Cyclin, N-terminal domain Pfam Description: Cyclin, N-terminal domain
  misc_feature (1)..(308): Homolog of NCBI NO: 15238462 NR Description: cyclin, putative [Arabidopsis thaliana]
  misc_feature (1)..(308): Homolog of NCBI NO: 4688615 NR Description: D-type cyclin [Arabidopsis thaliana]
  misc_feature (1)..(308): Homolog of NCBI NO: 21536631 NR Description: D-type cyclin [Arabidopsis thaliana]
  misc_feature (15)..(308): Homolog of NCBI NO: 30683167 NR Description: cyclin family [Arabidopsis thaliana]
  misc_feature (15)..(303): Homolog of NCBI NO: 11357238 NR Description: cyclin protein-like - Arabidopsis thaliana
  misc_feature (9)..(299): Homolog of NCBI NO: 4160298 NR Description: cyclin D2.1 protein [Nicotiana tabacum]
  misc_feature (22)..(303): Homolog of NCBI NO: 7484663 NR Description: cyclin D-like protein - red goosefoot
  misc_feature (9)..(299): Homolog of NCBI NO: 22091622 NR Description: cyclin D2 [Daucus carota]
  misc_feature (32)..(272): Homolog of NCBI NO: 1076312 NR Description: cyclin delta-2 - Arabidopsis thaliana
  misc_feature (32)..(272): Homolog of NCBI NO: 15227224 NR Description: cyclin delta-2 (CYCD2) [Arabidopsis thaliana]
MAEENLELSLLCTESNVDDEGMIVDETPIEISIPQMGFSQSESEEIIMEMVEKEKQHLPSDDYIKRLRSGDLDLNVGRRDALNWIWKACEVHQFGPLCFCLAMNYLDRFLSVHDLPSGKGWILQLLAVACLSLAAKIEETEVPMLIDLQVGDPQFVFEAKSVQRMELLVLNKLKWRLRAITPCSYIRYFLRKMSKCDQEPSNTLISRSLQVIASTTKGIDFLEFRPSEVAAAVALSVSGELQRVHFDNSSFSPLFSLLQKERVKKIGEMIESDGSDLCSQTPNGVLEVSACCFSFKTHDSSSSYTHLS

SEQ ID NO: 100090 - protein, 287 aa, Arabidopsis thaliana
  peptide (1)..(287): Ceres Seq. ID no. 13604318
  misc_feature (24)..(157): Pfam Name: Cyclin, N-terminal domain Pfam Description: Cyclin, N-terminal domain
  misc_feature (1)..(287): Homolog of NCBI NO: 15238462 NR Description: cyclin, putative [Arabidopsis thaliana]
  misc_feature (1)..(287): Homolog of NCBI NO: 4688615 NR Description: D-type cyclin [Arabidopsis thaliana]
  misc_feature (1)..(287): Homolog of NCBI NO: 21536631 NR Description: D-type cyclin [Arabidopsis thaliana]
  misc_feature (1)..(287): Homolog of NCBI NO: 30683167 NR Description: cyclin family [Arabidopsis thaliana]
  misc_feature (1)..(282): Homolog of NCBI NO: 11357238 NR Description: cyclin protein-like - Arabidopsis thaliana
  misc_feature (1)..(278): Homolog of NCBI NO: 4160298 NR Description: cyclin D2.1 protein [Nicotiana tabacum]
  misc_feature (1)..(282): Homolog of NCBI NO: 7484663 NR Description: cyclin D-like protein - red goosefoot
  misc_feature (1)..(278): Homolog of NCBI NO: 22091622 NR Description: cyclin D2 [Daucus carota]
  misc_feature (11)..(251): Homolog of NCBI NO: 1076312 NR Description: cyclin delta-2 - Arabidopsis thaliana
  misc_feature (11)..(251): Homolog of NCBI NO: 15227224 NR Description: cyclin delta-2 (CYCD2) [Arabidopsis thaliana]
MIVDETPIEISIPQMGFSQSESEEIIMEMVEKEKQHLPSDDYIKRLRSGDLDLNVGRRDALNWIWKACEVHQFGPLCFCLAMNYLDRFLSVHDLPSGKGWILQLLAVACLSLAAKIEETEVPMLIDLQVGDPQFVFEAKSVQRMELLVLNKLKWRLRAITPCSYIRYFLRKMSKCDQEPSNTLISRSLQVIASTTKGIDFLEFRPSEVAAAVALSVSGELQRVHFDNSSFSPLFSLLQKERVKKIGEMIESDGSDLCSQTPNGVLEVSACCFSFKTHDSSSSYTHLS

SEQ ID NO: 100091 - protein, 273 aa, Arabidopsis thaliana
  peptide (1)..(273): Ceres Seq. ID no. 13604319
  misc_feature (10)..(143): Pfam Name: Cyclin, N-terminal domain Pfam Description: Cyclin, N-terminal domain
  misc_feature (1)..(273): Homolog of NCBI NO: 15238462 NR Description: cyclin, putative [Arabidopsis thaliana]
  misc_feature (1)..(273): Homolog of NCBI NO: 4688615 NR Description: D-type cyclin [Arabidopsis thaliana]
  misc_feature (1)..(273): Homolog of NCBI NO: 21536631 NR Description: D-type cyclin [Arabidopsis thaliana]
  misc_feature (1)..(273): Homolog of NCBI NO: 30683167 NR Description: cyclin family [Arabidopsis thaliana]
  misc_feature (1)..(268): Homolog of NCBI NO: 11357238 NR Description: cyclin protein-like - Arabidopsis thaliana
  misc_feature (1)..(264): Homolog of NCBI NO: 4160298 NR Description: cyclin D2.1 protein [Nicotiana tabacum]
  misc_feature (1)..(268): Homolog of NCBI NO: 7484663 NR Description: cyclin D-like protein - red goosefoot
  misc_feature (1)..(264): Homolog of NCBI NO: 22091622 NR Description: cyclin D2 [Daucus carota]
  misc_feature (1)..(237): Homolog of NCBI NO: 1076312 NR Description: cyclin delta-2 - Arabidopsis thaliana
  misc_feature (1)..(237): Homolog of NCBI NO: 15227224 NR Description: cyclin delta-2 (CYCD2) [Arabidopsis thaliana]
MGFSQSESEEIIMEMVEKEKQHLPSDDYIKRLRSGDLDLNVGRRDALNWIWKACEVHQFGPLCFCLAMNYLDRFLSVHDLPSGKGWILQLLAVACLSLAAKIEETEVPMLIDLQVGDPQFVFEAKSVQRMELLVLNKLKWRLRAITPCSYIRYFLRKMSKCDQEPSNTLISRSLQVIASTTKGIDFLEFRPSEVAAAVALSVSGELQRVHFDNSSFSPLFSLLQKERVKKIGEMIESDGSDLCSQTPNGVLEVSACCFSFKTHDSSSSYTHLS

SEQ ID NO: 100092 - DNA, 1293 bp, Arabidopsis thaliana
  misc_feature (1)..(1293): Ceres Seq. ID no. 13604335
  misc_feature: MA Experiment ID: 108434 Result: Up-regulated in Transcription
  misc_feature: MA Experiment 108434 PARAMETER Experiment Name: At_Root_Tips_cDNA_P Parameter: Tissue Value: Root Tips
  misc_feature: MA Experiment ID: 108572 Result: Up-regulated in Transcription
  misc_feature: MA Experiment 108572 PARAMETER Experiment Name: At_Drought_cDNA_P Parameter: Timepoint (hr) Value: 1
  misc_feature: MA Experiment 108572 PARAMETER Experiment Name: At_Drought_cDNA_P Parameter: Tissue Value: Aerial
  misc_feature: MA Experiment 108572 PARAMETER Experiment Name: At_Drought_cDNA_P Parameter: Treatment Value: Drought vs. No Drought
  misc_feature: MA Experiment ID: 108607 Result: Up-regulated in Transcription
  misc_feature: MA Experiment 108607 PARAMETER Experiment Name: At_100uM_ABA_cDNA_P Parameter: Timepoint (hr) Value: 4
  misc_feature: MA Experiment 108607 PARAMETER Experiment Name: At_100uM_ABA_cDNA_P Parameter: Tissue Value: Aerial
  misc_feature: MA Experiment 108607 PARAMETER Experiment Name: At_100uM_ABA_cDNA_P Parameter: Treatment Value: 100uM ABA vs. No Treatment
  misc_feature: MA Experiment ID: 108668 Result: Down-regulated in Transcription
  misc_feature: MA Experiment 108668 PARAMETER Experiment Name: At_2mM_SA_cDNA_P Parameter: Plant Line Value: WS
  misc_feature: MA Experiment 108668 PARAMETER Experiment Name: At_2mM_SA_cDNA_P Parameter: Timepoint (hr) Value: 6
  misc_feature: MA Experiment 108668 PARAMETER Experiment Name: At_2mM_SA_cDNA_P Parameter: Treatment Value: 2mM SA vs. No Treatment
  misc_feature: MA Experiment ID: 20000069 Result: Up-regulated in Transcription
  misc_feature: MA Experiment 20000069 PARAMETER Experiment Name: At_100uM_ABA_Mutants_cDNA_P Parameter: Plant Line Value: CS23
  misc_feature: MA Experiment 20000069 PARAMETER Experiment Name: At_100uM_ABA_Mutants_cDNA_P Parameter: Timepoint (hr) Value: 6
  misc_feature: MA Experiment 20000069 PARAMETER Experiment Name: At_100uM_ABA_Mutants_cDNA_P Parameter: Tissue Value: Aerial
  misc_feature: MA Experiment 20000069 PARAMETER Experiment Name: At_100uM_ABA_Mutants_cDNA_P Parameter: Treatment Value: 100uM ABA vs. No Treatment
  misc_feature: MA Experiment ID: 20000071 Result: Up-regulated in Transcription
  misc_feature: MA Experiment 20000071 PARAMETER Experiment Name: At_100uM_ABA_Mutants_cDNA_P Parameter: Plant Line Value: CS8104
  misc_feature: MA Experiment 20000071 PARAMETER Experiment Name: At_100uM_ABA_Mutants_cDNA_P Parameter: Timepoint (hr) Value: 6
  misc_feature: MA Experiment 20000071 PARAMETER Experiment Name: At_100uM_ABA_Mutants_cDNA_P Parameter: Tissue Value: Aerial
  misc_feature: MA Experiment 20000071 PARAMETER Experiment Name: At_100uM_ABA_Mutants_cDNA_P Parameter: Treatment Value: 100uM ABA vs. No Treatment
  misc_feature: MA Experiment ID: 20000113 Result: Down-regulated in Transcription
  misc_feature: MA Experiment 20000113 PARAMETER Experiment Name: At_42deg_Heat_cDNA_P Parameter: Temperature (deg C) Value: 42 vs. 22
  misc_feature: MA Experiment 20000113 PARAMETER Experiment Name: At_42deg_Heat_cDNA_P Parameter: Timepoint (hr) Value: 8
  misc_feature: MA Experiment 20000113 PARAMETER Experiment Name: At_42deg_Heat_cDNA_P Parameter: Tissue Value: Aerial
  misc_feature: MA Experiment ID: 20000144 Result: Down-regulated in Transcription
  misc_feature: MA Experiment 20000144 PARAMETER Experiment Name: At_42deg_Heat_cDNA_P Parameter: Temperature (deg C) Value: 42 vs. 22
  misc_feature: MA Experiment 20000144 PARAMETER Experiment Name: At_42deg_Heat_cDNA_P Parameter: Timepoint (hr) Value: 1
  misc_feature: MA Experiment 20000144 PARAMETER Experiment Name: At_42deg_Heat_cDNA_P Parameter: Tissue Value: Aerial
  misc_feature: MA Experiment ID: 20000166 Result: Up-regulated in Transcription
  misc_feature: MA Experiment 20000166 PARAMETER Experiment Name: At_100uM_ABA_P Parameter: Age (day) Value: 14
  misc_feature: MA Experiment 20000166 PARAMETER Experiment Name: At_100uM_ABA_P Parameter: Organism Value: A. thaliana
  misc_feature: MA Experiment 20000166 PARAMETER Experiment Name: At_100uM_ABA_P Parameter: Plant Line Value: WS
  misc_feature: MA Experiment 20000166 PARAMETER Experiment Name: At_100uM_ABA_P Parameter: Timepoint (hr) Value: 1
  misc_feature: MA Experiment 20000166 PARAMETER Experiment Name: At_100uM_ABA_P Parameter: Tissue Value: Aerial
  misc_feature: MA Experiment 20000166 PARAMETER Experiment Name: At_100uM_ABA_P Parameter: Treatment Value: 100uM ABA vs. No Treatment
  misc_feature: MA Experiment ID: 20000173 Result: Down-regulated in Transcription
  misc_feature: MA Experiment 20000173 PARAMETER Experiment Name: At_42deg_Heat_P Parameter: Age (day) Value: 14
  misc_feature: MA Experiment 20000173 PARAMETER Experiment Name: At_42deg_Heat_P Parameter: Organism Value: A. thaliana
  misc_feature: MA Experiment 20000173 PARAMETER Experiment Name: At_42deg_Heat_P Parameter: Plant Line Value: WS
  misc_feature: MA Experiment 20000173 PARAMETER Experiment Name: At_42deg_Heat_P Parameter: Temperature (deg C) Value: 42 vs. 22
  misc_feature: MA Experiment 20000173 PARAMETER Experiment Name: At_42deg_Heat_P Parameter: Timepoint (hr) Value: 6
  misc_feature: MA Experiment 20000173 PARAMETER Experiment Name: At_42deg_Heat_P Parameter: Tissue Value: Aerial
  misc_feature: MA Experiment ID: 20000185 Result: Up-regulated in Transcription
  misc_feature: MA Experiment 20000185 PARAMETER Experiment Name: At_Roots__P Parameter: Age (day) Value: 7 vs. 21
  misc_feature: MA Experiment 20000185 PARAMETER Experiment Name: At_Roots__P Parameter: Organism Value: A. thaliana
  misc_feature: MA Experiment 20000185 PARAMETER Experiment Name: At_Roots__P Parameter: Tissue Value: Roots vs. Whole Plant
  misc_feature: MA Experiment ID: 20000227 Result: Down-regulated in Transcription
  misc_feature: MA Experiment 20000227 PARAMETER Experiment Name: At_Root-Tips-vs-Tops_P Parameter: Tissue Value: Root Tips vs. Root Tops
  misc_feature: MA Experiment ID: 20000234 Result: Up-regulated in Transcription
  misc_feature: MA Experiment 20000234 PARAMETER Experiment Name: At_Siliques_P Parameter: Age (day) Value: 21
  misc_feature: MA Experiment 20000234 PARAMETER Experiment Name: At_Siliques_P Parameter: Organism Value: A. thaliana
  misc_feature: MA Experiment 20000234 PARAMETER Experiment Name: At_Siliques_P Parameter: Plant Line Value: WS
  misc_feature: MA Experiment 20000234 PARAMETER Experiment Name: At_Siliques_P Parameter: Tissue Value: Less Than 5mm Siliques vs. Whole Plant
  misc_feature: MA Experiment ID: 20000235 Result: Up-regulated in Transcription
  misc_feature: MA Experiment 20000235 PARAMETER Experiment Name: At_Siliques_P Parameter: Age (day) Value: 21
  misc_feature: MA Experiment 20000235 PARAMETER Experiment Name: At_Siliques_P Parameter: Organism Value: A. thaliana
  misc_feature: MA Experiment 20000235 PARAMETER Experiment Name: At_Siliques_P Parameter: Plant Line Value: WS
  misc_feature: MA Experiment 20000235 PARAMETER Experiment Name: At_Siliques_P Parameter: Tissue Value: 5-10mm Siliques vs. Whole Plant
  misc_feature: MA Experiment ID: 20000264 Result: Up-regulated in Transcription
  misc_feature: MA Experiment 20000264 PARAMETER Experiment Name: At_Open_Flower_P Parameter: Age (day) Value: 21
  misc_feature: MA Experiment 20000264 PARAMETER Experiment Name: At_Open_Flower_P Parameter: Plant Line Value: WS
  misc_feature: MA Experiment 20000264 PARAMETER Experiment Name: At_Open_Flower_P Parameter: Tissue Value: Open Flower vs. Whole Plant
  misc_feature: MA Experiment ID: 20000265 Result: Up-regulated in Transcription
  misc_feature: MA Experiment 20000265 PARAMETER Experiment Name: At_Open_Flower_P Parameter: Age (day) Value: 21
  misc_feature: MA Experiment 20000265 PARAMETER Experiment Name: At_Open_Flower_P Parameter: Plant Line Value: WS
  misc_feature: MA Experiment 20000265 PARAMETER Experiment Name: At_Open_Flower_P Parameter: Tissue Value: Closed Flower vs. Whole Plant
  misc_feature: MA Experiment ID: 20000286 Result: Up-regulated in Transcription
  misc_feature: MA Experiment 20000286 PARAMETER Experiment Name: At_Open_Flower_P Parameter: Age (day) Value: 21
  misc_feature: MA Experiment 20000286 PARAMETER Experiment Name: At_Open_Flower_P Parameter: Plant Line Value: WS
  misc_feature: MA Experiment 20000286 PARAMETER Experiment Name: At_Open_Flower_P Parameter: Tissue Value: Half Open vs. Whole Plant
  misc_feature: MA Experiment ID: 20000438 Result: Up-regulated in Transcription
  misc_feature: MA Experiment 20000438 PARAMETER Experiment Name: At_Shoots__P Parameter: Age (day) Value: 14
  misc_feature: MA Experiment 20000438 PARAMETER Experiment Name: At_Shoots__P Parameter: Tissue Value: Shoots vs. Whole Plant
  misc_feature: MA Experiment ID: 20000439 Result: Up-regulated in Transcription
  misc_feature: MA Experiment 20000439 PARAMETER Experiment Name: At_Roots__P Parameter: Age (day) Value: 14 vs. 21
  misc_feature: MA Experiment 20000439 PARAMETER Experiment Name: At_Roots__P Parameter: Organism Value: A. thaliana
  misc_feature: MA Experiment 20000439 PARAMETER Experiment Name: At_Roots__P Parameter: Tissue Value: Roots vs. Whole Plant
  misc_feature: MA Experiment ID: 20000451 Result: Up-regulated in Transcription
  misc_feature: MA Experiment 20000451 PARAMETER Experiment Name: At_CS6879_Shoots-Roots_P Parameter: Age (day) Value: 14
  misc_feature: MA Experiment 20000451 PARAMETER Experiment Name: At_CS6879_Shoots-Roots_P Parameter: Organism Value: A. thaliana
  misc_feature: MA Experiment 20000451 PARAMETER Experiment Name: At_CS6879_Shoots-Roots_P Parameter: Plant Line Value: CS6879 vs. WS
  misc_feature: MA Experiment 20000451 PARAMETER Experiment Name: At_CS6879_Shoots-Roots_P Parameter: Tissue Value: Roots
  misc_feature: MA Experiment ID: 20000794 Result: Up-regulated in Transcription
  misc_feature: MA Experiment 20000794 PARAMETER Experiment Name: At_Petals_P Parameter: Age (day) Value: 23-25 days
  misc_feature: MA Experiment 20000794 PARAMETER Experiment Name: At_Petals_P Parameter: Plant Line Value: WS
  misc_feature: MA Experiment 20000794 PARAMETER Experiment Name: At_Petals_P Parameter: Tissue Value: Petals vs. Whole plant
  misc_feature: MA Experiment ID: 20001560 Result: Up-regulated in Transcription
  misc_feature: MA Experiment 20001560 PARAMETER Experiment Name: At_Drought_Soil_Dry_P Parameter: Age (day) Value: 28
  misc_feature: MA Experiment 20001560 PARAMETER Experiment Name: At_Drought_Soil_Dry_P Parameter: Organism Value: A. thaliana
  misc_feature: MA Experiment 20001560 PARAMETER Experiment Name: At_Drought_Soil_Dry_P Parameter: Plant Line Value: WS
  misc_feature: MA Experiment 20001560 PARAMETER Experiment Name: At_Drought_Soil_Dry_P Parameter: Post Timepoint (hr) Value: None
  misc_feature: MA Experiment 20001560 PARAMETER Experiment Name: At_Drought_Soil_Dry_P Parameter: Post-Treatment Value: None
  misc_feature: MA Experiment 20001560 PARAMETER Experiment Name: At_Drought_Soil_Dry_P Parameter: Timepoint (day) Value: 14
  misc_feature: MA Experiment 20001560 PARAMETER Experiment Name: At_Drought_Soil_Dry_P Parameter: Treatment Value: Drought vs. No Drought
tcacacacacacacacacactctgttttcttcgtccattctattaccagaaaacagagtttgatagagagaaaagaatggaactgtcgactcaaatgaatgtgttcgaagagcttcttgttccgacaaagcaagaaacaaccgacaacaacatcaacaatctgagctttaatggcggatttgatcatcatcatcatcaattcttcccaaatggatataatattgattacctctgtttcaacaatgaagaagaagacgaaaatacccttttgtatccttcttctttcatggatctaatctctcaacctcctccattgcttcttcaccaaccgccaccgttacaaccactgtcgccgccgttatcctcctccgcgaccgccggagcaacatttgactacccttttcttgaggctttgcaagagataattgactcttcttcctcatcgcctccattgatccttcaaaatggtcaagaagagaactttaataatccgatgtcgtatccctctccattgatggagtctgatcagagcaagagcttcagtgttggttactgtggaggagagacgaacaagaagaagagcaaaaagcttgaaggccaaccttctaagaatctcatggcggagagacgacggagaaaacgacttaacgatcgtctttctatgctccgatccatcgtcccaaaaatcagtaagatggacaggacatcgatattaggagatgccatagattacatgaaagagcttttagacaaaatcaacaaattacaagatgaggaacaagaacttggaaatagcaacaattcacatcactctaagctcttcggtgatctcaaggatcttaatgcgaacgaacctctggtcagaaactcaccaaagtttgaaatagatcgtagagacgaggatactcgagttgatatatgctgctcgccaaaaccgggattgctactatctactgtgaatacattagagactctaggcttggagattgaacaatgtgttataagctgctttagtgatttctctttgcaggcttcttgttctgagggagctgagcagagagatttcataacatcagaagatataaaacaagcattattcagaaacgcaggttatggtggaagctgcttgtaatgagtcatgattgaaactaataaaccaaaactattgtttatttctaataatactagcgcttataaactttagatgttgttttaattcccttgtgagtttggtttttttttcctaggggaaaacattatgagttcagttgtataaacaaaagaaggaaattt

SEQ ID NO: 100093 - protein, 376 aa, Arabidopsis thaliana
  peptide (1)..(376): Ceres Seq. ID no. 13604336
  misc_feature (200)..(249): Pfam Name: Helix-loop-helix DNA-binding domain Pfam Description: Helix-loop-helix DNA-binding domain
  misc_feature (26)..(376): Homolog of NCBI NO: 18424973 NR Description: bHLH protein [Arabidopsis thaliana]
  misc_feature (26)..(376): Homolog of NCBI NO: 21537346 NR Description: unknown [Arabidopsis thaliana]
  misc_feature (163)..(376): Homolog of NCBI NO: 15238199 NR Description: bHLH protein [Arabidopsis thaliana]
  misc_feature (163)..(376): Homolog of NCBI NO: 20127062 NR Description: putative bHLH transcription factor [Arabidopsis
  misc_feature (37)..(273): Homolog of NCBI NO: 15238199 NR Description: bHLH protein [Arabidopsis thaliana]
  misc_feature (37)..(273): Homolog of NCBI NO: 20127062 NR Description: putative bHLH transcription factor [Arabidopsis
  misc_feature (186)..(373): Homolog of NCBI NO: 22758263 NR Description: Putative bHLH transcription protein [Oryza sativa
  misc_feature (199)..(353): Homolog of NCBI NO: 37536566 NR Description: hypothetical protein [Oryza sativa (japonica group)] >gi|10140754|gb|AAG13585.1| hypothetical protein [Oryza >gi|31433343|gb|AAP54872.1| hypothetical protein [Oryza sativa
  misc_feature (16)..(373): Homolog of NCBI NO: 25513489 NR Description: F13K23.12 protein - Arabidopsis thaliana
  misc_feature (16)..(373): Homolog of NCBI NO: 15222101 NR Description: bHLH protein [Arabidopsis thaliana]
HTHTHTLCFLRPFYYQKTEFDREKRMELSTQMNVFEELLVPTKQETTDNNINNLSFNGGFDHHHHQFFPNGYNIDYLCFNNEEEDENTLLYPSSFMDLISQPPPLLLHQPPPLQPLSPPLSSSATAGATFDYPFLEALQEIIDSSSSSPPLILQNGQEENFNNPMSYPSPLMESDQSKSFSVGYCGGETNKKKSKKLEGQPSKNLMAERRRRKRLNDRLSMLRSIVPKISKMDRTSILGDAIDYMKELLDKINKLQDEEQELGNSNNSHHSKLFGDLKDLNANEPLVRNSPKFEIDRRDEDTRVDICCSPKPGLLLSTVNTLETLGLEIEQCVISCFSDFSLQASCSEGAEQRDFITSEDIKQALFRNAGYGGSCL

SEQ ID NO: 100094 - protein, 351 aa, Arabidopsis thaliana
  peptide (1)..(351): Ceres Seq. ID no. 13604337
  misc_feature (175)..(224): Pfam Name: Helix-loop-helix DNA-binding domain Pfam Description: Helix-loop-helix DNA-binding domain
  misc_feature (1)..(351): Homolog of NCBI NO: 18424973 NR Description: bHLH protein [Arabidopsis thaliana]
  misc_feature (1)..(351): Homolog of NCBI NO: 21537346 NR Description: unknown [Arabidopsis thaliana]
  misc_feature (138)..(351): Homolog of NCBI NO: 15238199 NR Description: bHLH protein [Arabidopsis thaliana]
  misc_feature (138)..(351): Homolog of NCBI NO: 20127062 NR Description: putative bHLH transcription factor [Arabidopsis
  misc_feature (12)..(248): Homolog of NCBI NO: 15238199 NR Description: bHLH protein [Arabidopsis thaliana]
  misc_feature (12)..(248): Homolog of NCBI NO: 20127062 NR Description: putative bHLH transcription factor [Arabidopsis
  misc_feature (161)..(348): Homolog of NCBI NO: 22758263 NR Description: Putative bHLH transcription protein [Oryza sativa
  misc_feature (174)..(328): Homolog of NCBI NO: 37536566 NR Description: hypothetical protein [Oryza sativa (japonica group)] >gi|10140754|gb|AAG13585.1| hypothetical protein [Oryza >gi|31433343|gb|AAP54872.1| hypothetical protein [Oryza sativa
  misc_feature (1)..(348): Homolog of NCBI NO: 25513489 NR Description: F13K23.12 protein - Arabidopsis thaliana
  misc_feature (1)..(348): Homolog of NCBI NO: 15222101 NR Description: bHLH protein [Arabidopsis thaliana]
MELSTQMNVFEELLVPTKQETTDNNINNLSFNGGFDHHHHQFFPNGYNIDYLCFNNEEEDENTLLYPSSFMDLISQPPPLLLHQPPPLQPLSPPLSSSATAGATFDYPFLEALQEIIDSSSSSPPLILQNGQEENFNNPMSYPSPLMESDQSKSFSVGYCGGETNKKKSKKLEGQPSKNLMAERRRRKRLNDRLSMLRSIVPKISKMDRTSILGDAIDYMKELLDKINKLQDEEQELGNSNNSHHSKLFGDLKDLNANEPLVRNSPKFEIDRRDEDTRVDICCSPKPGLLLSTVNTLETLGLEIEQCVISCFSDFSLQASCSEGAEQRDFITSEDIKQALFRNAGYGGSCL

SEQ ID NO: 100095 - protein, 345 aa, Arabidopsis thaliana
  peptide (1)..(345): Ceres Seq. ID no. 13604338
  misc_feature (169)..(218): Pfam Name: Helix-loop-helix DNA-binding domain Pfam Description: Helix-loop-helix DNA-binding domain
  misc_feature (1)..(345): Homolog of NCBI NO: 18424973 NR Description: bHLH protein [Arabidopsis thaliana]
  misc_feature (1)..(345): Homolog of NCBI NO: 21537346 NR Description: unknown [Arabidopsis thaliana]
  misc_feature (132)..(345): Homolog of NCBI NO: 15238199 NR Description: bHLH protein [Arabidopsis thaliana]
  misc_feature (132)..(345): Homolog of NCBI NO: 20127062 NR Description: putative bHLH transcription factor [Arabidopsis
  misc_feature (6)..(242): Homolog of NCBI NO: 15238199 NR Description: bHLH protein [Arabidopsis thaliana]
  misc_feature (6)..(242): Homolog of NCBI NO: 20127062 NR Description: putative bHLH transcription factor [Arabidopsis
  misc_feature (155)..(342): Homolog of NCBI NO: 22758263 NR Description: Putative bHLH transcription protein [Oryza sativa
  misc_feature (168)..(322): Homolog of NCBI NO: 37536566 NR Description: hypothetical protein [Oryza sativa (japonica group)] >gi|10140754|gb|AAG13585.1| hypothetical protein [Oryza >gi|31433343|gb|AAP54872.1| hypothetical protein [Oryza sativa
  misc_feature (1)..(342): Homolog of NCBI NO: 25513489 NR Description: F13K23.12 protein - Arabidopsis thaliana
  misc_feature (1)..(342): Homolog of NCBI NO: 15222101 NR Description: bHLH protein [Arabidopsis thaliana]
MNVFEELLVPTKQETTDNNINNLSFNGGFDHHHHQFFPNGYNIDYLCFNNEEEDENTLLYPSSFMDLISQPPPLLLHQPPPLQPLSPPLSSSATAGATFDYPFLEALQEIIDSSSSSPPLILQNGQEENFNNPMSYPSPLMESDQSKSFSVGYCGGETNKKKSKKLEGQPSKNLMAERRRRKRLNDRLSMLRSIVPKISKMDRTSILGDAIDYMKELLDKINKLQDEEQELGNSNNSHHSKLFGDLKDLNANEPLVRNSPKFEIDRRDEDTRVDICCSPKPGLLLSTVNTLETLGLEIEQCVISCFSDFSLQASCSEGAEQRDFITSEDIKQALFRNAGYGGSCL

SEQ ID NO: 100096 - DNA, 1111 bp, Arabidopsis thaliana
  misc_feature (1)..(1111): Ceres Seq. ID no. 13604343
  misc_feature: MA Experiment ID: 108576 Result: Down-regulated in Transcription
  misc_feature: MA Experiment 108576 PARAMETER Experiment Name: At_42deg_Heat_cDNA_P Parameter: Temperature (deg C) Value: 42 vs. 22
  misc_feature: MA Experiment 108576 PARAMETER Experiment Name: At_42deg_Heat_cDNA_P Parameter: Timepoint (hr) Value: 1
  misc_feature: MA Experiment 108576 PARAMETER Experiment Name: At_42deg_Heat_cDNA_P Parameter: Tissue Value: Aerial
  misc_feature: MA Experiment ID: 108595 Result: Down-regulated in Transcription
  misc_feature: MA Experiment 108595 PARAMETER Experiment Name: At_Ler-pi_Ovule_cDNA_P Parameter: Plant Line Value: null
  misc_feature: MA Experiment ID: 20000071 Result: Down-regulated in Transcription
  misc_feature: MA Experiment 20000071 PARAMETER Experiment Name: At_100uM_ABA_Mutants_cDNA_P Parameter: Plant Line Value: CS8104
  misc_feature: MA Experiment 20000071 PARAMETER Experiment Name: At_100uM_ABA_Mutants_cDNA_P Parameter: Timepoint (hr) Value: 6
  misc_feature: MA Experiment 20000071 PARAMETER Experiment Name: At_100uM_ABA_Mutants_cDNA_P Parameter: Tissue Value: Aerial
  misc_feature: MA Experiment 20000071 PARAMETER Experiment Name: At_100uM_ABA_Mutants_cDNA_P Parameter: Treatment Value: 100uM ABA vs. No Treatment
  misc_feature: MA Experiment ID: 20000087 Result: Down-regulated in Transcription
  misc_feature: MA Experiment 20000087 PARAMETER Experiment Name: At_100uM_ABA_Mutants_cDNA_P Parameter: Plant Line Value: WS
  misc_feature: MA Experiment 20000087 PARAMETER Experiment Name: At_100uM_ABA_Mutants_cDNA_P Parameter: Timepoint (hr) Value: 6
  misc_feature: MA Experiment 20000087 PARAMETER Experiment Name: At_100uM_ABA_Mutants_cDNA_P Parameter: Tissue Value: Aerial
  misc_feature: MA Experiment 20000087 PARAMETER Experiment Name: At_100uM_ABA_Mutants_cDNA_P Parameter: Treatment Value: 100uM ABA vs. No Treatment
  misc_feature: MA Experiment ID: 20000117 Result: Down-regulated in Transcription
  misc_feature: MA Experiment 20000117 PARAMETER Experiment Name: At_100uM_ABA_Mutants_cDNA_P Parameter: Plant Line Value: Columbia
  misc_feature: MA Experiment 20000117 PARAMETER Experiment Name: At_100uM_ABA_Mutants_cDNA_P Parameter: Timepoint (hr) Value: 6
  misc_feature: MA Experiment 20000117 PARAMETER Experiment Name: At_100uM_ABA_Mutants_cDNA_P Parameter: Tissue Value: Aerial
  misc_feature: MA Experiment 20000117 PARAMETER Experiment Name: At_100uM_ABA_Mutants_cDNA_P Parameter: Treatment Value: 100uM ABA vs. No Treatment
  misc_feature: MA Experiment ID: 20000179 Result: Up-regulated in Transcription
  misc_feature: MA Experiment 20000179 PARAMETER Experiment Name: At_Germinating_Seeds_P Parameter: Age (hr) Value: 6 vs. 0
  misc_feature: MA Experiment 20000179 PARAMETER Experiment Name: At_Germinating_Seeds_P Parameter: Tissue Value: Germinating Seeds
  misc_feature: MA Experiment ID: 20000180 Result: Up-regulated in Transcription
  misc_feature: MA Experiment 20000180 PARAMETER Experiment Name: At_Germinating_Seeds_P Parameter: Age (hr) Value: 24 vs. 0
  misc_feature: MA Experiment 20000180 PARAMETER Experiment Name: At_Germinating_Seeds_P Parameter: Tissue Value: Germinating Seeds
  misc_feature: MA Experiment ID: 20000185 Result: Up-regulated in Transcription
  misc_feature: MA Experiment 20000185 PARAMETER Experiment Name: At_Roots__P Parameter: Age (day) Value: 7 vs. 21
  misc_feature: MA Experiment 20000185 PARAMETER Experiment Name: At_Roots__P Parameter: Organism Value: A. thaliana
  misc_feature: MA Experiment 20000185 PARAMETER Experiment Name: At_Roots__P Parameter: Tissue Value: Roots vs. Whole Plant
  misc_feature: MA Experiment ID: 20000227 Result: Up-regulated in Transcription
  misc_feature: MA Experiment 20000227 PARAMETER Experiment Name: At_Root-Tips-vs-Tops_P Parameter: Tissue Value: Root Tips vs. Root Tops
  misc_feature: MA Experiment ID: 20000234 Result: Up-regulated in Transcription
  misc_feature: MA Experiment 20000234 PARAMETER Experiment Name: At_Siliques_P Parameter: Age (day) Value: 21
  misc_feature: MA Experiment 20000234 PARAMETER Experiment Name: At_Siliques_P Parameter: Organism Value: A. thaliana
  misc_feature: MA Experiment 20000234 PARAMETER Experiment Name: At_Siliques_P Parameter: Plant Line Value: WS
  misc_feature: MA Experiment 20000234 PARAMETER Experiment Name: At_Siliques_P Parameter: Tissue Value: Less Than 5mm Siliques vs. Whole Plant
  misc_feature: MA Experiment ID: 20000265 Result: Up-regulated in Transcription
  misc_feature: MA Experiment 20000265 PARAMETER Experiment Name: At_Open_Flower_P Parameter: Age (day) Value: 21
  misc_feature: MA Experiment 20000265 PARAMETER Experiment Name: At_Open_Flower_P Parameter: Plant Line Value: WS
  misc_feature: MA Experiment 20000265 PARAMETER Experiment Name: At_Open_Flower_P Parameter: Tissue Value: Closed Flower vs. Whole Plant
  misc_feature: MA Experiment ID: 20000286 Result: Up-regulated in Transcription
  misc_feature: MA Experiment 20000286 PARAMETER Experiment Name: At_Open_Flower_P Parameter: Age (day) Value: 21
  misc_feature: MA Experiment 20000286 PARAMETER Experiment Name: At_Open_Flower_P Parameter: Plant Line Value: WS
  misc_feature: MA Experiment 20000286 PARAMETER Experiment Name: At_Open_Flower_P Parameter: Tissue Value: Half Open vs. Whole Plant
  misc_feature: MA Experiment ID: 20001451 Result: Down-regulated in Transcription
  misc_feature: MA Experiment 20001451 PARAMETER Experiment Name: At_Far-red-induction_P Parameter: Age (day) Value: 7
  misc_feature: MA Experiment 20001451 PARAMETER Experiment Name: At_Far-red-induction_P Parameter: Light Value: Far-red vs. White
  misc_feature: MA Experiment 20001451 PARAMETER Experiment Name: At_Far-red-induction_P Parameter: Organism Value: A. thaliana
  misc_feature: MA Experiment 20001451 PARAMETER Experiment Name: At_Far-red-induction_P Parameter: Plant Line Value: Columbia
  misc_feature: MA Experiment 20001451 PARAMETER Experiment Name: At_Far-red-induction_P Parameter: Timepoint (hr) Value: 24
  misc_feature: MA Experiment 20001451 PARAMETER Experiment Name: At_Far-red-induction_P Parameter: Tissue Value: Whole Plant
  misc_feature: MA Experiment ID: 20001558 Result: Up-regulated in Transcription
  misc_feature: MA Experiment 20001558 PARAMETER Experiment Name: At_Drought_Soil_Dry_P Parameter: Age (day) Value: 27
  misc_feature: MA Experiment 20001558 PARAMETER Experiment Name: At_Drought_Soil_Dry_P Parameter: Organism Value: A. thaliana
  misc_feature: MA Experiment 20001558 PARAMETER Experiment Name: At_Drought_Soil_Dry_P Parameter: Plant Line Value: WS
  misc_feature: MA Experiment 20001558 PARAMETER Experiment Name: At_Drought_Soil_Dry_P Parameter: Post Timepoint (hr) Value: 6
  misc_feature: MA Experiment 20001558 PARAMETER Experiment Name: At_Drought_Soil_Dry_P Parameter: Post-Treatment Value: Re-Water vs. No Drought
  misc_feature: MA Experiment 20001558 PARAMETER Experiment Name: At_Drought_Soil_Dry_P Parameter: Timepoint (day) Value: 13
  misc_feature: MA Experiment 20001558 PARAMETER Experiment Name: At_Drought_Soil_Dry_P Parameter: Treatment Value: Drought vs. No Drought
  misc_feature: MA Experiment ID: 20001911 Result: Down-regulated in Transcription
  misc_feature: MA Experiment 20001911 PARAMETER Experiment Name: At_Drought_Reproduction_P Parameter: Age (day) Value: 40
  misc_feature: MA Experiment 20001911 PARAMETER Experiment Name: At_Drought_Reproduction_P Parameter: Organism Value: A. thaliana
  misc_feature: MA Experiment 20001911 PARAMETER Experiment Name: At_Drought_Reproduction_P Parameter: Plant Line Value: WS
  misc_feature: MA Experiment 20001911 PARAMETER Experiment Name: At_Drought_Reproduction_P Parameter: Timepoint (day) Value: 10
  misc_feature: MA Experiment 20001911 PARAMETER Experiment Name: At_Drought_Reproduction_P Parameter: Tissue Value: Flowers
  misc_feature: MA Experiment 20001911 PARAMETER Experiment Name: At_Drought_Reproduction_P Parameter: Treatment Value: Drought vs. No Drought
agcagagcactcgataattaacactagggacgaagaagctctcgtttagtaaattttagcttagaacacagaagaagcattttttcggatctgagatctttagatccgaacatcgtttatttcaaatcgtttattcaaggtctaaaaaaaagttttgaagaatcatagccatgtcaagaaggcaagtaaggcgtgtaggggatagtggaagcttcccatttgtaggagctctgcattcaaaatcacgttcgtctcctctgttatcagtttgccttgttctcgtgggagcatgccttctcattggttatgcttacagtggtccaggtatgttcaaaagtatcagagaagtcagcaagattacaggtgactattcttgcacagcagaagttcaaagagccattcctattcttaagagtgcgtatggagatagcatgcgcaaagtcctgcacgtgggtcctgaaacatgctcagtggtctcgagtctgttgaatgaagaagagacagaagcatggggtgttgaaccatatgatgtggaggatgcagactctaactgcaaaagtcttttgcacaagggccttgtacgtgtggctgacatcaaattccctcttccttaccggtcaaagtcgttttctcttgtgatcgtctcagacgctttggattacctctcacccaggtacctgaacaaaactgtgcctgaacttgctcgcgtcgcttcagatggtgtcgttcttttagcaggtaaccctggtcaacaaaaggctaaaggtggggaattgtcgaaatttggacggcctgctaaaatgcgtagctcgtcgtggtggatccgtttcttctcacagacgaacttagaggaaaacgaagcagcaagcaagaaattcgaacaagcagcttccaagagttcatacaaaccagcttgtcaagttttccacctcaagccattacattagtacacactattattactggtcttaagacatcaaaccagatatctctcctctctgtttaataccctttttttccgctatagaaagaaactaaactcccacaaattgtaattcattctcaacgatttgattcataatttaactatttaataaatttgcctcttctc

SEQ ID NO: 100097 - protein, 258 aa, Arabidopsis thaliana
  peptide (1)..(258): Ceres Seq. ID no. 13604344
  misc_feature (1)..(258): Homolog of NCBI NO: 18424995 NR Description: expressed protein [Arabidopsis thaliana]
  misc_feature (1)..(258): Homolog of NCBI NO: 21593192 NR Description: unknown [Arabidopsis thaliana]
  misc_feature (1)..(258): Homolog of NCBI NO: 18408931 NR Description: expressed protein [Arabidopsis thaliana]
  misc_feature (1)..(208): Homolog of NCBI NO: 9758568 NR Description: emb|CAB66910.1~gene_id:K22J17.2~similar to
  misc_feature (1)..(254): Homolog of NCBI NO: 34895744 NR Description: P0019D06.30 [Oryza sativa (japonica
  misc_feature (88)..(258): Homolog of NCBI NO: 16649137 NR Description: Unknown protein [Arabidopsis thaliana]
MSRRQVRRVGDSGSFPFVGALHSKSRSSPLLSVCLVLVGACLLIGYAYSGPGMFKSIREVSKITGDYSCTAEVQRAIPILKSAYGDSMRKVLHVGPETCSVVSSLLNEEETEAWGVEPYDVEDADSNCKSLLHKGLVRVADIKFPLPYRSKSFSLVIVSDALDYLSPRYLNKTVPELARVASDGVVLLAGNPGQQKAKGGELSKFGRPAKMRSSSWWIRFFSQTNLEENEAASKKFEQAASKSSYKPACQVFHLKPLH

SEQ ID NO: 100098 - protein, 206 aa, Arabidopsis thaliana
  peptide (1)..(206): Ceres Seq. ID no. 13604345
  misc_feature (1)..(206): Homolog of NCBI NO: 18424995 NR Description: expressed protein [Arabidopsis thaliana]
  misc_feature (1)..(206): Homolog of NCBI NO: 21593192 NR Description: unknown [Arabidopsis thaliana]
  misc_feature (1)..(206): Homolog of NCBI NO: 18408931 NR Description: expressed protein [Arabidopsis thaliana]
  misc_feature (1)..(156): Homolog of NCBI NO: 9758568 NR Description: emb|CAB66910.1~gene_id:K22J17.2~similar to
  misc_feature (1)..(202): Homolog of NCBI NO: 34895744 NR Description: P0019D06.30 [Oryza sativa (japonica
  misc_feature (36)..(206): Homolog of NCBI NO: 16649137 NR Description: Unknown protein [Arabidopsis thaliana]
MFKSIREVSKITGDYSCTAEVQRAIPILKSAYGDSMRKVLHVGPETCSVVSSLLNEEETEAWGVEPYDVEDADSNCKSLLHKGLVRVADIKFPLPYRSKSFSLVIVSDALDYLSPRYLNKTVPELARVASDGVVLLAGNPGQQKAKGGELSKFGRPAKMRSSSWWIRFFSQTNLEENEAASKKFEQAASKSSYKPACQVFHLKPLH

SEQ ID NO: 100099 - protein, 171 aa, Arabidopsis thaliana
  peptide (1)..(171): Ceres Seq. ID no. 13604346
  misc_feature (1)..(171): Homolog of NCBI NO: 18424995 NR Description: expressed protein [Arabidopsis thaliana]
  misc_feature (1)..(171): Homolog of NCBI NO: 21593192 NR Description: unknown [Arabidopsis thaliana]
  misc_feature (1)..(171): Homolog of NCBI NO: 18408931 NR Description: expressed protein [Arabidopsis thaliana]
  misc_feature (1)..(121): Homolog of NCBI NO: 9758568 NR Description: emb|CAB66910.1~gene_id:K22J17.2~similar to
  misc_feature (1)..(167): Homolog of NCBI NO: 34895744 NR Description: P0019D06.30 [Oryza sativa (japonica
  misc_feature (1)..(171): Homolog of NCBI NO: 16649137 NR Description: Unknown protein [Arabidopsis thaliana]
MRKVLHVGPETCSVVSSLLNEEETEAWGVEPYDVEDADSNCKSLLHKGLVRVADIKFPLPYRSKSFSLVIVSDALDYLSPRYLNKTVPELARVASDGVVLLAGNPGQQKAKGGELSKFGRPAKMRSSSWWIRFFSQTNLEENEAASKKFEQAASKSSYKPACQVFHLKPLH

SEQ ID NO: 100100 - DNA, 1206 bp, Arabidopsis thaliana
  misc_feature (1)..(1206): Ceres Seq. ID no. 13604347
  misc_feature: MA Experiment ID: 20000179 Result: Up-regulated in Transcription
  misc_feature: MA Experiment 20000179 PARAMETER Experiment Name: At_Germinating_Seeds_P Parameter: Age (hr) Value: 6 vs. 0
  misc_feature: MA Experiment 20000179 PARAMETER Experiment Name: At_Germinating_Seeds_P Parameter: Tissue Value: Germinating Seeds
  misc_feature: MA Experiment ID: 20000185 Result: Up-regulated in Transcription
  misc_feature: MA Experiment 20000185 PARAMETER Experiment Name: At_Roots__P Parameter: Age (day) Value: 7 vs. 21
  misc_feature: MA Experiment 20000185 PARAMETER Experiment Name: At_Roots__P Parameter: Organism Value: A. thaliana
  misc_feature: MA Experiment 20000185 PARAMETER Experiment Name: At_Roots__P Parameter: Tissue Value: Roots vs. Whole Plant
  misc_feature: MA Experiment ID: 20000439 Result: Up-regulated in Transcription
  misc_feature: MA Experiment 20000439 PARAMETER Experiment Name: At_Roots__P Parameter: Age (day) Value: 14 vs. 21
  misc_feature: MA Experiment 20000439 PARAMETER Experiment Name: At_Roots__P Parameter: Organism Value: A. thaliana
  misc_feature: MA Experiment 20000439 PARAMETER Experiment Name: At_Roots__P Parameter: Tissue Value: Roots vs. Whole Plant
  misc_feature: MA Experiment ID: 20001554 Result: Up-regulated in Transcription
  misc_feature: MA Experiment 20001554 PARAMETER Experiment Name: At_Drought_Soil_Dry_P Parameter: Age (day) Value: 21
  misc_feature: MA Experiment 20001554 PARAMETER Experiment Name: At_Drought_Soil_Dry_P Parameter: Organism Value: A. thaliana
  misc_feature: MA Experiment 20001554 PARAMETER Experiment Name: At_Drought_Soil_Dry_P Parameter: Plant Line Value: WS
  misc_feature: MA Experiment 20001554 PARAMETER Experiment Name: At_Drought_Soil_Dry_P Parameter: Post Timepoint (hr) Value: None
  misc_feature: MA Experiment 20001554 PARAMETER Experiment Name: At_Drought_Soil_Dry_P Parameter: Post-Treatment Value: None
  misc_feature: MA Experiment 20001554 PARAMETER Experiment Name: At_Drought_Soil_Dry_P Parameter: Timepoint (day) Value: 7
  misc_feature: MA Experiment 20001554 PARAMETER Experiment Name: At_Drought_Soil_Dry_P Parameter: Treatment Value: Drought vs. No Drought
  misc_feature: MA Experiment ID: 20001555 Result: Up-regulated in Transcription
  misc_feature: MA Experiment 20001555 PARAMETER Experiment Name: At_Drought_Soil_Dry_P Parameter: Age (day) Value: 24
  misc_feature: MA Experiment 20001555 PARAMETER Experiment Name: At_Drought_Soil_Dry_P Parameter: Organism Value: A. thaliana
  misc_feature: MA Experiment 20001555 PARAMETER Experiment Name: At_Drought_Soil_Dry_P Parameter: Plant Line Value: WS
  misc_feature: MA Experiment 20001555 PARAMETER Experiment Name: At_Drought_Soil_Dry_P Parameter: Post Timepoint (hr) Value: None
  misc_feature: MA Experiment 20001555 PARAMETER Experiment Name: At_Drought_Soil_Dry_P Parameter: Post-Treatment Value: None
  misc_feature: MA Experiment 20001555 PARAMETER Experiment Name: At_Drought_Soil_Dry_P Parameter: Timepoint (day) Value: 10
  misc_feature: MA Experiment 20001555 PARAMETER Experiment Name: At_Drought_Soil_Dry_P Parameter: Treatment Value: Drought vs. No Drought
  misc_feature: MA Experiment ID: 20001556 Result: Up-regulated in Transcription
  misc_feature: MA Experiment 20001556 PARAMETER Experiment Name: At_Drought_Soil_Dry_P Parameter: Age (day) Value: 26
  misc_feature: MA Experiment 20001556 PARAMETER Experiment Name: At_Drought_Soil_Dry_P Parameter: Organism Value: A. thaliana
  misc_feature: MA Experiment 20001556 PARAMETER Experiment Name: At_Drought_Soil_Dry_P Parameter: Plant Line Value: WS
  misc_feature: MA Experiment 20001556 PARAMETER Experiment Name: At_Drought_Soil_Dry_P Parameter: Post Timepoint (hr) Value: None
  misc_feature: MA Experiment 20001556 PARAMETER Experiment Name: At_Drought_Soil_Dry_P Parameter: Post-Treatment Value: None
  misc_feature: MA Experiment 20001556 PARAMETER Experiment Name: At_Drought_Soil_Dry_P Parameter: Timepoint (day) Value: 12
  misc_feature: MA Experiment 20001556 PARAMETER Experiment Name: At_Drought_Soil_Dry_P Parameter: Treatment Value: Drought vs. No Drought
acaagcaaaaaaaattcactttttgtttttgttaacactcacgtgaaagcttcgttcttcttcaaaccttttgaacaatttctccgatgccggtaaatcaccggtttacgtttagctaccggttactcttcctcatcttccttttgagtttcgaaacggcacagcgtttggtcaccggtgacccaaacgacgaagcatgcttgacgaatctccgtcagagtttagaagatccagctaataatctccgtaactggacaaaatccttcttcataaatccttgctccggcttctcttcttatcttcatggagtcatttgcaacaatggcagaatttacaaactctccttaacaaatctctctctccgtggctcaatctctccgtttctctctaattgcacaaatctccaatccctagatctatcttccaaccagatctccggcgagatcccgccgcaattacagtttttcgttaacctagccgttcttaatctctcttctaatcgtctctccggtcaaatctcaccacaaatcgctctctgcgcttacttaaacgtcatcgatcttcacgataaccaactctccggtcaaattccgtttcagttcgggcttctcgctagattaacggcgtttgatgtctctaataacaaattatccggtcagattccctcgaatctggcgatgcgtaacggaaacttgccgagatttaatgcgagctcgtttatagggaacaagaaattgtttgggtatccgttggaggagatgaagaacaaaggattgtcgataatggcgattgttgggattggacttggaagtggaatcgcgagcttagtgattagcttcactggagtttgtatatggttgaagattacagagaaaaagatggaggaagaagaaggaaagataagtcactccatgcctgtttactaaacacaaacatttcgttttttttcttcttaagtataattaacggtttcttttatcacataattagttttttttttccattttgatcaaaagcatacagcaatagggagggttcattaagcgaatttagggttaattaatgctttgatcatatatacatgtttctttggttatctttggatacatattaacaaaaatcacaaggtttaagcatgaggtactaagttattgttgtatagtttttgtagttatgaaagtgtaatttataatgacatcatttatg

SEQ ID NO: 100101 - protein, 279 aa, Arabidopsis thaliana
  peptide (1)..(279): Ceres Seq. ID no. 13604348
  misc_feature (153)..(176): Pfam Name: Leucine Rich Repeat Pfam Description: Leucine Rich Repeat
  misc_feature (1)..(279): Homolog of NCBI NO: 15239162 NR Description: leucine rich repeat protein family [Arabidopsis
  misc_feature (1)..(279): Homolog of NCBI NO: 21553823 NR Description: unknown [Arabidopsis thaliana]
  misc_feature (23)..(279): Homolog of NCBI NO: 7486525 NR Description: hypothetical protein F6H11.60 - Arabidopsis
  misc_feature (8)..(279): Homolog of NCBI NO: 15229606 NR Description: leucine rich repeat protein family [Arabidopsis
  misc_feature (12)..(264): Homolog of NCBI NO: 15233004 NR Description: leucine-rich repeat transmembrane protein kinase,
  misc_feature (13)..(262): Homolog of NCBI NO: 15223445 NR Description: leucine-rich repeat transmembrane protein kinase, [Arabidopsis thaliana] >gi|8778873|gb|AAF79872.1|AC000348_25
  misc_feature (13)..(251): Homolog of NCBI NO: 38344230 NR Description: OJ991113_30.7 [Oryza sativa (japonica
  misc_feature (13)..(270): Homolog of NCBI NO: 15222519 NR Description: leucine-rich repeat transmembrane protein kinase,
  misc_feature (12)..(270): Homolog of NCBI NO: 8777368 NR Description: receptor-like protein kinase [Arabidopsis
  misc_feature (12)..(270): Homolog of NCBI NO: 17064966 NR Description: receptor-like protein kinase [Arabidopsis
MPVNHRFTFSYRLLFLIFLLSFETAQRLVTGDPNDEACLTNLRQSLEDPANNLRNWTKSFFINPCSGFSSYLHGVICNNGRIYKLSLTNLSLRGSISPFLSNCTNLQSLDLSSNQISGEIPPQLQFFVNLAVLNLSSNRLSGQISPQIALCAYLNVIDLHDNQLSGQIPFQFGLLARLTAFDVSNNKLSGQIPSNLAMRNGNLPRFNASSFIGNKKLFGYPLEEMKNKGLSIMAIVGIGLGSGIASLVISFTGVCIWLKITEKKMEEEEGKISHSMPVY

SEQ ID NO: 100102 - DNA, 1056 bp, Arabidopsis thaliana
  misc_feature (1)..(1056): Ceres Seq. ID no. 13604353
  misc_feature: MA Experiment ID: 20001557 Result: Up-regulated in Transcription
  misc_feature: MA Experiment 20001557 PARAMETER Experiment Name: At_Drought_Soil_Dry_P Parameter: Age (day) Value: 27
  misc_feature: MA Experiment 20001557 PARAMETER Experiment Name: At_Drought_Soil_Dry_P Parameter: Organism Value: A. thaliana
  misc_feature: MA Experiment 20001557 PARAMETER Experiment Name: At_Drought_Soil_Dry_P Parameter: Plant Line Value: WS
  misc_feature: MA Experiment 20001557 PARAMETER Experiment Name: At_Drought_Soil_Dry_P Parameter: Post Timepoint (hr) Value: 3
  misc_feature: MA Experiment 20001557 PARAMETER Experiment Name: At_Drought_Soil_Dry_P Parameter: Post-Treatment Value: Re-Water vs. No Drought
  misc_feature: MA Experiment 20001557 PARAMETER Experiment Name: At_Drought_Soil_Dry_P Parameter: Timepoint (day) Value: 13
  misc_feature: MA Experiment 20001557 PARAMETER Experiment Name: At_Drought_Soil_Dry_P Parameter: Treatment Value: Drought vs. No Drought
  misc_feature: MA Experiment ID: 20001558 Result: Up-regulated in Transcription
  misc_feature: MA Experiment 20001558 PARAMETER Experiment Name: At_Drought_Soil_Dry_P Parameter: Age (day) Value: 27
  misc_feature: MA Experiment 20001558 PARAMETER Experiment Name: At_Drought_Soil_Dry_P Parameter: Organism Value: A. thaliana
  misc_feature: MA Experiment 20001558 PARAMETER Experiment Name: At_Drought_Soil_Dry_P Parameter: Plant Line Value: WS
  misc_feature: MA Experiment 20001558 PARAMETER Experiment Name: At_Drought_Soil_Dry_P Parameter: Post Timepoint (hr) Value: 6
  misc_feature: MA Experiment 20001558 PARAMETER Experiment Name: At_Drought_Soil_Dry_P Parameter: Post-Treatment Value: Re-Water vs. No Drought
  misc_feature: MA Experiment 20001558 PARAMETER Experiment Name: At_Drought_Soil_Dry_P Parameter: Timepoint (day) Value: 13
  misc_feature: MA Experiment 20001558 PARAMETER Experiment Name: At_Drought_Soil_Dry_P Parameter: Treatment Value: Drought vs. No Drought
  misc_feature: MA Experiment ID: 20001911 Result: Down-regulated in Transcription
  misc_feature: MA Experiment 20001911 PARAMETER Experiment Name: At_Drought_Reproduction_P Parameter: Age (day) Value: 40
  misc_feature: MA Experiment 20001911 PARAMETER Experiment Name: At_Drought_Reproduction_P Parameter: Organism Value: A. thaliana
  misc_feature: MA Experiment 20001911 PARAMETER Experiment Name: At_Drought_Reproduction_P Parameter: Plant Line Value: WS
  misc_feature: MA Experiment 20001911 PARAMETER Experiment Name: At_Drought_Reproduction_P Parameter: Timepoint (day) Value: 10
  misc_feature: MA Experiment 20001911 PARAMETER Experiment Name: At_Drought_Reproduction_P Parameter: Tissue Value: Flowers
  misc_feature: MA Experiment 20001911 PARAMETER Experiment Name: At_Drought_Reproduction_P Parameter: Treatment Value: Drought vs. No Drought
cagccatggaagaagcagatcagttatgtttagctgctaaatccggcgacttgaaaaaggttcaaactttaatttactccggcgccgacgttactcactttgataacgacggtttaacgccgttaatgcacgccgctaaaatcggaaacgcagagatagtaacggcgttactcgaatccggagctccatggaacgcattatctccatcaaatctctcagcaggagatttcgccatggaagcaggacatcaagaaactttcgatcttcttctcaaaaccgggatccaatcagagctaatcttaggaacaatcgcaagaaaccaaacaaagaacgaatattctaatcaagaatatcttcaagacagagttagtttcagtgaagacaagttaatggatagtgaaagcaaaggtgtgatgatggcttgggaaaaaccattaatggaagctcacgctaaagctatttgtctcaacggtggtcacattcttaacgttggtttcggtatgggacttgtcgatacagcgattcaacgatacaatccggttaaacacacgatcattgaagctcatcctgaagtttataagcgtatgattgaatctggttggggagagaaagagaatgtgaagattgtttttggaagatggcaagatgttcttgataagcttgatgataattcttttgatgggatcttttttgatacttatggtgagtattatgaagatttaagagagtttcatcagcatcttccgaggctgttgaagcctgatggtgtttattcgtatttcaatgggttttgtggaagcaacgcgttttttcatgttgtgtattgcaatttggtgactttggagattgagaatttagggtttagcactcagttgattccattgccggttaaggattgtcttggggatgaagtttgggaaggtgtcaagcaaaagtattggcagcttgatacttattatctccctgtttgtcagtttagtgactgaagaagttttatgataccagcaattttgcgatattgtaatttttcttactcataaaaagtagattttttat

SEQ ID NO: 100103 - protein, 327 aa, Arabidopsis thaliana
  peptide (1)..(327): Ceres Seq. ID no. 13604354
  misc_feature (36)..(68): Pfam Name: Ankyrin repeat Pfam Description: Ankyrin repeat
  misc_feature (2)..(327): Homolog of NCBI NO: 15239183 NR Description: hypothetical protein [Arabidopsis thaliana]
  misc_feature (8)..(324): Homolog of NCBI NO: 14488376 NR Description: putative methyltransferase [Oryza sativa
  misc_feature (3)..(325): Homolog of NCBI NO: 25777560 NR Description: hypothetical protein SPAC26A3.17c - fission yeast
  misc_feature (3)..(325): Homolog of NCBI NO: 12644401 NR Description: Hypothetical protein C26A3.17c in chromosome I
  misc_feature (56)..(325): Homolog of NCBI NO: 19115072 NR Description: hypothetical protein [Schizosaccharomyces pombe]
  misc_feature (113)..(327): Homolog of NCBI NO: 40738857 NR Description: hypothetical protein AN6072.2 [Aspergillus
  misc_feature (51)..(121): Homolog of NCBI NO: 40738857 NR Description: hypothetical protein AN6072.2 [Aspergillus
  misc_feature (113)..(326): Homolog of NCBI NO: 6320673 NR Description: Protein Arginine Methyltransferase; R = arginine; = methyltransferase; Rmt2p [Saccharomyces cerevisiae]
  misc_feature (109)..(296): Homolog of NCBI NO: 32416678 NR Description: hypothetical protein [Neurospora crassa]
  misc_feature (211)..(325): Homolog of NCBI NO: 32416678 NR Description: hypothetical protein [Neurospora crassa]
AMEEADQLCLAAKSGDLKKVQTLIYSGADVTHFDNDGLTPLMHAAKIGNAEIVTALLESGAPWNALSPSNLSAGDFAMEAGHQETFDLLLKTGIQSELILGTIARNQTKNEYSNQEYLQDRVSFSEDKLMDSESKGVMMAWEKPLMEAHAKAICLNGGHILNVGFGMGLVDTAIQRYNPVKHTIIEAHPEVYKRMIESGWGEKENVKIVFGRWQDVLDKLDDNSFDGIFFDTYGEYYEDLREFHQHLPRLLKPDGVYSYFNGFCGSNAFFHVVYCNLVTLEIENLGFSTQLIPLPVKDCLGDEVWEGVKQKYWQLDTYYLPVCQFSD

SEQ ID NO: 100104 - protein, 326 aa, Arabidopsis thaliana
  peptide (1)..(326): Ceres Seq. ID no. 13604355
  misc_feature (35)..(67): Pfam Name: Ankyrin repeat Pfam Description: Ankyrin repeat
  misc_feature (1)..(326): Homolog of NCBI NO: 15239183 NR Description: hypothetical protein [Arabidopsis thaliana]
  misc_feature (7)..(323): Homolog of NCBI NO: 14488376 NR Description: putative methyltransferase [Oryza sativa
  misc_feature (2)..(324): Homolog of NCBI NO: 25777560 NR Description: hypothetical protein SPAC26A3.17c - fission yeast
  misc_feature (2)..(324): Homolog of NCBI NO: 12644401 NR Description: Hypothetical protein C26A3.17c in chromosome I
  misc_feature (55)..(324): Homolog of NCBI NO: 19115072 NR Description: hypothetical protein [Schizosaccharomyces pombe]
  misc_feature (112)..(326): Homolog of NCBI NO: 40738857 NR Description: hypothetical protein AN6072.2 [Aspergillus
  misc_feature (50)..(120): Homolog of NCBI NO: 40738857 NR Description: hypothetical protein AN6072.2 [Aspergillus
  misc_feature (112)..(325): Homolog of NCBI NO: 6320673 NR Description: Protein Arginine Methyltransferase; R = arginine; = methyltransferase; Rmt2p [Saccharomyces cerevisiae]
  misc_feature (108)..(295): Homolog of NCBI NO: 32416678 NR Description: hypothetical protein [Neurospora crassa]
  misc_feature (210)..(324): Homolog of NCBI NO: 32416678 NR Description: hypothetical protein [Neurospora crassa]
MEEADQLCLAAKSGDLKKVQTLIYSGADVTHFDNDGLTPLMHAAKIGNAEIVTALLESGAPWNALSPSNLSAGDFAMEAGHQETFDLLLKTGIQSELILGTIARNQTKNEYSNQEYLQDRVSFSEDKLMDSESKGVMMAWEKPLMEAHAKAICLNGGHILNVGFGMGLVDTAIQRYNPVKHTIIEAHPEVYKRMIESGWGEKENVKIVFGRWQDVLDKLDDNSFDGIFFDTYGEYYEDLREFHQHLPRLLKPDGVYSYFNGFCGSNAFFHVVYCNLVTLEIENLGFSTQLIPLPVKDCLGDEVWEGVKQKYWQLDTYYLPVCQFSD

SEQ ID NO: 100105 - protein, 286 aa, Arabidopsis thaliana
  peptide (1)..(286): Ceres Seq. ID no. 13604356
  misc_feature (1)..(27): Pfam Name: Ankyrin repeat Pfam Description: Ankyrin repeat
  misc_feature (1)..(286): Homolog of NCBI NO: 15239183 NR Description: hypothetical protein [Arabidopsis thaliana]
  misc_feature (1)..(283): Homolog of NCBI NO: 14488376 NR Description: putative methyltransferase [Oryza sativa
  misc_feature (1)..(284): Homolog of NCBI NO: 25777560 NR Description: hypothetical protein SPAC26A3.17c - fission yeast
  misc_feature (1)..(284): Homolog of NCBI NO: 12644401 NR Description: Hypothetical protein C26A3.17c in chromosome I
  misc_feature (15)..(284): Homolog of NCBI NO: 19115072 NR Description: hypothetical protein [Schizosaccharomyces pombe]
  misc_feature (72)..(286): Homolog of NCBI NO: 40738857 NR Description: hypothetical protein AN6072.2 [Aspergillus
  misc_feature (10)..(80): Homolog of NCBI NO: 40738857 NR Description: hypothetical protein AN6072.2 [Aspergillus
  misc_feature (72)..(285): Homolog of NCBI NO: 6320673 NR Description: Protein Arginine Methyltransferase; R = arginine; = methyltransferase; Rmt2p [Saccharomyces cerevisiae]
  misc_feature (68)..(255): Homolog of NCBI NO: 32416678 NR Description: hypothetical protein [Neurospora crassa]
  misc_feature (170)..(284): Homolog of NCBI NO: 32416678 NR Description: hypothetical protein [Neurospora crassa]
MHAAKIGNAEIVTALLESGAPWNALSPSNLSAGDFAMEAGHQETFDLLLKTGIQSELILGTIARNQTKNEYSNQEYLQDRVSFSEDKLMDSESKGVMMAWEKPLMEAHAKAICLNGGHILNVGFGMGLVDTAIQRYNPVKHTIIEAHPEVYKRMIESGWGEKENVKIVFGRWQDVLDKLDDNSFDGIFFDTYGEYYEDLREFHQHLPRLLKPDGVYSYFNGFCGSNAFFHVVYCNLVTLEIENLGFSTQLIPLPVKDCLGDEVWEGVKQKYWQLDTYYLPVCQFSD

SEQ ID NO: 100106 - DNA, 1373 bp, Arabidopsis thaliana
  misc_feature (1)..(1373): Ceres Seq. ID no. 13604357
  misc_feature: MA Experiment ID: 108579 Result: Down-regulated in Transcription
  misc_feature: MA Experiment 108579 PARAMETER Experiment Name: At_4deg_Cold_cDNA_P Parameter: Temperature (deg C) Value: 4 vs. 22
  misc_feature: MA Experiment 108579 PARAMETER Experiment Name: At_4deg_Cold_cDNA_P Parameter: Timepoint (hr) Value: 6
  misc_feature: MA Experiment 108579 PARAMETER Experiment Name: At_4deg_Cold_cDNA_P Parameter: Tissue Value: Aerial
  misc_feature: MA Experiment ID: 20000224 Result: Up-regulated in Transcription
  misc_feature: MA Experiment ID: 20000495 Result: Up-regulated in Transcription
  misc_feature: MA Experiment 20000495 PARAMETER Experiment Name: At_Guard_Cells_P Parameter: Harvest Date Value: 8/2/2002
  misc_feature: MA Experiment 20000495 PARAMETER Experiment Name: At_Guard_Cells_P Parameter: Organism Value: A. thaliana
  misc_feature: MA Experiment 20000495 PARAMETER Experiment Name: At_Guard_Cells_P Parameter: Tissue Value: Guard Cells vs. Leaves
  misc_feature: MA Experiment ID: 20000496 Result: Up-regulated in Transcription
  misc_feature: MA Experiment 20000496 PARAMETER Experiment Name: At_Guard_Cells_P Parameter: Harvest Date Value: 7/19/2002
  misc_feature: MA Experiment 20000496 PARAMETER Experiment Name: At_Guard_Cells_P Parameter: Organism Value: Canola
  misc_feature: MA Experiment 20000496 PARAMETER Experiment Name: At_Guard_Cells_P Parameter: Tissue Value: Guard Cells vs. Leaves
  misc_feature: MA Experiment ID: 20000794 Result: Up-regulated in Transcription
  misc_feature: MA Experiment 20000794 PARAMETER Experiment Name: At_Petals_P Parameter: Age (day) Value: 23-25 days
  misc_feature: MA Experiment 20000794 PARAMETER Experiment Name: At_Petals_P Parameter: Plant Line Value: WS
  misc_feature: MA Experiment 20000794 PARAMETER Experiment Name: At_Petals_P Parameter: Tissue Value: Petals vs. Whole plant
  misc_feature: MA Experiment ID: 20001451 Result: Up-regulated in Transcription
  misc_feature: MA Experiment 20001451 PARAMETER Experiment Name: At_Far-red-induction_P Parameter: Age (day) Value: 7
  misc_feature: MA Experiment 20001451 PARAMETER Experiment Name: At_Far-red-induction_P Parameter: Light Value: Far-red vs. White
  misc_feature: MA Experiment 20001451 PARAMETER Experiment Name: At_Far-red-induction_P Parameter: Organism Value: A. thaliana
  misc_feature: MA Experiment 20001451 PARAMETER Experiment Name: At_Far-red-induction_P Parameter: Plant Line Value: Columbia
  misc_feature: MA Experiment 20001451 PARAMETER Experiment Name: At_Far-red-induction_P Parameter: Timepoint (hr) Value: 24
  misc_feature: MA Experiment 20001451 PARAMETER Experiment Name: At_Far-red-induction_P Parameter: Tissue Value: Whole Plant
  misc_feature: MA Experiment ID: 20001911 Result: Up-regulated in Transcription
  misc_feature: MA Experiment 20001911 PARAMETER Experiment Name: At_Drought_Reproduction_P Parameter: Age (day) Value: 40
  misc_feature: MA Experiment 20001911 PARAMETER Experiment Name: At_Drought_Reproduction_P Parameter: Organism Value: A. thaliana
  misc_feature: MA Experiment 20001911 PARAMETER Experiment Name: At_Drought_Reproduction_P Parameter: Plant Line Value: WS
  misc_feature: MA Experiment 20001911 PARAMETER Experiment Name: At_Drought_Reproduction_P Parameter: Timepoint (day) Value: 10
  misc_feature: MA Experiment 20001911 PARAMETER Experiment Name: At_Drought_Reproduction_P Parameter: Tissue Value: Flowers
  misc_feature: MA Experiment 20001911 PARAMETER Experiment Name: At_Drought_Reproduction_P Parameter: Treatment Value: Drought vs. No Drought
attagtggtaatttctgatcccattgctgctcctctctccggagatacaaaggcgaatctgaccagtaagaaagatggcagtcgagatggcctctcagtctcaggttttggtggaagagaaatcgagtgttagaatcttgacactaaacagaccaaagcagctgaatgctctgtccttccacatgatctctcgattgctgcaactgttccttgcatttgaggaggaccctagtgtgaaacttgtcatcctaaagggtcatgggagagccttttgtgctggtggcgatgttgcagctgttgttcgtgacatcaatcaaggtaactggagactcggtgccaattacttctcatctgaatacatgctcaactatgttatggccacatatagcaaagctcaggtttcaatcttgaatggtatcgtcatgggaggcggagctggtgtatccgtccatggtcgatttcgtattgcaactgagaacacggtttttgccatgcctgagacagctctggggctctttccagatgtaggcgcctcctacttcttgtcaaggctccctggtttttttggggagtatgttggcctcacaggagctagattagatggtgctgaaatgcttgcttgtggccttgcaactcattttgtgccttcaacgaggttgactgcattagaagcagatctttgcagaattaattcaaatgatccaacttttgcctcaacaattctcgatgcatacacccagcatccgcgcctgaaacagcagagtgcttaccgcaggttagatgttattgataggtgtttctcaaggagaacagtcgaagaaattatatctgcacttgagagagaggccactcaagaagcagatggttggatctcagctaccattcaagcattgaagaagggttcaccagcaagccttaaaatctctcttagatcgataagggaagggcgattgcagggggtggggcagtgtcttatccgcgagtatagaatggtgtgtcatgtgatgaagggagaaatcagcaaagattttgtggaggggtgcagagccatattggtagacaaagataagaacccaaagtgggagccaaggcgactggaggacatgaaggatagcatggtggagcagtacttcgagagagtggaacgggaggatgatctaaagcttccgccaaggaataacttgcctgctttagggatcgcaaagctgtgaagtggagaaggtgatggagcactattgtttacgtctgtgggaaagaaaaaagaaaataaatgtaacaacacttgtgttgaataggacttgcatacattacataaatcattattgtatttgagaattgacaccaaagcagcagagcagaattgtgttaagatt

SEQ ID NO: 100107 - protein, 378 aa, Arabidopsis thaliana; identical to SEQ ID NO: 25789
  peptide (1)..(378): Ceres Seq. ID no. 13604358
  misc_feature (20)..(191): Pfam Name: Enoyl-CoA hydratase/isomerase family Pfam Description: Enoyl-CoA hydratase/isomerase family
  misc_feature (1)..(378): Homolog of NCBI NO: 15239206 NR Description: 3-hydroxyisobutyryl-coenzyme A hydrolase hydrolase) (CHY1) [Arabidopsis thaliana]
  misc_feature (5)..(376): Homolog of NCBI NO: 15224549 NR Description: 3-hydroxyisobutyryl-coenzyme A hydrolase
  misc_feature (8)..(376): Homolog of NCBI NO: 15224539 NR Description: 3-hydroxyisobutyryl-coenzyme A hydrolase
  misc_feature (37)..(378): Homolog of NCBI NO: 6014701 NR Description: enoyl-CoA-hydratase [Avicennia marina]
  misc_feature (108)..(378): Homolog of NCBI NO: 2688820 NR Description: enoyl-CoA hydratase [Prunus armeniaca]
  misc_feature (10)..(277): Homolog of NCBI NO: 30695218 NR Description: enoyl-CoA hydratase/isomerase family [Arabidopsis
  misc_feature (250)..(365): Homolog of NCBI NO: 30695218 NR Description: enoyl-CoA hydratase/isomerase family [Arabidopsis
  misc_feature (8)..(371): Homolog of NCBI NO: 22329062 NR Description: 3-hydroxyisobutyryl-coenzyme A hydrolase hydrolase) family [Arabidopsis thaliana]
  misc_feature (1)..(365): Homolog of NCBI NO: 37536724 NR Description: putative enoyl-CoA-hydratase [Oryza sativa
  misc_feature (11)..(365): Homolog of NCBI NO: 30679729 NR Description: 3-hydroxyisobutyryl-coenzyme A hydrolase

SEQ ID NO: 100108 - protein, 374 aa, Arabidopsis thaliana; identical to SEQ ID NO: 25790
  peptide (1)..(374): Ceres Seq. ID no. 13604359
  misc_feature (16)..(187): Pfam Name: Enoyl-CoA hydratase/isomerase family Pfam Description: Enoyl-CoA hydratase/isomerase family
  misc_feature (1)..(374): Homolog of NCBI NO: 15239206 NR Description: 3-hydroxyisobutyryl-coenzyme A hydrolase hydrolase) (CHY1) [Arabidopsis thaliana]
  misc_feature (1)..(372): Homolog of NCBI NO: 15224549 NR Description: 3-hydroxyisobutyryl-coenzyme A hydrolase
  misc_feature (4)..(372): Homolog of NCBI NO: 15224539 NR Description: 3-hydroxyisobutyryl-coenzyme A hydrolase
  misc_feature (33)..(374): Homolog of NCBI NO: 6014701 NR Description: enoyl-CoA-hydratase [Avicennia marina]
  misc_feature (104)..(374): Homolog of NCBI NO: 2688820 NR Description: enoyl-CoA hydratase [Prunus armeniaca]
  misc_feature (6)..(273): Homolog of NCBI NO: 30695218 NR Description: enoyl-CoA hydratase/isomerase family [Arabidopsis
  misc_feature (246)..(361): Homolog of NCBI NO: 30695218 NR Description: enoyl-CoA hydratase/isomerase family [Arabidopsis
  misc_feature (4)..(367): Homolog of NCBI NO: 22329062 NR Description: 3-hydroxyisobutyryl-coenzyme A hydrolase hydrolase) family [Arabidopsis thaliana]
  misc_feature (1)..(361): Homolog of NCBI NO: 37536724 NR Description: putative enoyl-CoA-hydratase [Oryza sativa
  misc_feature (7)..(361): Homolog of NCBI NO: 30679729 NR Description: 3-hydroxyisobutyryl-coenzyme A hydrolase

SEQ ID NO: 100109 - protein, 342 aa, Arabidopsis thaliana; identical to SEQ ID NO: 25791
  peptide (1)..(342): Ceres Seq. ID no. 13604360
  misc_feature (1)..(155): Pfam Name: Enoyl-CoA hydratase/isomerase family Pfam Description: Enoyl-CoA hydratase/isomerase family
  misc_feature (1)..(342): Homolog of NCBI NO: 15239206 NR Description: 3-hydroxyisobutyryl-coenzyme A hydrolase hydrolase) (CHY1) [Arabidopsis thaliana]
  misc_feature (1)..(340): Homolog of NCBI NO: 15224549 NR Description: 3-hydroxyisobutyryl-coenzyme A hydrolase
  misc_feature (1)..(340): Homolog of NCBI NO: 15224539 NR Description: 3-hydroxyisobutyryl-coenzyme A hydrolase
  misc_feature (1)..(342): Homolog of NCBI NO: 6014701 NR Description: enoyl-CoA-hydratase [Avicennia marina]
  misc_feature (72)..(342): Homolog of NCBI NO: 2688820 NR Description: enoyl-CoA hydratase [Prunus armeniaca]
  misc_feature (1)..(241): Homolog of NCBI NO: 30695218 NR Description: enoyl-CoA hydratase/isomerase family [Arabidopsis
  misc_feature (214)..(329): Homolog of NCBI NO: 30695218 NR Description: enoyl-CoA hydratase/isomerase family [Arabidopsis
  misc_feature (1)..(335): Homolog of NCBI NO: 22329062 NR Description: 3-hydroxyisobutyryl-coenzyme A hydrolase hydrolase) family [Arabidopsis thaliana]
  misc_feature (1)..(329): Homolog of NCBI NO: 37536724 NR Description: putative enoyl-CoA-hydratase [Oryza sativa
  misc_feature (1)..(329): Homolog of NCBI NO: 30679729 NR Description: 3-hydroxyisobutyryl-coenzyme A hydrolase

SEQ ID NO: 100110 - DNA, 1422 bp, Arabidopsis thaliana
  misc_feature (1)..(1422): Ceres Seq. ID no. 13604380
  misc_feature: MA Experiment ID: 20000179 Result: Up-regulated in Transcription
  misc_feature: MA Experiment 20000179 PARAMETER Experiment Name: At_Germinating_Seeds_P Parameter: Age (hr) Value: 6 vs. 0
  misc_feature: MA Experiment 20000179 PARAMETER Experiment Name: At_Germinating_Seeds_P Parameter: Tissue Value: Germinating Seeds
  misc_feature: MA Experiment ID: 20000180 Result: Up-regulated in Transcription
  misc_feature: MA Experiment 20000180 PARAMETER Experiment Name: At_Germinating_Seeds_P Parameter: Age (hr) Value: 24 vs. 0
  misc_feature: MA Experiment 20000180 PARAMETER Experiment Name: At_Germinating_Seeds_P Parameter: Tissue Value: Germinating Seeds
  misc_feature: MA Experiment ID: 20000185 Result: Down-regulated in Transcription
  misc_feature: MA Experiment 20000185 PARAMETER Experiment Name: At_Roots__P Parameter: Age (day) Value: 7 vs. 21
  misc_feature: MA Experiment 20000185 PARAMETER Experiment Name: At_Roots__P Parameter: Organism Value: A. thaliana
  misc_feature: MA Experiment 20000185 PARAMETER Experiment Name: At_Roots__P Parameter: Tissue Value: Roots vs. Whole Plant
  misc_feature: MA Experiment ID: 20000214 Result: Up-regulated in Transcription
  misc_feature: MA Experiment 20000214 PARAMETER Experiment Name: At_4deg_Cold_P Parameter: Timepoint (hr) Value: 6
  misc_feature: MA Experiment ID: 20000264 Result: Down-regulated in Transcription
  misc_feature: MA Experiment 20000264 PARAMETER Experiment Name: At_Open_Flower_P Parameter: Age (day) Value: 21
  misc_feature: MA Experiment 20000264 PARAMETER Experiment Name: At_Open_Flower_P Parameter: Plant Line Value: WS
  misc_feature: MA Experiment 20000264 PARAMETER Experiment Name: At_Open_Flower_P Parameter: Tissue Value: Open Flower vs. Whole Plant
  misc_feature: MA Experiment ID: 20000269 Result: Down-regulated in Transcription
  misc_feature: MA Experiment 20000269 PARAMETER Experiment Name: At_1mM_KNO3_L-vs-H_Roots_P Parameter: Age (day) Value: 7,10,12
  misc_feature: MA Experiment 20000269 PARAMETER Experiment Name: At_1mM_KNO3_L-vs-H_Roots_P Parameter: Organism Value: A. thaliana
  misc_feature: MA Experiment 20000269 PARAMETER Experiment Name: At_1mM_KNO3_L-vs-H_Roots_P Parameter: Plant Line Value: WS
  misc_feature: MA Experiment 20000269 PARAMETER Experiment Name: At_1mM_KNO3_L-vs-H_Roots_P Parameter: Timepoint (day) Value: 7,10,12
  misc_feature: MA Experiment 20000269 PARAMETER Experiment Name: At_1mM_KNO3_L-vs-H_Roots_P Parameter: Tissue Value: Roots
  misc_feature: MA Experiment 20000269 PARAMETER Experiment Name: At_1mM_KNO3_L-vs-H_Roots_P Parameter: Treatment Value: 1mM KNO3 vs. 50mM KNO3
  misc_feature: MA Experiment ID: 20000286 Result: Down-regulated in Transcription
  misc_feature: MA Experiment 20000286 PARAMETER Experiment Name: At_Open_Flower_P Parameter: Age (day) Value: 21
  misc_feature: MA Experiment 20000286 PARAMETER Experiment Name: At_Open_Flower_P Parameter: Plant Line Value: WS
  misc_feature: MA Experiment 20000286 PARAMETER Experiment Name: At_Open_Flower_P Parameter: Tissue Value: Half Open vs. Whole Plant
  misc_feature: MA Experiment ID: 20000437 Result: Down-regulated in Transcription
  misc_feature: MA Experiment 20000437 PARAMETER Experiment Name: At_Drought_P Parameter: Age (day) Value: 8
  misc_feature: MA Experiment 20000437 PARAMETER Experiment Name: At_Drought_P Parameter: Organism Value: A. thaliana
  misc_feature: MA Experiment 20000437 PARAMETER Experiment Name: At_Drought_P Parameter: Plant Line Value: WS
  misc_feature: MA Experiment 20000437 PARAMETER Experiment Name: At_Drought_P Parameter: Timepoint (hr) Value: 24
  misc_feature: MA Experiment 20000437 PARAMETER Experiment Name: At_Drought_P Parameter: Tissue Value: Whole Plant
  misc_feature: MA Experiment 20000437 PARAMETER Experiment Name: At_Drought_P Parameter: Treatment Value: Drought vs. No Drought
  misc_feature: MA Experiment ID: 20000439 Result: Down-regulated in Transcription
  misc_feature: MA Experiment 20000439 PARAMETER Experiment Name: At_Roots__P Parameter: Age (day) Value: 14 vs. 21
  misc_feature: MA Experiment 20000439 PARAMETER Experiment Name: At_Roots__P Parameter: Organism Value: A. thaliana
  misc_feature: MA Experiment 20000439 PARAMETER Experiment Name: At_Roots__P Parameter: Tissue Value: Roots vs. Whole Plant
  misc_feature: MA Experiment ID: 20000794 Result: Down-regulated in Transcription
  misc_feature: MA Experiment 20000794 PARAMETER Experiment Name: At_Petals_P Parameter: Age (day) Value: 23-25 days
  misc_feature: MA Experiment 20000794 PARAMETER Experiment Name: At_Petals_P Parameter: Plant Line Value: WS
  misc_feature: MA Experiment 20000794 PARAMETER Experiment Name: At_Petals_P Parameter: Tissue Value: Petals vs. Whole plant
  misc_feature: MA Experiment ID: 20001450 Result: Down-regulated in Transcription
  misc_feature: MA Experiment 20001450 PARAMETER Experiment Name: At_Far-red-induction_P Parameter: Age (day) Value: 7
  misc_feature: MA Experiment 20001450 PARAMETER Experiment Name: At_Far-red-induction_P Parameter: Light Value: Far-red vs. White
  misc_feature: MA Experiment 20001450 PARAMETER Experiment Name: At_Far-red-induction_P Parameter: Organism Value: A. thaliana
  misc_feature: MA Experiment 20001450 PARAMETER Experiment Name: At_Far-red-induction_P Parameter: Plant Line Value: Columbia
  misc_feature: MA Experiment 20001450 PARAMETER Experiment Name: At_Far-red-induction_P Parameter: Timepoint (hr) Value: 8
  misc_feature: MA Experiment 20001450 PARAMETER Experiment Name: At_Far-red-induction_P Parameter: Tissue Value: Whole Plant
  misc_feature: MA Experiment ID: 20001557 Result: Down-regulated in Transcription
  misc_feature: MA Experiment 20001557 PARAMETER Experiment Name: At_Drought_Soil_Dry_P Parameter: Age (day) Value: 27
  misc_feature: MA Experiment 20001557 PARAMETER Experiment Name: At_Drought_Soil_Dry_P Parameter: Organism Value: A. thaliana
  misc_feature: MA Experiment 20001557 PARAMETER Experiment Name: At_Drought_Soil_Dry_P Parameter: Plant Line Value: WS
  misc_feature: MA Experiment 20001557 PARAMETER Experiment Name: At_Drought_Soil_Dry_P Parameter: Post Timepoint (hr) Value: 3
  misc_feature: MA Experiment 20001557 PARAMETER Experiment Name: At_Drought_Soil_Dry_P Parameter: Post-Treatment Value: Re-Water vs. No Drought
  misc_feature: MA Experiment 20001557 PARAMETER Experiment Name: At_Drought_Soil_Dry_P Parameter: Timepoint (day) Value: 13
  misc_feature: MA Experiment 20001557 PARAMETER Experiment Name: At_Drought_Soil_Dry_P Parameter: Treatment Value: Drought vs. No Drought
acacaatccacacacatccaatcacaacctcatcatatatctcccgctaatctttttttctttgatctttttttttttgcttattatttttttgactttgatctcccatcagttcatcttcttcttcttcttctgatcaaccatggctgctgctataagtgctgcagtctctttaccttcctccaagtcatcctctctcctcaccaaaatctcctctgtatcccctcaaaggattttcctcaagaagagcacagtgtgttacagaagagttgtgtcagtgaaggctcaggtgacaacagatactaccgaggcaccaccagttaaagtagtcaaggagtctaagaaacaggaagaagggattgttgtcaacaaattcaaacctaagaacccttacactggtcgctgccttttgaacaccaagatcaccggtgatgacgctcccggtgagacttggcacattgtcttcaccaccgaaggtgaggttccgtatagagaaggacaatcgataggagtgattccagagggaatagacaagaacgggaagccgcacaagctcaggctttactctatcgcgagtagtgccattggtgactttggagactccaagaccgtttctctctgtgtcaagagactagtttacacaaatgatggcggagagattgttaagggggtctgctccaacttcttgtgtgacttgaagccgggtgatgaagctaagatcactggacctgttggcaaggaaatgcttatgccaaaagaccccaatgccaccatcatcatgcttggaacaggaactggaatagctccattcagatcatttttgtggaaaatgttctttgaggagcacgaggactacaagttcaatggtttggcgtggcttttcttgggtgtacccacaagcagctcactgctatacaaggaggagtttgagaagatgaaggagaagaacccagacaacttcaggctggactttgcggtgagcagagagcagacgaacgagaagggagagaaaatgtacattcagacaagaatggcagagtatgcagaagagctgtgggagttgctgaagaaagacaacacctttgtttacatgtgtggtcttaagggtatggagaagggtatcgatgacattatggtctcgcttgctgctaaagatgggatcgattggttggagtacaagaagcaattgaagaggagtgaacagtggaatgttgaagtctactaaggaagcttctgagggagtaattatataatgtagataaaaagcttctgatgcattgtgaaatcttcatatctgcttcttttttctttctcaaggattttcaatcaaaacattcaaaagagagcatcaataccaccaaactactctttctcacttgttgttcatgttatatttcttgcaacaatatagtgagttttgtg

SEQ ID NO: 100111 - protein, 360 aa, Arabidopsis thaliana; identical to SEQ ID NO: 41459
  peptide (1)..(360): Ceres Seq. ID no. 13604381
  misc_feature (208)..(330): Pfam Name: Oxidoreductase NAD-binding domain Pfam Description: Oxidoreductase NAD-binding domain
  misc_feature (1)..(360): Homolog of NCBI NO: 15239282 NR Description: ferredoxin--NADP(+) reductase (adrenodoxin
  misc_feature (1)..(360): Homolog of NCBI NO: 5730139 NR Description: ferredoxin-NADP+ reductase [Arabidopsis thaliana]
  misc_feature (1)..(360): Homolog of NCBI NO: 729479 NR Description: Ferredoxin--NADP reductase, chloroplast precursor
  misc_feature (1)..(360): Homolog of NCBI NO: 119905 NR Description: Ferredoxin--NADP reductase, leaf isozyme,
  misc_feature (1)..(360): Homolog of NCBI NO: 6899972 NR Description: chloroplast ferredoxin-NADP+ oxidoreductase
  misc_feature (1)..(360): Homolog of NCBI NO: 729477 NR Description: Ferredoxin--NADP reductase, chloroplast precursor
  misc_feature (1)..(360): Homolog of NCBI NO: 170111 NR Description: ferredoxin-NADP oxidoreductase
  misc_feature (1)..(360): Homolog of NCBI NO: 119906 NR Description: Ferredoxin--NADP reductase, chloroplast precursor
  misc_feature (1)..(360): Homolog of NCBI NO: 3913651 NR Description: Ferredoxin--NADP reductase, leaf-type isozyme,
  misc_feature (54)..(360): Homolog of NCBI NO: 4930123 NR Description: Chain A, Wild-Type Pea Fnr >gi|4930124|pdb|1QG0|B

SEQ ID NO: 100112 - DNA, 1781 bp, Arabidopsis thaliana
  misc_feature (1)..(1781): Ceres Seq. ID no. 13604382
  misc_feature: MA Experiment ID: 108434 Result: Down-regulated in Transcription
  misc_feature: MA Experiment 108434 PARAMETER Experiment Name: At_Root_Tips_cDNA_P Parameter: Tissue Value: Root Tips
  misc_feature: MA Experiment ID: 108577 Result: Down-regulated in Transcription
  misc_feature: MA Experiment 108577 PARAMETER Experiment Name: At_42deg_Heat_cDNA_P Parameter: Temperature (deg C) Value: 42 vs. 22
  misc_feature: MA Experiment 108577 PARAMETER Experiment Name: At_42deg_Heat_cDNA_P Parameter: Timepoint (hr) Value: 6
  misc_feature: MA Experiment 108577 PARAMETER Experiment Name: At_42deg_Heat_cDNA_P Parameter: Tissue Value: Aerial
  misc_feature: MA Experiment ID: 108585 Result: Up-regulated in Transcription
  misc_feature: MA Experiment 108585 PARAMETER Experiment Name: At_5mM_NaNP_cDNA_P Parameter: Timepoint (hr) Value: 6
  misc_feature: MA Experiment 108585 PARAMETER Experiment Name: At_5mM_NaNP_cDNA_P Parameter: Tissue Value: Aerial
  misc_feature: MA Experiment 108585 PARAMETER Experiment Name: At_5mM_NaNP_cDNA_P Parameter: Treatment Value: null
  misc_feature: MA Experiment ID: 108667 Result: Up-regulated in Transcription
  misc_feature: MA Experiment 108667 PARAMETER Experiment Name: At_2mM_SA_cDNA_P Parameter: Plant Line Value: WS
  misc_feature: MA Experiment 108667 PARAMETER Experiment Name: At_2mM_SA_cDNA_P Parameter: Timepoint (hr) Value: 1
  misc_feature: MA Experiment 108667 PARAMETER Experiment Name: At_2mM_SA_cDNA_P Parameter: Treatment Value: 2mM SA vs. No Treatment
  misc_feature: MA Experiment ID: 20000111 Result: Down-regulated in Transcription
  misc_feature: MA Experiment 20000111 PARAMETER Experiment Name: At_42deg_Heat_cDNA_P Parameter: Temperature (deg C) Value: 42 vs. 22
  misc_feature: MA Experiment 20000111 PARAMETER Experiment Name: At_42deg_Heat_cDNA_P Parameter: Timepoint (hr) Value: 6
  misc_feature: MA Experiment 20000111 PARAMETER Experiment Name: At_42deg_Heat_cDNA_P Parameter: Tissue Value: Aerial
  misc_feature: MA Experiment ID: 20000113 Result: Down-regulated in Transcription
  misc_feature: MA Experiment 20000113 PARAMETER Experiment Name: At_42deg_Heat_cDNA_P Parameter: Temperature (deg C) Value: 42 vs. 22
  misc_feature: MA Experiment 20000113 PARAMETER Experiment Name: At_42deg_Heat_cDNA_P Parameter: Timepoint (hr) Value: 8
  misc_feature: MA Experiment 20000113 PARAMETER Experiment Name: At_42deg_Heat_cDNA_P Parameter: Tissue Value: Aerial
  misc_feature: MA Experiment ID: 20000184 Result: Down-regulated in Transcription
  misc_feature: MA Experiment 20000184 PARAMETER Experiment Name: At_Shoots__P Parameter: Age (day) Value: 7
  misc_feature: MA Experiment 20000184 PARAMETER Experiment Name: At_Shoots__P Parameter: Tissue Value: Shoots vs. Whole Plant
  misc_feature: MA Experiment ID: 20000185 Result: Down-regulated in Transcription
  misc_feature: MA Experiment 20000185 PARAMETER Experiment Name: At_Roots__P Parameter: Age (day) Value: 7 vs. 21
  misc_feature: MA Experiment 20000185 PARAMETER Experiment Name: At_Roots__P Parameter: Organism Value: A. thaliana
  misc_feature: MA Experiment 20000185 PARAMETER Experiment Name: At_Roots__P Parameter: Tissue Value: Roots vs. Whole Plant
  misc_feature: MA Experiment ID: 20000234 Result: Down-regulated in Transcription
  misc_feature: MA Experiment 20000234 PARAMETER Experiment Name: At_Siliques_P Parameter: Age (day) Value: 21
  misc_feature: MA Experiment 20000234 PARAMETER Experiment Name: At_Siliques_P Parameter: Organism Value: A. thaliana
  misc_feature: MA Experiment 20000234 PARAMETER Experiment Name: At_Siliques_P Parameter: Plant Line Value: WS
  misc_feature: MA Experiment 20000234 PARAMETER Experiment Name: At_Siliques_P Parameter: Tissue Value: Less Than 5mm Siliques vs. Whole Plant
  misc_feature: MA Experiment ID: 20000235 Result: Down-regulated in Transcription
  misc_feature: MA Experiment 20000235 PARAMETER Experiment Name: At_Siliques_P Parameter: Age (day) Value: 21
  misc_feature: MA Experiment 20000235 PARAMETER Experiment Name: At_Siliques_P Parameter: Organism Value: A. thaliana
  misc_feature: MA Experiment 20000235 PARAMETER Experiment Name: At_Siliques_P Parameter: Plant Line Value: WS
  misc_feature: MA Experiment 20000235 PARAMETER Experiment Name: At_Siliques_P Parameter: Tissue Value: 5-10mm Siliques vs. Whole Plant
  misc_feature: MA Experiment ID: 20000264 Result: Down-regulated in Transcription
  misc_feature: MA Experiment 20000264 PARAMETER Experiment Name: At_Open_Flower_P Parameter: Age (day) Value: 21
  misc_feature: MA Experiment 20000264 PARAMETER Experiment Name: At_Open_Flower_P Parameter: Plant Line Value: WS
  misc_feature: MA Experiment 20000264 PARAMETER Experiment Name: At_Open_Flower_P Parameter: Tissue Value: Open Flower vs. Whole Plant
  misc_feature: MA Experiment ID: 20000265 Result: Down-regulated in Transcription
  misc_feature: MA Experiment 20000265 PARAMETER Experiment Name: At_Open_Flower_P Parameter: Age (day) Value: 21
  misc_feature: MA Experiment 20000265 PARAMETER Experiment Name: At_Open_Flower_P Parameter: Plant Line Value: WS
  misc_feature: MA Experiment 20000265 PARAMETER Experiment Name: At_Open_Flower_P Parameter: Tissue Value: Closed Flower vs. Whole Plant
  misc_feature: MA Experiment ID: 20000437 Result: Down-regulated in Transcription
  misc_feature: MA Experiment 20000437 PARAMETER Experiment Name: At_Drought_P Parameter: Age (day) Value: 8
  misc_feature: MA Experiment 20000437 PARAMETER Experiment Name: At_Drought_P Parameter: Organism Value: A. thaliana
  misc_feature: MA Experiment 20000437 PARAMETER Experiment Name: At_Drought_P Parameter: Plant Line Value: WS
  misc_feature: MA Experiment 20000437 PARAMETER Experiment Name: At_Drought_P Parameter: Timepoint (hr) Value: 24
  misc_feature: MA Experiment 20000437 PARAMETER Experiment Name: At_Drought_P Parameter: Tissue Value: Whole Plant
  misc_feature: MA Experiment 20000437 PARAMETER Experiment Name: At_Drought_P Parameter: Treatment Value: Drought vs. No Drought
  misc_feature: MA Experiment ID: 20000438 Result: Down-regulated in Transcription
  misc_feature: MA Experiment 20000438 PARAMETER Experiment Name: At_Shoots__P Parameter: Age (day) Value: 14
  misc_feature: MA Experiment 20000438 PARAMETER Experiment Name: At_Shoots__P Parameter: Tissue Value: Shoots vs. Whole Plant
  misc_feature: MA Experiment ID: 20000439 Result: Down-regulated in Transcription
  misc_feature: MA Experiment 20000439 PARAMETER Experiment Name: At_Roots__P Parameter: Age (day) Value: 14 vs. 21
  misc_feature: MA Experiment 20000439 PARAMETER Experiment Name: At_Roots__P Parameter: Organism Value: A. thaliana
  misc_feature: MA Experiment 20000439 PARAMETER Experiment Name: At_Roots__P Parameter: Tissue Value: Roots vs. Whole Plant
  misc_feature: MA Experiment ID: 20000460 Result: Up-regulated in Transcription
  misc_feature: MA Experiment 20000460 PARAMETER Experiment Name: At_10percent_PEG_P Parameter: Age (day) Value: 12
  misc_feature: MA Experiment 20000460 PARAMETER Experiment Name: At_10percent_PEG_P Parameter: Organism Value: A. thaliana
  misc_feature: MA Experiment 20000460 PARAMETER Experiment Name: At_10percent_PEG_P Parameter: Plant Line Value: WS
  misc_feature: MA Experiment 20000460 PARAMETER Experiment Name: At_10percent_PEG_P Parameter: Timepoint (day) Value: 12
  misc_feature: MA Experiment 20000460 PARAMETER Experiment Name: At_10percent_PEG_P Parameter: Tissue Value: Whole Plant
  misc_feature: MA Experiment 20000460 PARAMETER Experiment Name: At_10percent_PEG_P Parameter: Treatment Value: 10percent PEG vs. No Treatment
  misc_feature: MA Experiment ID: 20000527 Result: Up-regulated in Transcription
  misc_feature: MA Experiment 20000527 PARAMETER Experiment Name: At_10percent_PEG_P Parameter: Age (day) Value: 20
  misc_feature: MA Experiment 20000527 PARAMETER Experiment Name: At_10percent_PEG_P Parameter: Organism Value: A. thaliana
  misc_feature: MA Experiment 20000527 PARAMETER Experiment Name: At_10percent_PEG_P Parameter: Plant Line Value: WS
  misc_feature: MA Experiment 20000527 PARAMETER Experiment Name: At_10percent_PEG_P Parameter: Timepoint (day) Value: 20
  misc_feature: MA Experiment 20000527 PARAMETER Experiment Name: At_10percent_PEG_P Parameter: Tissue Value: Whole Plant
  misc_feature: MA Experiment 20000527 PARAMETER Experiment Name: At_10percent_PEG_P Parameter: Treatment Value: 10percent PEG vs. No Treatment
  misc_feature: MA Experiment ID: 20000573 Result: Down-regulated in Transcription
  misc_feature: MA Experiment 20000573 PARAMETER Experiment Name: At_100uM_ABA_Mutants__P Parameter: Organism Value: A. thaliana
  misc_feature: MA Experiment 20000573 PARAMETER Experiment Name: At_100uM_ABA_Mutants__P Parameter: Plant Line Value: CS22 vs. Ler wt
  misc_feature: MA Experiment 20000573 PARAMETER Experiment Name: At_100uM_ABA_Mutants__P Parameter: Timepoint (hr) Value: N/A
  misc_feature: MA Experiment 20000573 PARAMETER Experiment Name: At_100uM_ABA_Mutants__P Parameter: Tissue Value: Whole Plant
  misc_feature: MA Experiment 20000573 PARAMETER Experiment Name: At_100uM_ABA_Mutants__P Parameter: Treatment Value: None
  misc_feature: MA Experiment ID: 20000574 Result: Down-regulated in Transcription
  misc_feature: MA Experiment 20000574 PARAMETER Experiment Name: At_100uM_ABA_Mutants__P Parameter: Organism Value: A. thaliana
  misc_feature: MA Experiment 20000574 PARAMETER Experiment Name: At_100uM_ABA_Mutants__P Parameter: Plant Line Value: CS23 vs. Ler wt
  misc_feature: MA Experiment 20000574 PARAMETER Experiment Name: At_100uM_ABA_Mutants__P Parameter: Timepoint (hr) Value: N/A
  misc_feature: MA Experiment 20000574 PARAMETER Experiment Name: At_100uM_ABA_Mutants__P Parameter: Tissue Value: Whole Plant
  misc_feature: MA Experiment 20000574 PARAMETER Experiment Name: At_100uM_ABA_Mutants__P Parameter: Treatment Value: None
  misc_feature: MA Experiment ID: 20000794 Result: Down-regulated in Transcription
  misc_feature: MA Experiment 20000794 PARAMETER Experiment Name: At_Petals_P Parameter: Age (day) Value: 23-25 days
  misc_feature: MA Experiment 20000794 PARAMETER Experiment Name: At_Petals_P Parameter: Plant Line Value: WS
  misc_feature: MA Experiment 20000794 PARAMETER Experiment Name: At_Petals_P Parameter: Tissue Value: Petals vs. Whole plant
  misc_feature: MA Experiment ID: 20001248 Result: Up-regulated in Transcription
  misc_feature: MA Experiment 20001248 PARAMETER Experiment Name: At_Far-red-induction_P Parameter: Age (day) Value: 7
  misc_feature: MA Experiment 20001248 PARAMETER Experiment Name: At_Far-red-induction_P Parameter: Light Value: Far-red vs. White
  misc_feature: MA Experiment 20001248 PARAMETER Experiment Name: At_Far-red-induction_P Parameter: Organism Value: A. thaliana
  misc_feature: MA Experiment 20001248 PARAMETER Experiment Name: At_Far-red-induction_P Parameter: Plant Line Value: Columbia
  misc_feature: MA Experiment 20001248 PARAMETER Experiment Name: At_Far-red-induction_P Parameter: Timepoint (hr) Value: 4
  misc_feature: MA Experiment 20001248 PARAMETER Experiment Name: At_Far-red-induction_P Parameter: Tissue Value: Whole Plant
  misc_feature: MA Experiment ID: 20001905 Result: Down-regulated in Transcription
  misc_feature: MA Experiment 20001905 PARAMETER Experiment Name: At_Drought_Reproduction_P Parameter: Age (day) Value: 40
  misc_feature: MA Experiment 20001905 PARAMETER Experiment Name: At_Drought_Reproduction_P Parameter: Organism Value: A. thaliana
  misc_feature: MA Experiment 20001905 PARAMETER Experiment Name: At_Drought_Reproduction_P Parameter: Plant Line Value: WS
  misc_feature: MA Experiment 20001905 PARAMETER Experiment Name: At_Drought_Reproduction_P Parameter: Timepoint (day) Value: 10
  misc_feature: MA Experiment 20001905 PARAMETER Experiment Name: At_Drought_Reproduction_P Parameter: Tissue Value: Rosettes
  misc_feature: MA Experiment 20001905 PARAMETER Experiment Name: At_Drought_Reproduction_P Parameter: Treatment Value: Drought vs. No Drought
cttctttcatctctttcttttattaatcccctttcttttctaactttctcgattcatcagagccatgggtgtctgtttctccgccattagagtcactggtgctagcagcagtagacgaagcagtcagaccaaatccaaggctgctcctactcccatcgataccaaggcctctaccaaacgccgaaccggctccatcccctgcggcaagcgtaccgattttggctactccaaagacttccacgatcactacaccatcggcaagttgctcggccatggtcaattcggctacacctacgtcgccatccacagacccaatggagatcgcgtcgccgtcaaaagactcgataagtctaagatggttcttcctattgctgttgaggatgtcaagcgtgaggttcagattcttattgctctctctggccacgagaatgttgttcagtttcacaatgcctttgaggatgacgattacgtctatattgttatggagttgtgcgaaggaggcgaattgctggataggatattatccaagaaaggtaatcggtactccgagaaagatgcagccgttgtcgttaggcagatgctcaaagttgcaggagaatgtcatctacacggtcttgtacatagagatatgaaaccagagaactttttgttcaaatcagctcaactagattcgcctctaaaggctacggattttggtttatcggattttatcaaaccagggaaaaggttccatgacattgttggtagcgcctattatgtggctcctgaggtattaaagcgcagatcagggcctgaatcagatgtatggagcattggtgtgattacgtatatattactttgtgggaggcggcctttttgggatagaactgaagatggtatatttaaagaggttttaagaaataaacctgacttcagccgtaaaccttgggcaactataagtgacagcgccaaagattttgtgaaaaagttacttgtaaaagacccacgagcacggctaactgctgcacaagcactatcacatgcgtgggttagagaaggcgggaatgctactgatatccctgtcgacatttcagttctgaacaacttaagacaatttgtgagatacagccgtctaaagcaatttgctttaagggcgcttgctagcacacttgacgaggcagagatctctgacctcagagatcaatttgatgcgattgatgtggataaaaatggcgtcattagtcttgaagagatgagacaggcacttgccaaagatcttccttggaaactgaaagactcacgagttgctgagatccttgaagcgattgatagcaacactgatgggttagtggacttcacagagtttgtagcagcagctctacatgttcatcaactagaagaacatgattcagagaaatggcagctaaggtcaagagcagcttttgagaaattcgacctagacaaagacgggtacataacgcctgaggaacttcgaatgcacacggggttaagaggatcaatagatccactgctggatgaagcagacatagacagagatgggaaaataagcctgcatgagttcaggagacttctaagaacagcgagcataagttcacagagagcaccaagccctgcaggtcacaggaatcttcgatagtatatactagaagaggagtaagtaaaggatacagaatgtaatttgttgggatgtgatatgtcttatcttcttatatgtaatgttggttgtaagataagtggggtattttggcgtttgtagtgataagtaagtaatactttggttg

SEQ ID NO: 100113 - protein, 523 aa, Arabidopsis thaliana; identical to SEQ ID NO: 77847
  peptide (1)..(523): Ceres Seq. ID no. 13604383
  misc_feature (62)..(322): Pfam Name: Protein kinase domain Pfam Description: Protein kinase domain
  misc_feature (1)..(523): Homolog of NCBI NO: 15239300 NR Description: calcium-dependent protein kinase [Arabidopsis
  misc_feature (1)..(523): Homolog of NCBI NO: 21553971 NR Description: calcium-dependent protein kinase [Arabidopsis
  misc_feature (38)..(516): Homolog of NCBI NO: 16904224 NR Description: calcium/calmodulin-dependent protein kinase CaMK2
  misc_feature (17)..(519): Homolog of NCBI NO: 15227920 NR Description: Ca2+-dependent ser/thr protein kinase -related
  misc_feature (1)..(521): Homolog of NCBI NO: 12592069 NR Description: calcium-dependent protein kinase [Oryza sativa]
  misc_feature (32)..(510): Homolog of NCBI NO: 3779218 NR Description: protein kinase CPK1 [Solanum tuberosum]
  misc_feature (1)..(520): Homolog of NCBI NO: 15234291 NR Description: Calcium-dependent serine/threonine protein kinase
  misc_feature (40)..(521): Homolog of NCBI NO: 34902680 NR Description: similar to calcium-dependent protein kinase
  misc_feature (1)..(510): Homolog of NCBI NO: 6689920 NR Description: calcium-dependent protein kinase [Oryza sativa]
  misc_feature (52)..(510): Homolog of NCBI NO: 33146627 NR Description: putative CDPK-related protein kinase [Oryza

SEQ ID NO: 100114 - protein, 426 aa, Arabidopsis thaliana; identical to SEQ ID NO: 77848
  peptide (1)..(426): Ceres Seq. ID no. 13604384
  misc_feature (1)..(225): Pfam Name: Protein kinase domain Pfam Description: Protein kinase domain
  misc_feature (1)..(426): Homolog of NCBI NO: 15239300 NR Description: calcium-dependent protein kinase [Arabidopsis
  misc_feature (1)..(426): Homolog of NCBI NO: 21553971 NR Description: calcium-dependent protein kinase [Arabidopsis
  misc_feature (1)..(419): Homolog of NCBI NO: 16904224 NR Description: calcium/calmodulin-dependent protein kinase CaMK2
  misc_feature (1)..(422): Homolog of NCBI NO: 15227920 NR Description: Ca2+-dependent ser/thr protein kinase -related
  misc_feature (1)..(424): Homolog of NCBI NO: 12592069 NR Description: calcium-dependent protein kinase [Oryza sativa]
  misc_feature (1)..(413): Homolog of NCBI NO: 3779218 NR Description: protein kinase CPK1 [Solanum tuberosum]
  misc_feature (1)..(423): Homolog of NCBI NO: 15234291 NR Description: Calcium-dependent serine/threonine protein kinase
  misc_feature (1)..(424): Homolog of NCBI NO: 34902680 NR Description: similar to calcium-dependent protein kinase
  misc_feature (1)..(413): Homolog of NCBI NO: 6689920 NR Description: calcium-dependent protein kinase [Oryza sativa]
  misc_feature (1)..(413): Homolog of NCBI NO: 33146627 NR Description: putative CDPK-related protein kinase [Oryza

SEQ ID NO: 100115 - protein, 384 aa, Arabidopsis thaliana
  peptide (1)..(384): Ceres Seq. ID no. 13604385
  misc_feature (1)..(183): Pfam Name: Protein kinase domain Pfam Description: Protein kinase domain
  misc_feature (1)..(384): Homolog of NCBI NO: 15239300 NR Description: calcium-dependent protein kinase [Arabidopsis
  misc_feature (1)..(384): Homolog of NCBI NO: 21553971 NR Description: calcium-dependent protein kinase [Arabidopsis
  misc_feature (1)..(377): Homolog of NCBI NO: 16904224 NR Description: calcium/calmodulin-dependent protein kinase CaMK2
  misc_feature (1)..(380): Homolog of NCBI NO: 15227920 NR Description: Ca2+-dependent ser/thr protein kinase -related
  misc_feature (1)..(382): Homolog of NCBI NO: 12592069 NR Description: calcium-dependent protein kinase [Oryza sativa]
  misc_feature (1)..(371): Homolog of NCBI NO: 3779218 NR Description: protein kinase CPK1 [Solanum tuberosum]
  misc_feature (1)..(381): Homolog of NCBI NO: 15234291 NR Description: Calcium-dependent serine/threonine protein kinase
  misc_feature (1)..(382): Homolog of NCBI NO: 34902680 NR Description: similar to calcium-dependent protein kinase
  misc_feature (1)..(371): Homolog of NCBI NO: 6689920 NR Description: calcium-dependent protein kinase [Oryza sativa]
  misc_feature (1)..(371): Homolog of NCBI NO: 33146627 NR Description: putative CDPK-related protein kinase [Oryza
MELCEGGELLDRILSKKGNRYSEKDAAVVVRQMLKVAGECHLHGLVHRDMKPENFLFKSAQLDSPLKATDFGLSDFIKPGKRFHDIVGSAYYVAPEVLKRRSGPESDVWSIGVITYILLCGRRPFWDRTEDGIFKEVLRNKPDFSRKPWATISDSAKDFVKKLLVKDPRARLTAAQALSHAWVREGGNATDIPVDISVLNNLRQFVRYSRLKQFALRALASTLDEAEISDLRDQFDAIDVDKNGVISLEEMRQALAKDLPWKLKDSRVAEILEAIDSNTDGLVDFTEFVAAALHVHQLEEHDSEKWQLRSRAAFEKFDLDKDGYITPEELRMHTGLRGSIDPLLDEADIDRDGKISLHEFRRLLRTASISSQRAPSPAGHRNLR

SEQ ID NO: 100116 - DNA, 810 bp, Arabidopsis thaliana
  misc_feature (1)..(810): Ceres Seq. ID no. 13604386
  misc_feature: MA Experiment ID: 108434 Result: Up-regulated in Transcription
  misc_feature: MA Experiment 108434 PARAMETER Experiment Name: At_Root_Tips_cDNA_P Parameter: Tissue Value: Root Tips
  misc_feature: MA Experiment ID: 108461 Result: Up-regulated in Transcription
  misc_feature: MA Experiment 108461 PARAMETER Experiment Name: At_Germinating_Seeds_cDNA_P Parameter: Age (day) Value: 1 vs. 0
  misc_feature: MA Experiment 108461 PARAMETER Experiment Name: At_Germinating_Seeds_cDNA_P Parameter: Tissue Value: Germinating Seeds
  misc_feature: MA Experiment ID: 108462 Result: Up-regulated in Transcription
  misc_feature: MA Experiment 108462 PARAMETER Experiment Name: At_Germinating_Seeds_cDNA_P Parameter: Age (day) Value: 2 vs. 0
  misc_feature: MA Experiment 108462 PARAMETER Experiment Name: At_Germinating_Seeds_cDNA_P Parameter: Tissue Value: Germinating Seeds
  misc_feature: MA Experiment ID: 108463 Result: Up-regulated in Transcription
  misc_feature: MA Experiment 108463 PARAMETER Experiment Name: At_Germinating_Seeds_cDNA_P Parameter: Age (day) Value: 3 vs. 0
  misc_feature: MA Experiment 108463 PARAMETER Experiment Name: At_Germinating_Seeds_cDNA_P Parameter: Tissue Value: Germinating Seeds
  misc_feature: MA Experiment ID: 108464 Result: Up-regulated in Transcription
  misc_feature: MA Experiment 108464 PARAMETER Experiment Name: At_Germinating_Seeds_cDNA_P Parameter: Age (day) Value: 4 vs. 0
  misc_feature: MA Experiment 108464 PARAMETER Experiment Name: At_Germinating_Seeds_cDNA_P Parameter: Tissue Value: Germinating Seeds
  misc_feature: MA Experiment ID: 108668 Result: Down-regulated in Transcription
  misc_feature: MA Experiment 108668 PARAMETER Experiment Name: At_2mM_SA_cDNA_P Parameter: Plant Line Value: WS
  misc_feature: MA Experiment 108668 PARAMETER Experiment Name: At_2mM_SA_cDNA_P Parameter: Timepoint (hr) Value: 6
  misc_feature: MA Experiment 108668 PARAMETER Experiment Name: At_2mM_SA_cDNA_P Parameter: Treatment Value: 2mM SA vs. No Treatment
  misc_feature: MA Experiment ID: 20000071 Result: Down-regulated in Transcription
  misc_feature: MA Experiment 20000071 PARAMETER Experiment Name: At_100uM_ABA_Mutants_cDNA_P Parameter: Plant Line Value: CS8104
  misc_feature: MA Experiment 20000071 PARAMETER Experiment Name: At_100uM_ABA_Mutants_cDNA_P Parameter: Timepoint (hr) Value: 6
  misc_feature: MA Experiment 20000071 PARAMETER Experiment Name: At_100uM_ABA_Mutants_cDNA_P Parameter: Tissue Value: Aerial
  misc_feature: MA Experiment 20000071 PARAMETER Experiment Name: At_100uM_ABA_Mutants_cDNA_P Parameter: Treatment Value: 100uM ABA vs. No Treatment
  misc_feature: MA Experiment ID: 20000088 Result: Down-regulated in Transcription
  misc_feature: MA Experiment 20000088 PARAMETER Experiment Name: At_100uM_ABA_Mutants_cDNA_P Parameter: Plant Line Value: Landsberg
  misc_feature: MA Experiment 20000088 PARAMETER Experiment Name: At_100uM_ABA_Mutants_cDNA_P Parameter: Timepoint (hr) Value: 6
  misc_feature: MA Experiment 20000088 PARAMETER Experiment Name: At_100uM_ABA_Mutants_cDNA_P Parameter: Tissue Value: Aerial
  misc_feature: MA Experiment 20000088 PARAMETER Experiment Name: At_100uM_ABA_Mutants_cDNA_P Parameter: Treatment Value: 100uM ABA vs. No Treatment
  misc_feature: MA Experiment ID: 20000117 Result: Down-regulated in Transcription
  misc_feature: MA Experiment 20000117 PARAMETER Experiment Name: At_100uM_ABA_Mutants_cDNA_P Parameter: Plant Line Value: Columbia
  misc_feature: MA Experiment 20000117 PARAMETER Experiment Name: At_100uM_ABA_Mutants_cDNA_P Parameter: Timepoint (hr) Value: 6
  misc_feature: MA Experiment 20000117 PARAMETER Experiment Name: At_100uM_ABA_Mutants_cDNA_P Parameter: Tissue Value: Aerial
  misc_feature: MA Experiment 20000117 PARAMETER Experiment Name: At_100uM_ABA_Mutants_cDNA_P Parameter: Treatment Value: 100uM ABA vs. No Treatment
  misc_feature: MA Experiment ID: 20000180 Result: Up-regulated in Transcription
  misc_feature: MA Experiment 20000180 PARAMETER Experiment Name: At_Germinating_Seeds_P Parameter: Age (hr) Value: 24 vs. 0
  misc_feature: MA Experiment 20000180 PARAMETER Experiment Name: At_Germinating_Seeds_P Parameter: Tissue Value: Germinating Seeds
  misc_feature: MA Experiment ID: 20000227 Result: Up-regulated in Transcription
  misc_feature: MA Experiment 20000227 PARAMETER Experiment Name: At_Root-Tips-vs-Tops_P Parameter: Tissue Value: Root Tips vs. Root Tops
  misc_feature: MA Experiment ID: 20000235 Result: Up-regulated in Transcription
  misc_feature: MA Experiment 20000235 PARAMETER Experiment Name: At_Siliques_P Parameter: Age (day) Value: 21
  misc_feature: MA Experiment 20000235 PARAMETER Experiment Name: At_Siliques_P Parameter: Organism Value: A. thaliana
  misc_feature: MA Experiment 20000235 PARAMETER Experiment Name: At_Siliques_P Parameter: Plant Line Value: WS
  misc_feature: MA Experiment 20000235 PARAMETER Experiment Name: At_Siliques_P Parameter: Tissue Value: 5-10mm Siliques vs. Whole Plant
  misc_feature: MA Experiment ID: 20000794 Result: Down-regulated in Transcription
  misc_feature: MA Experiment 20000794 PARAMETER Experiment Name: At_Petals_P Parameter: Age (day) Value: 23-25 days
  misc_feature: MA Experiment 20000794 PARAMETER Experiment Name: At_Petals_P Parameter: Plant Line Value: WS
  misc_feature: MA Experiment 20000794 PARAMETER Experiment Name: At_Petals_P Parameter: Tissue Value: Petals vs. Whole plant
  misc_feature: MA Experiment ID: 20001558 Result: Up-regulated in Transcription
  misc_feature: MA Experiment 20001558 PARAMETER Experiment Name: At_Drought_Soil_Dry_P Parameter: Age (day) Value: 27
  misc_feature: MA Experiment 20001558 PARAMETER Experiment Name: At_Drought_Soil_Dry_P Parameter: Organism Value: A. thaliana
  misc_feature: MA Experiment 20001558 PARAMETER Experiment Name: At_Drought_Soil_Dry_P Parameter: Plant Line Value: WS
  misc_feature: MA Experiment 20001558 PARAMETER Experiment Name: At_Drought_Soil_Dry_P Parameter: Post Timepoint (hr) Value: 6
  misc_feature: MA Experiment 20001558 PARAMETER Experiment Name: At_Drought_Soil_Dry_P Parameter: Post-Treatment Value: Re-Water vs. No Drought
  misc_feature: MA Experiment 20001558 PARAMETER Experiment Name: At_Drought_Soil_Dry_P Parameter: Timepoint (day) Value: 13
  misc_feature: MA Experiment 20001558 PARAMETER Experiment Name: At_Drought_Soil_Dry_P Parameter: Treatment Value: Drought vs. No Drought
  misc_feature: MA Experiment ID: 20001560 Result: Up-regulated in Transcription
  misc_feature: MA Experiment 20001560 PARAMETER Experiment Name: At_Drought_Soil_Dry_P Parameter: Age (day) Value: 28
  misc_feature: MA Experiment 20001560 PARAMETER Experiment Name: At_Drought_Soil_Dry_P Parameter: Organism Value: A. thaliana
  misc_feature: MA Experiment 20001560 PARAMETER Experiment Name: At_Drought_Soil_Dry_P Parameter: Plant Line Value: WS
  misc_feature: MA Experiment 20001560 PARAMETER Experiment Name: At_Drought_Soil_Dry_P Parameter: Post Timepoint (hr) Value: None
  misc_feature: MA Experiment 20001560 PARAMETER Experiment Name: At_Drought_Soil_Dry_P Parameter: Post-Treatment Value: None
  misc_feature: MA Experiment 20001560 PARAMETER Experiment Name: At_Drought_Soil_Dry_P Parameter: Timepoint (day) Value: 14
  misc_feature: MA Experiment 20001560 PARAMETER Experiment Name: At_Drought_Soil_Dry_P Parameter: Treatment Value: Drought vs. No Drought
  misc_feature: MA Experiment ID: 20001905 Result: Down-regulated in Transcription
  misc_feature: MA Experiment 20001905 PARAMETER Experiment Name: At_Drought_Reproduction_P Parameter: Age (day) Value: 40
  misc_feature: MA Experiment 20001905 PARAMETER Experiment Name: At_Drought_Reproduction_P Parameter: Organism Value: A. thaliana
  misc_feature: MA Experiment 20001905 PARAMETER Experiment Name: At_Drought_Reproduction_P Parameter: Plant Line Value: WS
  misc_feature: MA Experiment 20001905 PARAMETER Experiment Name: At_Drought_Reproduction_P Parameter: Timepoint (day) Value: 10
  misc_feature: MA Experiment 20001905 PARAMETER Experiment Name: At_Drought_Reproduction_P Parameter: Tissue Value: Rosettes
  misc_feature: MA Experiment 20001905 PARAMETER Experiment Name: At_Drought_Reproduction_P Parameter: Treatment Value: Drought vs. No Drought
  misc_feature: MA Experiment ID: 20001906 Result: Down-regulated in Transcription
  misc_feature: MA Experiment 20001906 PARAMETER Experiment Name: At_Drought_Reproduction_P Parameter: Age (day) Value: 35
  misc_feature: MA Experiment 20001906 PARAMETER Experiment Name: At_Drought_Reproduction_P Parameter: Organism Value: A. thaliana
  misc_feature: MA Experiment 20001906 PARAMETER Experiment Name: At_Drought_Reproduction_P Parameter: Plant Line Value: WS
  misc_feature: MA Experiment 20001906 PARAMETER Experiment Name: At_Drought_Reproduction_P Parameter: Timepoint (day) Value: 5
  misc_feature: MA Experiment 20001906 PARAMETER Experiment Name: At_Drought_Reproduction_P Parameter: Tissue Value: Siliques
  misc_feature: MA Experiment 20001906 PARAMETER Experiment Name: At_Drought_Reproduction_P Parameter: Treatment Value: Drought vs. No Drought
  misc_feature: MA Experiment ID: 20001911 Result: Down-regulated in Transcription
  misc_feature: MA Experiment 20001911 PARAMETER Experiment Name: At_Drought_Reproduction_P Parameter: Age (day) Value: 40
  misc_feature: MA Experiment 20001911 PARAMETER Experiment Name: At_Drought_Reproduction_P Parameter: Organism Value: A. thaliana
  misc_feature: MA Experiment 20001911 PARAMETER Experiment Name: At_Drought_Reproduction_P Parameter: Plant Line Value: WS
  misc_feature: MA Experiment 20001911 PARAMETER Experiment Name: At_Drought_Reproduction_P Parameter: Timepoint (day) Value: 10
  misc_feature: MA Experiment 20001911 PARAMETER Experiment Name: At_Drought_Reproduction_P Parameter: Tissue Value: Flowers
  misc_feature: MA Experiment 20001911 PARAMETER Experiment Name: At_Drought_Reproduction_P Parameter: Treatment Value: Drought vs. No Drought
ggcctccacttttgtttttccacttctacggtaagtgaaagagagagagagagaggaaaaaaaaggggaaagcttaagatattggagagtaacaatgccttcaaattcaggagatgataatgttcttcaagttctcataaagaactttgatgtccttgctctcccattggttacactcgtctatcctctatatgcatcagtgaaagcaatagagacaagatcattaccagaagatgaacaatggcttacttactgggttctttacgcacttatctctctctttgaactcactttctccaaacctctcgagtggtttcctatatggccatacatgaagttgtttgggatctgttggttagtgttaccacaattcaatggagcagaacatatctacaaacatttcattagaccattctacagagatcctcaaagagctaccaccaaaatttggtatgttcctcacaagaaattcaatttcttccctaaacgcgacgacgacgacattctcactgctgctgaaaaatacatggaacaacacggtaccgaagcgtttgagcgaatgatcgttaagaaggatagttatgaaagaggtaggagtagtagaggaatcaataatcacatgatctttgatgatgactataggtactaataagttcttaaaccggtttaattagctactttcagtttataagtttgctatgtgacaatatattgtctgtttctatggttgttataatttgcgtggattatgtataagcccttatttaggactgcttatttttgtgaaaaatcaaataaacattttctctc

SEQ ID NO: 100117 - protein, 184 aa, Arabidopsis thaliana; identical to SEQ ID NO: 39710
  peptide (1)..(184): Ceres Seq. ID no. 13604387
  misc_feature (11)..(108): Pfam Name: TB2/DP1, HVA22 family Pfam Description: TB2/DP1, HVA22 family
  misc_feature (1)..(184): Homolog of NCBI NO: 15222421 NR Description: AtHVA22c [Arabidopsis thaliana]
  misc_feature (5)..(184): Homolog of NCBI NO: 15221266 NR Description: AtHVA22a [Arabidopsis thaliana]
  misc_feature (4)..(184): Homolog of NCBI NO: 4884934 NR Description: AtHVA22b [Arabidopsis thaliana]
  misc_feature (4)..(184): Homolog of NCBI NO: 15241840 NR Description: AtHVA22b-related protein [Arabidopsis thaliana]
  misc_feature (36)..(157): Homolog of NCBI NO: 34910810 NR Description: P0042A10.34 [Oryza sativa (japonica
  misc_feature (21)..(109): Homolog of NCBI NO: 18423191 NR Description: expressed protein [Arabidopsis thaliana] AtHVA22e [Arabidopsis thaliana] AtHVA22e [Arabidopsis thaliana] >gi|21537153|gb|AAM61494.1|
  misc_feature (24)..(133): Homolog of NCBI NO: 18416458 NR Description: abscisic acid-induced - like protein [Arabidopsis >gi|4884938|gb|AAD31882.1| AtHVA22d [Arabidopsis thaliana] AtHVA22d [Arabidopsis thaliana] >gi|16604611|gb|AAL24098.1|
  misc_feature (14)..(105): Homolog of NCBI NO: 1076715 NR Description: abscisic acid-induced protein HVA22 - barley
  misc_feature (14)..(105): Homolog of NCBI NO: 33342176 NR Description: hypothetical protein [Triticum aestivum]
  misc_feature (28)..(109): Homolog of NCBI NO: 8777395 NR Description: gene_id:MFB16.12~pir||T05517~similar to unknown

SEQ ID NO: 100118 - protein, 105 aa, Arabidopsis thaliana; identical to SEQ ID NO: 39711
  peptide (1)..(105): Ceres Seq. ID no. 13604388
  misc_feature (1)..(105): Homolog of NCBI NO: 15222421 NR Description: AtHVA22c [Arabidopsis thaliana]
  misc_feature (1)..(105): Homolog of NCBI NO: 15221266 NR Description: AtHVA22a [Arabidopsis thaliana]
  misc_feature (1)..(105): Homolog of NCBI NO: 4884934 NR Description: AtHVA22b [Arabidopsis thaliana]
  misc_feature (1)..(105): Homolog of NCBI NO: 15241840 NR Description: AtHVA22b-related protein [Arabidopsis thaliana]
  misc_feature (1)..(78): Homolog of NCBI NO: 34910810 NR Description: P0042A10.34 [Oryza sativa (japonica
  misc_feature (1)..(30): Homolog of NCBI NO: 18423191 NR Description: expressed protein [Arabidopsis thaliana] AtHVA22e [Arabidopsis thaliana] AtHVA22e [Arabidopsis thaliana] >gi|21537153|gb|AAM61494.1|
  misc_feature (1)..(54): Homolog of NCBI NO: 18416458 NR Description: abscisic acid-induced - like protein [Arabidopsis >gi|4884938|gb|AAD31882.1| AtHVA22d [Arabidopsis thaliana] AtHVA22d [Arabidopsis thaliana] >gi|16604611|gb|AAL24098.1|
  misc_feature (1)..(26): Homolog of NCBI NO: 1076715 NR Description: abscisic acid-induced protein HVA22 - barley
  misc_feature (1)..(26): Homolog of NCBI NO: 33342176 NR Description: hypothetical protein [Triticum aestivum]
  misc_feature (1)..(30): Homolog of NCBI NO: 8777395 NR Description: gene_id:MFB16.12~pir||T05517~similar to unknown

SEQ ID NO: 100119 - DNA, 1581 bp, Arabidopsis thaliana
  misc_feature (1)..(1581): Ceres Seq. ID no. 13604401
  misc_feature: MA Experiment ID: 20000264 Result: Up-regulated in Transcription
  misc_feature: MA Experiment 20000264 PARAMETER Experiment Name: At_Open_Flower_P Parameter: Age (day) Value: 21
  misc_feature: MA Experiment 20000264 PARAMETER Experiment Name: At_Open_Flower_P Parameter: Plant Line Value: WS
  misc_feature: MA Experiment 20000264 PARAMETER Experiment Name: At_Open_Flower_P Parameter: Tissue Value: Open Flower vs. Whole Plant
  misc_feature: MA Experiment ID: 20000286 Result: Up-regulated in Transcription
  misc_feature: MA Experiment 20000286 PARAMETER Experiment Name: At_Open_Flower_P Parameter: Age (day) Value: 21
  misc_feature: MA Experiment 20000286 PARAMETER Experiment Name: At_Open_Flower_P Parameter: Plant Line Value: WS
  misc_feature: MA Experiment 20000286 PARAMETER Experiment Name: At_Open_Flower_P Parameter: Tissue Value: Half Open vs. Whole Plant
  misc_feature: MA Experiment ID: 20000438 Result: Down-regulated in Transcription
  misc_feature: MA Experiment 20000438 PARAMETER Experiment Name: At_Shoots__P Parameter: Age (day) Value: 14
  misc_feature: MA Experiment 20000438 PARAMETER Experiment Name: At_Shoots__P Parameter: Tissue Value: Shoots vs. Whole Plant
  misc_feature: MA Experiment ID: 20000794 Result: Up-regulated in Transcription
  misc_feature: MA Experiment 20000794 PARAMETER Experiment Name: At_Petals_P Parameter: Age (day) Value: 23-25 days
  misc_feature: MA Experiment 20000794 PARAMETER Experiment Name: At_Petals_P Parameter: Plant Line Value: WS
  misc_feature: MA Experiment 20000794 PARAMETER Experiment Name: At_Petals_P Parameter: Tissue Value: Petals vs. Whole plant
  misc_feature: MA Experiment ID: 20001904 Result: Up-regulated in Transcription
  misc_feature: MA Experiment 20001904 PARAMETER Experiment Name: At_Drought_Reproduction_P Parameter: Age (day) Value: 37
  misc_feature: MA Experiment 20001904 PARAMETER Experiment Name: At_Drought_Reproduction_P Parameter: Organism Value: A. thaliana
  misc_feature: MA Experiment 20001904 PARAMETER Experiment Name: At_Drought_Reproduction_P Parameter: Plant Line Value: WS
  misc_feature: MA Experiment 20001904 PARAMETER Experiment Name: At_Drought_Reproduction_P Parameter: Timepoint (day) Value: 7
  misc_feature: MA Experiment 20001904 PARAMETER Experiment Name: At_Drought_Reproduction_P Parameter: Tissue Value: Rosettes
  misc_feature: MA Experiment 20001904 PARAMETER Experiment Name: At_Drought_Reproduction_P Parameter: Treatment Value: Drought vs. No Drought
  misc_feature: MA Experiment ID: 20001905 Result: Up-regulated in Transcription
  misc_feature: MA Experiment 20001905 PARAMETER Experiment Name: At_Drought_Reproduction_P Parameter: Age (day) Value: 40
  misc_feature: MA Experiment 20001905 PARAMETER Experiment Name: At_Drought_Reproduction_P Parameter: Organism Value: A. thaliana
  misc_feature: MA Experiment 20001905 PARAMETER Experiment Name: At_Drought_Reproduction_P Parameter: Plant Line Value: WS
  misc_feature: MA Experiment 20001905 PARAMETER Experiment Name: At_Drought_Reproduction_P Parameter: Timepoint (day) Value: 10
  misc_feature: MA Experiment 20001905 PARAMETER Experiment Name: At_Drought_Reproduction_P Parameter: Tissue Value: Rosettes
  misc_feature: MA Experiment 20001905 PARAMETER Experiment Name: At_Drought_Reproduction_P Parameter: Treatment Value: Drought vs. No Drought
  misc_feature: MA Experiment ID: 20001911 Result: Down-regulated in Transcription
  misc_feature: MA Experiment 20001911 PARAMETER Experiment Name: At_Drought_Reproduction_P Parameter: Age (day) Value: 40
  misc_feature: MA Experiment 20001911 PARAMETER Experiment Name: At_Drought_Reproduction_P Parameter: Organism Value: A. thaliana
  misc_feature: MA Experiment 20001911 PARAMETER Experiment Name: At_Drought_Reproduction_P Parameter: Plant Line Value: WS
  misc_feature: MA Experiment 20001911 PARAMETER Experiment Name: At_Drought_Reproduction_P Parameter: Timepoint (day) Value: 10
  misc_feature: MA Experiment 20001911 PARAMETER Experiment Name: At_Drought_Reproduction_P Parameter: Tissue Value: Flowers
  misc_feature: MA Experiment 20001911 PARAMETER Experiment Name: At_Drought_Reproduction_P Parameter: Treatment Value: Drought vs. No Drought
attataaagaaagaaatcttttttagattttgagctctggaatggagaaaagtatcaatggatcatgcagactcatcaagagactcgtgattatactttcttgtctttcatattcctttgttcgatcagactttacagagagaacaaatatcaattatgtatcagctgtgggagatcccgggatgagaaacgataacttaagggtggctatagaagcttggaaccaatgcaacgaggtcggtgaagaagctacaaacatgggaagccctcgaatggcagattgcttcgatatcgataactctagctttcccgtgaagataatccacaaagtcgacgaaagagacaacaggcttggggtaggaaatggaacctacggaggaataagcgctggagacaacgcagatatctacgcagcgcaaaaggaggtatacttaggaaacaaatgtcaagttgtggacaagccaaatccatggcagttttggatgataatgctaaagaacggtaatacggatactttagccgcaatttgtcccgaaaacgggaaaaaggcgaaaccatttcctcctacggggaggtttccatgttttgggaaaggatgtatgaacatgccatcgatgcatcatgagtacacaagcttggttgataacgaagaaggacatatgagtgggagtttttatgggacttgggacttggataacgaccaaaaagatccggttggtaataattcgtattataaggtgaaatgggagaagaagattgggggaaatgagagttgggtttttcatcatttgttgaagacttcttctaagtatccatggttgatgctttatctacgcgctgatgcttctcgaggtttctctggtggttatcattacgacactagagggatgatgaagatgacgctaaaatcgccagattttaaagtaaaattcaagctagagattattaaaggaggcggttcagggagccaattttacctaatggacatgggaagttgctggaaaaacgacggaagagactgcgacggcgacgtcacaaccgacgttacaaggtacagcgaaatgataatcaacccgggggcaaccgccgtttgcacccgcaaccgcctaggcgcttgtccgccagagcatacttttccaaacgggactaaagttcacaggacggacaaggagaagttccctttcgaagcgtatcactattactgcgttccgggaaacgcgcgttttgcggaatctccgtacgaggtttgtgatccgtacagtaatccacaaccgcaggagattctgcagatcttgcctcatccagtgtgggaacagtttgggtatccgacaaagaaaggacaaggttggattggagatccaagaacttgggaacttgatgtcggaaaactctctcagtcactcttcttttaccaggatccagggacgaaaccggtggagagacattggtcgtcgatagatttaggaactgaaatatatatgagtaagaatcaaattgctgaatggactgtaactgatttcgacattgttataccaaatgccgatatttaagtggaataataagattctgttataagctgct

SEQ ID NO: 100120 - protein, 502 aa, Arabidopsis thaliana
  peptide (1)..(502): Ceres Seq. ID no. 13604402
  misc_feature (1)..(502): Homolog of NCBI NO: 30685122 NR Description: expressed protein [Arabidopsis thaliana]
  misc_feature (48)..(502): Homolog of NCBI NO: 25335639 NR Description: F20D23.27 protein - Arabidopsis thaliana
  misc_feature (41)..(497): Homolog of NCBI NO: 16612271 NR Description: At2g47010/F14M4.16 [Arabidopsis thaliana]
  misc_feature (41)..(456): Homolog of NCBI NO: 18407231 NR Description: expressed protein [Arabidopsis thaliana]
  misc_feature (41)..(448): Homolog of NCBI NO: 7459476 NR Description: hypothetical protein At2g47010 [imported] -
  misc_feature (431)..(497): Homolog of NCBI NO: 22328547 NR Description: hypothetical protein [Arabidopsis thaliana]
MEKSINGSCRLIKRLVIILSCLSYSFVRSDFTERTNINYVSAVGDPGMRNDNLRVAIEAWNQCNEVGEEATNMGSPRMADCFDIDNSSFPVKIIHKVDERDNRLGVGNGTYGGISAGDNADIYAAQKEVYLGNKCQVVDKPNPWQFWMIMLKNGNTDTLAAICPENGKKAKPFPPTGRFPCFGKGCMNMPSMHHEYTSLVDNEEGHMSGSFYGTWDLDNDQKDPVGNNSYYKVKWEKKIGGNESWVFHHLLKTSSKYPWLMLYLRADASRGFSGGYHYDTRGMMKMTLKSPDFKVKFKLEIIKGGGSGSQFYLMDMGSCWKNDGRDCDGDVTTDVTRYSEMIINPGATAVCTRNRLGACPPEHTFPNGTKVHRTDKEKFPFEAYHYYCVPGNARFAESPYEVCDPYSNPQPQEILQILPHPVWEQFGYPTKKGQGWIGDPRTWELDVGKLSQSLFFYQDPGTKPVERHWSSIDLGTEIYMSKNQIAEWTVTDFDIVIPNADI

SEQ ID NO: 100121 - protein, 455 aa, Arabidopsis thaliana
  peptide (1)..(455): Ceres Seq. ID no. 13604403
  misc_feature (1)..(455): Homolog of NCBI NO: 30685122 NR Description: expressed protein [Arabidopsis thaliana]
  misc_feature (1)..(455): Homolog of NCBI NO: 25335639 NR Description: F20D23.27 protein - Arabidopsis thaliana
  misc_feature (1)..(450): Homolog of NCBI NO: 16612271 NR Description: At2g47010/F14M4.16 [Arabidopsis thaliana]
  misc_feature (1)..(409): Homolog of NCBI NO: 18407231 NR Description: expressed protein [Arabidopsis thaliana]
  misc_feature (1)..(401): Homolog of NCBI NO: 7459476 NR Description: hypothetical protein At2g47010 [imported] -
  misc_feature (384)..(450): Homolog of NCBI NO: 22328547 NR Description: hypothetical protein [Arabidopsis thaliana]
MRNDNLRVAIEAWNQCNEVGEEATNMGSPRMADCFDIDNSSFPVKIIHKVDERDNRLGVGNGTYGGISAGDNADIYAAQKEVYLGNKCQVVDKPNPWQFWMIMLKNGNTDTLAAICPENGKKAKPFPPTGRFPCFGKGCMNMPSMHHEYTSLVDNEEGHMSGSFYGTWDLDNDQKDPVGNNSYYKVKWEKKIGGNESWVFHHLLKTSSKYPWLMLYLRADASRGFSGGYHYDTRGMMKMTLKSPDFKVKFKLEIIKGGGSGSQFYLMDMGSCWKNDGRDCDGDVTTDVTRYSEMIINPGATAVCTRNRLGACPPEHTFPNGTKVHRTDKEKFPFEAYHYYCVPGNARFAESPYEVCDPYSNPQPQEILQILPHPVWEQFGYPTKKGQGWIGDPRTWELDVGKLSQSLFFYQDPGTKPVERHWSSIDLGTEIYMSKNQIAEWTVTDFDIVIPNADI

SEQ ID NO: 100122 - protein, 430 aa, Arabidopsis thaliana
  peptide (1)..(430): Ceres Seq. ID no. 13604404
  misc_feature (1)..(430): Homolog of NCBI NO: 30685122 NR Description: expressed protein [Arabidopsis thaliana]
  misc_feature (1)..(430): Homolog of NCBI NO: 25335639 NR Description: F20D23.27 protein - Arabidopsis thaliana
  misc_feature (1)..(425): Homolog of NCBI NO: 16612271 NR Description: At2g47010/F14M4.16 [Arabidopsis thaliana]
  misc_feature (1)..(384): Homolog of NCBI NO: 18407231 NR Description: expressed protein [Arabidopsis thaliana]
  misc_feature (1)..(376): Homolog of NCBI NO: 7459476 NR Description: hypothetical protein At2g47010 [imported] -
  misc_feature (359)..(425): Homolog of NCBI NO: 22328547 NR Description: hypothetical protein [Arabidopsis thaliana]
MGSPRMADCFDIDNSSFPVKIIHKVDERDNRLGVGNGTYGGISAGDNADIYAAQKEVYLGNKCQVVDKPNPWQFWMIMLKNGNTDTLAAICPENGKKAKPFPPTGRFPCFGKGCMNMPSMHHEYTSLVDNEEGHMSGSFYGTWDLDNDQKDPVGNNSYYKVKWEKKIGGNESWVFHHLLKTSSKYPWLMLYLRADASRGFSGGYHYDTRGMMKMTLKSPDFKVKFKLEIIKGGGSGSQFYLMDMGSCWKNDGRDCDGDVTTDVTRYSEMIINPGATAVCTRNRLGACPPEHTFPNGTKVHRTDKEKFPFEAYHYYCVPGNARFAESPYEVCDPYSNPQPQEILQILPHPVWEQFGYPTKKGQGWIGDPRTWELDVGKLSQSLFFYQDPGTKPVERHWSSIDLGTEIYMSKNQIAEWTVTDFDIVIPNADI

SEQ ID NO: 100123 - DNA, 799 bp, Arabidopsis thaliana
  misc_feature (1)..(799): Ceres Seq. ID no. 13604407
  misc_feature: MA Experiment ID: 20000069 Result: Down-regulated in Transcription
  misc_feature: MA Experiment 20000069 PARAMETER Experiment Name: At_100uM_ABA_Mutants_cDNA_P Parameter: Plant Line Value: CS23
  misc_feature: MA Experiment 20000069 PARAMETER Experiment Name: At_100uM_ABA_Mutants_cDNA_P Parameter: Timepoint (hr) Value: 6
  misc_feature: MA Experiment 20000069 PARAMETER Experiment Name: At_100uM_ABA_Mutants_cDNA_P Parameter: Tissue Value: Aerial
  misc_feature: MA Experiment 20000069 PARAMETER Experiment Name: At_100uM_ABA_Mutants_cDNA_P Parameter: Treatment Value: 100uM ABA vs. No Treatment
  misc_feature: MA Experiment ID: 20000070 Result: Down-regulated in Transcription
  misc_feature: MA Experiment 20000070 PARAMETER Experiment Name: At_100uM_ABA_Mutants_cDNA_P Parameter: Plant Line Value: CS24
  misc_feature: MA Experiment 20000070 PARAMETER Experiment Name: At_100uM_ABA_Mutants_cDNA_P Parameter: Timepoint (hr) Value: 6
  misc_feature: MA Experiment 20000070 PARAMETER Experiment Name: At_100uM_ABA_Mutants_cDNA_P Parameter: Tissue Value: Aerial
  misc_feature: MA Experiment 20000070 PARAMETER Experiment Name: At_100uM_ABA_Mutants_cDNA_P Parameter: Treatment Value: 100uM ABA vs. No Treatment
  misc_feature: MA Experiment ID: 20000072 Result: Down-regulated in Transcription
  misc_feature: MA Experiment 20000072 PARAMETER Experiment Name: At_100uM_ABA_Mutants_cDNA_P Parameter: Plant Line Value: CS8105
  misc_feature: MA Experiment 20000072 PARAMETER Experiment Name: At_100uM_ABA_Mutants_cDNA_P Parameter: Timepoint (hr) Value: 6
  misc_feature: MA Experiment 20000072 PARAMETER Experiment Name: At_100uM_ABA_Mutants_cDNA_P Parameter: Tissue Value: Aerial
  misc_feature: MA Experiment 20000072 PARAMETER Experiment Name: At_100uM_ABA_Mutants_cDNA_P Parameter: Treatment Value: 100uM ABA vs. No Treatment
  misc_feature: MA Experiment ID: 20000184 Result: Up-regulated in Transcription
  misc_feature: MA Experiment 20000184 PARAMETER Experiment Name: At_Shoots__P Parameter: Age (day) Value: 7
  misc_feature: MA Experiment 20000184 PARAMETER Experiment Name: At_Shoots__P Parameter: Tissue Value: Shoots vs. Whole Plant
  misc_feature: MA Experiment ID: 20000185 Result: Down-regulated in Transcription
  misc_feature: MA Experiment 20000185 PARAMETER Experiment Name: At_Roots__P Parameter: Age (day) Value: 7 vs. 21
  misc_feature: MA Experiment 20000185 PARAMETER Experiment Name: At_Roots__P Parameter: Organism Value: A. thaliana
  misc_feature: MA Experiment 20000185 PARAMETER Experiment Name: At_Roots__P Parameter: Tissue Value: Roots vs. Whole Plant
  misc_feature: MA Experiment ID: 20000437 Result: Down-regulated in Transcription
  misc_feature: MA Experiment 20000437 PARAMETER Experiment Name: At_Drought_P Parameter: Age (day) Value: 8
  misc_feature: MA Experiment 20000437 PARAMETER Experiment Name: At_Drought_P Parameter: Organism Value: A. thaliana
  misc_feature: MA Experiment 20000437 PARAMETER Experiment Name: At_Drought_P Parameter: Plant Line Value: WS
  misc_feature: MA Experiment 20000437 PARAMETER Experiment Name: At_Drought_P Parameter: Timepoint (hr) Value: 24
  misc_feature: MA Experiment 20000437 PARAMETER Experiment Name: At_Drought_P Parameter: Tissue Value: Whole Plant
  misc_feature: MA Experiment 20000437 PARAMETER Experiment Name: At_Drought_P Parameter: Treatment Value: Drought vs. No Drought
  misc_feature: MA Experiment ID: 20000439 Result: Down-regulated in Transcription
  misc_feature: MA Experiment 20000439 PARAMETER Experiment Name: At_Roots__P Parameter: Age (day) Value: 14 vs. 21
  misc_feature: MA Experiment 20000439 PARAMETER Experiment Name: At_Roots__P Parameter: Organism Value: A. thaliana
  misc_feature: MA Experiment 20000439 PARAMETER Experiment Name: At_Roots__P Parameter: Tissue Value: Roots vs. Whole Plant
ttttctctcaaaatccataaaaagagagagagataaataaagagaaaactaaagaagctagaagatggagaaaagtaatgatcatgacaaggctagccacggcggctccggtggtggtgccacggagaagtgggaggagactagcctcggaatccgaactgccgagacaatgctccggttagctccggtgggcctttgtgttgcagcacttgttgtcatgcttaaggactctgagactaatgagttcggttcaatttcttactccaatctcacagcctttaggtacttggtgcacgcaaatggaatatgtgcaggctactctcttctatcagcagccattgcagcgatgcctcgttcttcttcgacaatgcctcgtgtttggaccttcttttgtctcgaccagcttctgacctacctggttcttgctgctggagctgtatcagctgaggttctatacttggcttacaatggagactcagccattacttggagcgatgcatgtagctcctatggcggtttctgtcatagagccactgcttctgttataatcacattctttgtggtttgtttctacatcgttctctctctaatctcctcttataagctctttactcgctttgatcctccttccattgttgactccgccaagaatctcgaagtcgctgtcttcggaagttagatcctccatttgctcttcaagtacatctagtttgtcatgtttcaaatgttgtgtgtttttaactttggtcaagagaaagaatgcttatgtgtttgctcttctttcattgcttttcttcct

SEQ ID NO: 100124 - protein, 204 aa, Arabidopsis thaliana; identical to SEQ ID NO: 21025
  peptide (1)..(204): Ceres Seq. ID no. 13604408
  misc_feature (27)..(169): Pfam Name: Domain of unknown function (DUF588) Pfam Description: Domain of unknown function (DUF588)
  misc_feature (1)..(204): Homolog of NCBI NO: 18394453 NR Description: expressed integral membrane protein common family
  misc_feature (1)..(204): Homolog of NCBI NO: 17380964 NR Description: unknown protein [Arabidopsis thaliana]
  misc_feature (1)..(202): Homolog of NCBI NO: 16973324 NR Description: hypothetical protein [Gossypium hirsutum]
  misc_feature (13)..(202): Homolog of NCBI NO: 38344646 NR Description: OSJNBa0094P09.18 [Oryza sativa (japonica
  misc_feature (61)..(204): Homolog of NCBI NO: 14030504 NR Description: salicylic acid-induced fragment 1 protein
  misc_feature (31)..(188): Homolog of NCBI NO: 15231842 NR Description: expressed protein [Arabidopsis thaliana] gb|AAD50013.1~gene_id:MLN21.16~similar to unknown protein
  misc_feature (3)..(196): Homolog of NCBI NO: 15240435 NR Description: expressed protein [Arabidopsis thaliana] gb|AAD50013.1~gene_id:MBG8.25~similar to unknown protein thaliana] >gi|27754655|gb|AAO22772.1| unknown protein
  misc_feature (29)..(181): Homolog of NCBI NO: 15227576 NR Description: hypothetical integral membrane protein common [Arabidopsis thaliana] >gi|25408448|pir||H84776 hypothetical
  misc_feature (61)..(114): Homolog of NCBI NO: 16973322 NR Description: hypothetical protein [Gossypium hirsutum]
  misc_feature (12)..(181): Homolog of NCBI NO: 15239955 NR Description: hypothetical integral membrane protein common [Arabidopsis thaliana] >gi|9759318|dbj|BAB09685.1|

SEQ ID NO: 100125 - protein, 169 aa, Arabidopsis thaliana; identical to SEQ ID NO: 21026
  peptide (1)..(169): Ceres Seq. ID no. 13604409
  misc_feature (1)..(134): Pfam Name: Domain of unknown function (DUF588) Pfam Description: Domain of unknown function (DUF588)
  misc_feature (1)..(169): Homolog of NCBI NO: 18394453 NR Description: expressed integral membrane protein common family
  misc_feature (1)..(169): Homolog of NCBI NO: 17380964 NR Description: unknown protein [Arabidopsis thaliana]
  misc_feature (1)..(167): Homolog of NCBI NO: 16973324 NR Description: hypothetical protein [Gossypium hirsutum]
  misc_feature (1)..(167): Homolog of NCBI NO: 38344646 NR Description: OSJNBa0094P09.18 [Oryza sativa (japonica
  misc_feature (26)..(169): Homolog of NCBI NO: 14030504 NR Description: salicylic acid-induced fragment 1 protein
  misc_feature (1)..(153): Homolog of NCBI NO: 15231842 NR Description: expressed protein [Arabidopsis thaliana] gb|AAD50013.1~gene_id:MLN21.16~similar to unknown protein
  misc_feature (1)..(161): Homolog of NCBI NO: 15240435 NR Description: expressed protein [Arabidopsis thaliana] gb|AAD50013.1~gene_id:MBG8.25~similar to unknown protein thaliana] >gi|27754655|gb|AAO22772.1| unknown protein
  misc_feature (1)..(146): Homolog of NCBI NO: 15227576 NR Description: hypothetical integral membrane protein common [Arabidopsis thaliana] >gi|25408448|pir||H84776 hypothetical
  misc_feature (26)..(79): Homolog of NCBI NO: 16973322 NR Description: hypothetical protein [Gossypium hirsutum]
  misc_feature (1)..(146): Homolog of NCBI NO: 15239955 NR Description: hypothetical integral membrane protein common [Arabidopsis thaliana] >gi|9759318|dbj|BAB09685.1|

SEQ ID NO: 100126 - protein, 153 aa, Arabidopsis thaliana; identical to SEQ ID NO: 21027
  peptide (1)..(153): Ceres Seq. ID no. 13604410
  misc_feature (1)..(118): Pfam Name: Domain of unknown function (DUF588) Pfam Description: Domain of unknown function (DUF588)
  misc_feature (1)..(153): Homolog of NCBI NO: 18394453 NR Description: expressed integral membrane protein common family
  misc_feature (1)..(153): Homolog of NCBI NO: 17380964 NR Description: unknown protein [Arabidopsis thaliana]
  misc_feature (1)..(151): Homolog of NCBI NO: 16973324 NR Description: hypothetical protein [Gossypium hirsutum]
  misc_feature (1)..(151): Homolog of NCBI NO: 38344646 NR Description: OSJNBa0094P09.18 [Oryza sativa (japonica
  misc_feature (10)..(153): Homolog of NCBI NO: 14030504 NR Description: salicylic acid-induced fragment 1 protein
  misc_feature (1)..(137): Homolog of NCBI NO: 15231842 NR Description: expressed protein [Arabidopsis thaliana] gb|AAD50013.1~gene_id:MLN21.16~similar to unknown protein
  misc_feature (1)..(145): Homolog of NCBI NO: 15240435 NR Description: expressed protein [Arabidopsis thaliana] gb|AAD50013.1~gene_id:MBG8.25~similar to unknown protein thaliana] >gi|27754655|gb|AAO22772.1| unknown protein
  misc_feature (1)..(130): Homolog of NCBI NO: 15227576 NR Description: hypothetical integral membrane protein common [Arabidopsis thaliana] >gi|25408448|pir||H84776 hypothetical
  misc_feature (10)..(63): Homolog of NCBI NO: 16973322 NR Description: hypothetical protein [Gossypium hirsutum]
  misc_feature (1)..(130): Homolog of NCBI NO: 15239955 NR Description: hypothetical integral membrane protein common [Arabidopsis thaliana] >gi|9759318|dbj|BAB09685.1|

SEQ ID NO: 100127 - DNA, 2441 bp, Arabidopsis thaliana
  misc_feature (1)..(2441): Ceres Seq. ID no. 13604427
  misc_feature: MA Experiment ID: 20000315 Result: Down-regulated in Transcription
  misc_feature: MA Experiment 20000315 PARAMETER Experiment Name: At_14day_Shoots-Roots_Sub_P Parameter: Age (day) Value: 14
  misc_feature: MA Experiment 20000315 PARAMETER Experiment Name: At_14day_Shoots-Roots_Sub_P Parameter: Organism Value: A. thaliana
  misc_feature: MA Experiment 20000315 PARAMETER Experiment Name: At_14day_Shoots-Roots_Sub_P Parameter: Plant Line Value: WS
  misc_feature: MA Experiment 20000315 PARAMETER Experiment Name: At_14day_Shoots-Roots_Sub_P Parameter: Tissue Value: Shoots vs. Whole Plant
  misc_feature: MA Experiment ID: 20000348 Result: Up-regulated in Transcription
  misc_feature: MA Experiment 20000348 PARAMETER Experiment Name: At_100uM_ABA_Sub_P Parameter: Age (day) Value: 14
  misc_feature: MA Experiment 20000348 PARAMETER Experiment Name: At_100uM_ABA_Sub_P Parameter: Organism Value: A. thaliana
  misc_feature: MA Experiment 20000348 PARAMETER Experiment Name: At_100uM_ABA_Sub_P Parameter: Plant Line Value: WS
  misc_feature: MA Experiment 20000348 PARAMETER Experiment Name: At_100uM_ABA_Sub_P Parameter: Timepoint (hr) Value: 1
  misc_feature: MA Experiment 20000348 PARAMETER Experiment Name: At_100uM_ABA_Sub_P Parameter: Tissue Value: Aerial
  misc_feature: MA Experiment 20000348 PARAMETER Experiment Name: At_100uM_ABA_Sub_P Parameter: Treatment Value: 100uM ABA vs. No Treatment
  misc_feature: MA Experiment ID: 20000349 Result: Up-regulated in Transcription
  misc_feature: MA Experiment 20000349 PARAMETER Experiment Name: At_100uM_ABA_Sub_P Parameter: Age (day) Value: 14
  misc_feature: MA Experiment 20000349 PARAMETER Experiment Name: At_100uM_ABA_Sub_P Parameter: Organism Value: A. thaliana
  misc_feature: MA Experiment 20000349 PARAMETER Experiment Name: At_100uM_ABA_Sub_P Parameter: Plant Line Value: WS
  misc_feature: MA Experiment 20000349 PARAMETER Experiment Name: At_100uM_ABA_Sub_P Parameter: Timepoint (hr) Value: 6
  misc_feature: MA Experiment 20000349 PARAMETER Experiment Name: At_100uM_ABA_Sub_P Parameter: Tissue Value: Aerial
  misc_feature: MA Experiment 20000349 PARAMETER Experiment Name: At_100uM_ABA_Sub_P Parameter: Treatment Value: 100uM ABA vs. No Treatment
  misc_feature: MA Experiment ID: 20000355 Result: Down-regulated in Transcription
  misc_feature: MA Experiment 20000355 PARAMETER Experiment Name: At_Siliques_Sub_P Parameter: Age (day) Value: 21
  misc_feature: MA Experiment 20000355 PARAMETER Experiment Name: At_Siliques_Sub_P Parameter: Organism Value: A. thaliana
  misc_feature: MA Experiment 20000355 PARAMETER Experiment Name: At_Siliques_Sub_P Parameter: Plant Line Value: WS
  misc_feature: MA Experiment 20000355 PARAMETER Experiment Name: At_Siliques_Sub_P Parameter: Tissue Value: Less Than 5mm Siliques vs. Whole Plant
atgtttcgtttcgttttggaaagataagagagataaaggtttcgacttttttaggtttttctgtgtgttttgtgattcatttcgctgattgatatcaattctctctgtttgttgtcccttctcttcaatttcacctgacttttgtttttgttttggataaagttttcacctttgtgtcttctctctgctctcttgtgtgatctatctgaaaaaggctgatttttttttttgtgggtttctaaattagggtttgtgtgagtttattgtctttctgattcgatgaagatcaagagttatagaggatcgttagagtgatcaaaatcccacgaattcacaaaggatccgtcttcatagatccgtcagatctgttcagcggaggtacatacttcttcgtcattcactgctttctggattagttggtgagaataaacggctggtgggtctcggtgggaagctgaattggatgtagagttcatcagactatagcttagagaagaaaatgaagttttttgaatcgttttgctccagttgaggtttggaagctgcataccagctcatggaagagatttcacctgcagttgcacttactttgggtttagctaatacgatgtgtgactctggaatctcatctactttcgatatctccgagctggagaatgttactgatgcagctgacatgttgtgtaatcagaaaagacaaagatatagtaatggagtggtggattgtattatgggaagtgtttcagaagagaagactttatctgaagtgagaagtttgtcttctgattttagtgtaactgtccaggaatcagaagaagatgagccattagtatctgatgcgactattattagcgaaggtttaatagttgtggacgctaggtctgagataagtttgccagatacagttgaaactgataacgggcgagttcttgctacggccattatcctaaacgagacaaccatagaacaggttcccactgcagaagtccttattgcgagtctgaatcacgatgtgaatatggaggtggcaacttctgaggtagtcattaggttacctgaagaaaatcctaatgtagcaagaggaagcaggagtgtttatgaactagagtgtatacctctttggggcacgatttcaatttgcggtggaagatctgaaatggaggatgctgttagagctttacctcattttctcaaaatacccatcaaaatgcttatgggggatcatgaagggatgagtccaagtctcccatatctcactagtcacttctttggtgtatatgatggccacggaggcgctcaggttgctgactattgccatgatagaatccactctgctttggctgaagaaatcgaacggattaaagaggaattgtgtaggaggaacactggcgagggtaggcaggtccagtgggagaaagtctttgtagattgttacctaaaagtcgatgatgaggttaaagggaaaatcaacagacctgttgttggttcttctgataggatggttcttgaagctgtttcccctgaaaccgttggatcgactgctgtggttgctttggtttgttcatcgcatataatagtctcaaactgtggtgactcaagagcagttttactccgaggcaaagactccatgcctttatcagttgatcacaaaccagatagagaggatgagtatgcacgaatagagaaagctggaggaaaagttatacaatggcaaggcgctcgtgtttctggcgttcttgccatgtccaggtccatcggtgatcaatatctggagccatttgtaataccagatcccgaagtgacgtttatgccacgagctagagaagacgagtgtctaatattggccagtgatggactttgggacgtaatgagtaaccaagaagcttgcgattttgcgaggaggcggatcttggcttggcacaagaagaatggagcattgcctttagctgagagaggtgtaggagaagaccaagcgtgtcaagctgcggctgaatatctctccaaactcgctattcaaatgggaagcaaagacaatatctcaatcatagtgatcgacttgaaagctcaaagaaagttcaagaccagatcttgaaacagtgtatgctcgagctcttacactattataattttattatttcttatttattgaaaaaatttccacaagtttacataaaaataagaagtgaaatgttggggggaagaagaattaagaccttgatgcatagctgaagtccattcctttttctcatggacttgaatgtgtatgtttgttatgtataagaagaatagagaagaaatgtttttactttggagtcttgtaggtggatatgttgttgtaatattggagatgtggcttaaggaattgtaactgaaatttatgtcacattcaccttaatacttttctgtaatctattatatataaatacttgttgtgaaagaac

SEQ ID NO: 100128 - protein, 511 aa, Arabidopsis thaliana
  peptide (1)..(511): Ceres Seq. ID no. 13604428
  misc_feature (187)..(400): Pfam Name: Protein phosphatase 2C Pfam Description: Protein phosphatase 2C
  misc_feature (1)..(400): Homolog of NCBI NO: 8778461 NR Description: F1L3.26 [Arabidopsis thaliana]
  misc_feature (391)..(511): Homolog of NCBI NO: 8778461 NR Description: F1L3.26 [Arabidopsis thaliana]
  misc_feature (1)..(511): Homolog of NCBI NO: 30685388 NR Description: protein phosphatase 2C (PP2C) -related
  misc_feature (1)..(511): Homolog of NCBI NO: 26452332 NR Description: unknown protein [Arabidopsis thaliana]
  misc_feature (1)..(511): Homolog of NCBI NO: 15218595 NR Description: protein phosphatase 2C (P2C-HA) [Arabidopsis
  misc_feature (1)..(511): Homolog of NCBI NO: 3242077 NR Description: protein phosphatase 2C [Arabidopsis thaliana]
  misc_feature (168)..(511): Homolog of NCBI NO: 21902025 NR Description: protein phosphatase 2C-like protein [Oryza sativa
  misc_feature (102)..(325): Homolog of NCBI NO: 509419 NR Description: ABI1 [Arabidopsis thaliana]
  misc_feature (317)..(511): Homolog of NCBI NO: 509419 NR Description: ABI1 [Arabidopsis thaliana]
  misc_feature (102)..(325): Homolog of NCBI NO: 14334800 NR Description: putative protein phosphatase ABI1 [Arabidopsis
MEEISPAVALTLGLANTMCDSGISSTFDISELENVTDAADMLCNQKRQRYSNGVVDCIMGSVSEEKTLSEVRSLSSDFSVTVQESEEDEPLVSDATIISEGLIVVDARSEISLPDTVETDNGRVLATAIILNETTIEQVPTAEVLIASLNHDVNMEVATSEVVIRLPEENPNVARGSRSVYELECIPLWGTISICGGRSEMEDAVRALPHFLKIPIKMLMGDHEGMSPSLPYLTSHFFGVYDGHGGAQVADYCHDRIHSALAEEIERIKEELCRRNTGEGRQVQWEKVFVDCYLKVDDEVKGKINRPVVGSSDRMVLEAVSPETVGSTAVVALVCSSHIIVSNCGDSRAVLLRGKDSMPLSVDHKPDREDEYARIEKAGGKVIQWQGARVSGVLAMSRSIGDQYLEPFVIPDPEVTFMPRAREDECLILASDGLWDVMSNQEACDFARRRILAWHKKNGALPLAERGVGEDQACQAAAEYLSKLAIQMGSKDNISIIVIDLKAQRKFKTRS

SEQ ID NO: 100129 - protein, 494 aa, Arabidopsis thaliana
  peptide (1)..(494): Ceres Seq. ID no. 13604429
  misc_feature (170)..(383): Pfam Name: Protein phosphatase 2C Pfam Description: Protein phosphatase 2C
  misc_feature (1)..(383): Homolog of NCBI NO: 8778461 NR Description: F1L3.26 [Arabidopsis thaliana]
  misc_feature (374)..(494): Homolog of NCBI NO: 8778461 NR Description: F1L3.26 [Arabidopsis thaliana]
  misc_feature (1)..(494): Homolog of NCBI NO: 30685388 NR Description: protein phosphatase 2C (PP2C) -related
  misc_feature (1)..(494): Homolog of NCBI NO: 26452332 NR Description: unknown protein [Arabidopsis thaliana]
  misc_feature (1)..(494): Homolog of NCBI NO: 15218595 NR Description: protein phosphatase 2C (P2C-HA) [Arabidopsis
  misc_feature (1)..(494): Homolog of NCBI NO: 3242077 NR Description: protein phosphatase 2C [Arabidopsis thaliana]
  misc_feature (151)..(494): Homolog of NCBI NO: 21902025 NR Description: protein phosphatase 2C-like protein [Oryza sativa
  misc_feature (85)..(308): Homolog of NCBI NO: 509419 NR Description: ABI1 [Arabidopsis thaliana]
  misc_feature (300)..(494): Homolog of NCBI NO: 509419 NR Description: ABI1 [Arabidopsis thaliana]
  misc_feature (85)..(308): Homolog of NCBI NO: 14334800 NR Description: putative protein phosphatase ABI1 [Arabidopsis
MCDSGISSTFDISELENVTDAADMLCNQKRQRYSNGVVDCIMGSVSEEKTLSEVRSLSSDFSVTVQESEEDEPLVSDATIISEGLIVVDARSEISLPDTVETDNGRVLATAIILNETTIEQVPTAEVLIASLNHDVNMEVATSEVVIRLPEENPNVARGSRSVYELECIPLWGTISICGGRSEMEDAVRALPHFLKIPIKMLMGDHEGMSPSLPYLTSHFFGVYDGHGGAQVADYCHDRIHSALAEEIERIKEELCRRNTGEGRQVQWEKVFVDCYLKVDDEVKGKINRPVVGSSDRMVLEAVSPETVGSTAVVALVCSSHIIVSNCGDSRAVLLRGKDSMPLSVDHKPDREDEYARIEKAGGKVIQWQGARVSGVLAMSRSIGDQYLEPFVIPDPEVTFMPRAREDECLILASDGLWDVMSNQEACDFARRRILAWHKKNGALPLAERGVGEDQACQAAAEYLSKLAIQMGSKDNISIIVIDLKAQRKFKTRS

SEQ ID NO: 100130 - protein, 471 aa, Arabidopsis thaliana
  peptide (1)..(471): Ceres Seq. ID no. 13604430
  misc_feature (147)..(360): Pfam Name: Protein phosphatase 2C Pfam Description: Protein phosphatase 2C
  misc_feature (1)..(360): Homolog of NCBI NO: 8778461 NR Description: F1L3.26 [Arabidopsis thaliana]
  misc_feature (351)..(471): Homolog of NCBI NO: 8778461 NR Description: F1L3.26 [Arabidopsis thaliana]
  misc_feature (1)..(471): Homolog of NCBI NO: 30685388 NR Description: protein phosphatase 2C (PP2C) -related
  misc_feature (1)..(471): Homolog of NCBI NO: 26452332 NR Description: unknown protein [Arabidopsis thaliana]
  misc_feature (1)..(471): Homolog of NCBI NO: 15218595 NR Description: protein phosphatase 2C (P2C-HA) [Arabidopsis
  misc_feature (1)..(471): Homolog of NCBI NO: 3242077 NR Description: protein phosphatase 2C [Arabidopsis thaliana]
  misc_feature (128)..(471): Homolog of NCBI NO: 21902025 NR Description: protein phosphatase 2C-like protein [Oryza sativa
  misc_feature (62)..(285): Homolog of NCBI NO: 509419 NR Description: ABI1 [Arabidopsis thaliana]
  misc_feature (277)..(471): Homolog of NCBI NO: 509419 NR Description: ABI1 [Arabidopsis thaliana]
  misc_feature (62)..(285): Homolog of NCBI NO: 14334800 NR Description: putative protein phosphatase ABI1 [Arabidopsis
MLCNQKRQRYSNGVVDCIMGSVSEEKTLSEVRSLSSDFSVTVQESEEDEPLVSDATIISEGLIVVDARSEISLPDTVETDNGRVLATAIILNETTIEQVPTAEVLIASLNHDVNMEVATSEVVIRLPEENPNVARGSRSVYELECIPLWGTISICGGRSEMEDAVRALPHFLKIPIKMLMGDHEGMSPSLPYLTSHFFGVYDGHGGAQVADYCHDRIHSALAEEIERIKEELCRRNTGEGRQVQWEKVFVDCYLKVDDEVKGKINRPVVGSSDRMVLEAVSPETVGSTAVVALVCSSHIIVSNCGDSRAVLLRGKDSMPLSVDHKPDREDEYARIEKAGGKVIQWQGARVSGVLAMSRSIGDQYLEPFVIPDPEVTFMPRAREDECLILASDGLWDVMSNQEACDFARRRILAWHKKNGALPLAERGVGEDQACQAAAEYLSKLAIQMGSKDNISIIVIDLKAQRKFKTRS

SEQ ID NO: 100131 - DNA, 1034 bp, Arabidopsis thaliana
  misc_feature (1)..(1034): Ceres Seq. ID no. 13604435
  misc_feature: MA Experiment ID: 20000171 Result: Down-regulated in Transcription
  misc_feature: MA Experiment 20000171 PARAMETER Experiment Name: At_42deg_Heat_P Parameter: Age (day) Value: 14
  misc_feature: MA Experiment 20000171 PARAMETER Experiment Name: At_42deg_Heat_P Parameter: Organism Value: A. thaliana
  misc_feature: MA Experiment 20000171 PARAMETER Experiment Name: At_42deg_Heat_P Parameter: Plant Line Value: WS
  misc_feature: MA Experiment 20000171 PARAMETER Experiment Name: At_42deg_Heat_P Parameter: Temperature (deg C) Value: 42 vs. 22
  misc_feature: MA Experiment 20000171 PARAMETER Experiment Name: At_42deg_Heat_P Parameter: Timepoint (hr) Value: 1
  misc_feature: MA Experiment 20000171 PARAMETER Experiment Name: At_42deg_Heat_P Parameter: Tissue Value: Aerial
  misc_feature: MA Experiment ID: 20000213 Result: Up-regulated in Transcription
  misc_feature: MA Experiment 20000213 PARAMETER Experiment Name: At_4deg_Cold_P Parameter: Timepoint (hr) Value: 2
  misc_feature: MA Experiment ID: 20000265 Result: Down-regulated in Transcription
  misc_feature: MA Experiment 20000265 PARAMETER Experiment Name: At_Open_Flower_P Parameter: Age (day) Value: 21
  misc_feature: MA Experiment 20000265 PARAMETER Experiment Name: At_Open_Flower_P Parameter: Plant Line Value: WS
  misc_feature: MA Experiment 20000265 PARAMETER Experiment Name: At_Open_Flower_P Parameter: Tissue Value: Closed Flower vs. Whole Plant
  misc_feature: MA Experiment ID: 20000286 Result: Down-regulated in Transcription
  misc_feature: MA Experiment 20000286 PARAMETER Experiment Name: At_Open_Flower_P Parameter: Age (day) Value: 21
  misc_feature: MA Experiment 20000286 PARAMETER Experiment Name: At_Open_Flower_P Parameter: Plant Line Value: WS
  misc_feature: MA Experiment 20000286 PARAMETER Experiment Name: At_Open_Flower_P Parameter: Tissue Value: Half Open vs. Whole Plant
  misc_feature: MA Experiment ID: 20000438 Result: Down-regulated in Transcription
  misc_feature: MA Experiment 20000438 PARAMETER Experiment Name: At_Shoots__P Parameter: Age (day) Value: 14
  misc_feature: MA Experiment 20000438 PARAMETER Experiment Name: At_Shoots__P Parameter: Tissue Value: Shoots vs. Whole Plant
  misc_feature: MA Experiment ID: 20000495 Result: Down-regulated in Transcription
  misc_feature: MA Experiment 20000495 PARAMETER Experiment Name: At_Guard_Cells_P Parameter: Harvest Date Value: 8/2/2002
  misc_feature: MA Experiment 20000495 PARAMETER Experiment Name: At_Guard_Cells_P Parameter: Organism Value: A. thaliana
  misc_feature: MA Experiment 20000495 PARAMETER Experiment Name: At_Guard_Cells_P Parameter: Tissue Value: Guard Cells vs. Leaves
  misc_feature: MA Experiment ID: 20000606 Result: Up-regulated in Transcription
  misc_feature: MA Experiment 20000606 PARAMETER Experiment Name: At_CS8548_Mutant_P Parameter: Age (day) Value: 14
  misc_feature: MA Experiment 20000606 PARAMETER Experiment Name: At_CS8548_Mutant_P Parameter: Plant Line Value: CS8548 vs. wt
  misc_feature: MA Experiment 20000606 PARAMETER Experiment Name: At_CS8548_Mutant_P Parameter: Tissue Value: Whole Plant
  misc_feature: MA Experiment ID: 20001247 Result: Up-regulated in Transcription
  misc_feature: MA Experiment 20001247 PARAMETER Experiment Name: At_Far-red-induction_P Parameter: Age (day) Value: 7
  misc_feature: MA Experiment 20001247 PARAMETER Experiment Name: At_Far-red-induction_P Parameter: Light Value: Far-red vs. White
  misc_feature: MA Experiment 20001247 PARAMETER Experiment Name: At_Far-red-induction_P Parameter: Organism Value: A. thaliana
  misc_feature: MA Experiment 20001247 PARAMETER Experiment Name: At_Far-red-induction_P Parameter: Plant Line Value: Columbia
  misc_feature: MA Experiment 20001247 PARAMETER Experiment Name: At_Far-red-induction_P Parameter: Timepoint (hr) Value: 1
  misc_feature: MA Experiment 20001247 PARAMETER Experiment Name: At_Far-red-induction_P Parameter: Tissue Value: Whole Plant
acccttattattattcattctctctaatcaaatcctcttctctctcaaatctcaatctccgattatgacagacgacagagtttaccctgcatcaaaacctcccgccatcgtcggtggcggtgccccaaccaccaatccaactttcccggcgaacaaagctcagctctacaacgcaaatcgtcccgcttaccgtccaccagctggtcgtcgtcgtactagccatacccgtggatgttgctgccgttgctgttgctggacgatattcgtaatcatcctcttactcctcatcgtcgccgccgcatcagccgtcgtatacctaatctaccgtcctcaacgacctagcttcaccgtctctgaactcaaaatctccactctcaacttcacatccgccgttcgcctcaccaccgccatttccctctccgtcatcgccagaaaccctaacaaaaacgttggattcatctacgacgtcaccgacatcacactctacaaagcatccaccggaggagatgatgacgtagtcattggtaaaggaacgatcgcggcgttttctcacgggaagaagaacacgactacgcttagaagtacgatcggaagtcctccggatgaactcgatgagatctcggcgggtaagctgaaaggagatctgaaggcgaagaaagcagtggcgattaagattgttttgaactcgaaggtgaaagtgaagatgggagctctaaaaactcctaaatcaggaattagggttacttgtgaagggattaaagtggtggctccgacgggaaagaaggcgacgacggctacgacttccgccgctaagtgtaaggttgatccaagatttaagatctggaaaattactttctaaatatagtaaacaaaataatggaatcacattcttagttttttcttcattttctttttattactccattgtttcaattttcatttctttttaaatttgatttcatatacagttctttgattcctgtaagactttatttttttggtttatgtaaatgaagatataaatatttgtgttc

SEQ ID NO: 100132 - protein, 285 aa, Arabidopsis thaliana
  peptide (1)..(285): Ceres Seq. ID no. 13604436
  misc_feature (22)..(285): Homolog of NCBI NO: 18394509 NR Description: expressed protein [Arabidopsis thaliana] F1L3.32 [Arabidopsis thaliana] >gi|15450635|gb|AAK96589.1|
  misc_feature (21)..(285): Homolog of NCBI NO: 11762174 NR Description: At1g17620 [Arabidopsis thaliana]
  misc_feature (29)..(285): Homolog of NCBI NO: 15239804 NR Description: expressed protein [Arabidopsis thaliana]
  misc_feature (29)..(285): Homolog of NCBI NO: 21536796 NR Description: unknown [Arabidopsis thaliana]
  misc_feature (28)..(257): Homolog of NCBI NO: 34903552 NR Description: P0001B06.28 [Oryza sativa (japonica
  misc_feature (38)..(285): Homolog of NCBI NO: 34914304 NR Description: B1151A10.19 [Oryza sativa (japonica
  misc_feature (22)..(280): Homolog of NCBI NO: 10178216 NR Description: gb|AAF23842.1~gene_id:MLF18.15~similar to unknown
  misc_feature (22)..(280): Homolog of NCBI NO: 15239459 NR Description: hypothetical protein [Arabidopsis thaliana]
  misc_feature (25)..(258): Homolog of NCBI NO: 18401317 NR Description: expressed protein [Arabidopsis thaliana]
  misc_feature (26)..(274): Homolog of NCBI NO: 6686408 NR Description: F1E22.7 [Arabidopsis thaliana]
PLLLFILSNQILFSLKSQSPIMTDDRVYPASKPPAIVGGGAPTTNPTFPANKAQLYNANRPAYRPPAGRRRTSHTRGCCCRCCCWTIFVIILLLLIVAAASAVVYLIYRPQRPSFTVSELKISTLNFTSAVRLTTAISLSVIARNPNKNVGFIYDVTDITLYKASTGGDDDVVIGKGTIAAFSHGKKNTTTLRSTIGSPPDELDEISAGKLKGDLKAKKAVAIKIVLNSKVKVKMGALKTPKSGIRVTCEGIKVVAPTGKKATTATTSAAKCKVDPRFKIWKITF

SEQ ID NO: 100133 - protein, 264 aa, Arabidopsis thaliana
  peptide (1)..(264): Ceres Seq. ID no. 13604437
  misc_feature (1)..(264): Homolog of NCBI NO: 18394509 NR Description: expressed protein [Arabidopsis thaliana] F1L3.32 [Arabidopsis thaliana] >gi|15450635|gb|AAK96589.1|
  misc_feature (1)..(264): Homolog of NCBI NO: 11762174 NR Description: At1g17620 [Arabidopsis thaliana]
  misc_feature (8)..(264): Homolog of NCBI NO: 15239804 NR Description: expressed protein [Arabidopsis thaliana]
  misc_feature (8)..(264): Homolog of NCBI NO: 21536796 NR Description: unknown [Arabidopsis thaliana]
  misc_feature (7)..(236): Homolog of NCBI NO: 34903552 NR Description: P0001B06.28 [Oryza sativa (japonica
  misc_feature (17)..(264): Homolog of NCBI NO: 34914304 NR Description: B1151A10.19 [Oryza sativa (japonica
  misc_feature (1)..(259): Homolog of NCBI NO: 10178216 NR Description: gb|AAF23842.1~gene_id:MLF18.15~similar to unknown
  misc_feature (1)..(259): Homolog of NCBI NO: 15239459 NR Description: hypothetical protein [Arabidopsis thaliana]
  misc_feature (4)..(237): Homolog of NCBI NO: 18401317 NR Description: expressed protein [Arabidopsis thaliana]
  misc_feature (5)..(253): Homolog of NCBI NO: 6686408 NR Description: F1E22.7 [Arabidopsis thaliana]
MTDDRVYPASKPPAIVGGGAPTTNPTFPANKAQLYNANRPAYRPPAGRRRTSHTRGCCCRCCCWTIFVIILLLLIVAAASAVVYLIYRPQRPSFTVSELKISTLNFTSAVRLTTAISLSVIARNPNKNVGFIYDVTDITLYKASTGGDDDVVIGKGTIAAFSHGKKNTTTLRSTIGSPPDELDEISAGKLKGDLKAKKAVAIKIVLNSKVKVKMGALKTPKSGIRVTCEGIKVVAPTGKKATTATTSAAKCKVDPRFKIWKITF

SEQ ID NO: 100134 - DNA, 1178 bp, Arabidopsis thaliana
  misc_feature (1)..(1178): Ceres Seq. ID no. 13604438
  misc_feature: MA Experiment ID: 108461 Result: Up-regulated in Transcription
  misc_feature: MA Experiment 108461 PARAMETER Experiment Name: At_Germinating_Seeds_cDNA_P Parameter: Age (day) Value: 1 vs. 0
  misc_feature: MA Experiment 108461 PARAMETER Experiment Name: At_Germinating_Seeds_cDNA_P Parameter: Tissue Value: Germinating Seeds
  misc_feature: MA Experiment ID: 108463 Result: Down-regulated in Transcription
  misc_feature: MA Experiment 108463 PARAMETER Experiment Name: At_Germinating_Seeds_cDNA_P Parameter: Age (day) Value: 3 vs. 0
  misc_feature: MA Experiment 108463 PARAMETER Experiment Name: At_Germinating_Seeds_cDNA_P Parameter: Tissue Value: Germinating Seeds
  misc_feature: MA Experiment ID: 108464 Result: Down-regulated in Transcription
  misc_feature: MA Experiment 108464 PARAMETER Experiment Name: At_Germinating_Seeds_cDNA_P Parameter: Age (day) Value: 4 vs. 0
  misc_feature: MA Experiment 108464 PARAMETER Experiment Name: At_Germinating_Seeds_cDNA_P Parameter: Tissue Value: Germinating Seeds
  misc_feature: MA Experiment ID: 108595 Result: Down-regulated in Transcription
  misc_feature: MA Experiment 108595 PARAMETER Experiment Name: At_Ler-pi_Ovule_cDNA_P Parameter: Plant Line Value: null
  misc_feature: MA Experiment ID: 20000069 Result: Down-regulated in Transcription
  misc_feature: MA Experiment 20000069 PARAMETER Experiment Name: At_100uM_ABA_Mutants_cDNA_P Parameter: Plant Line Value: CS23
  misc_feature: MA Experiment 20000069 PARAMETER Experiment Name: At_100uM_ABA_Mutants_cDNA_P Parameter: Timepoint (hr) Value: 6
  misc_feature: MA Experiment 20000069 PARAMETER Experiment Name: At_100uM_ABA_Mutants_cDNA_P Parameter: Tissue Value: Aerial
  misc_feature: MA Experiment 20000069 PARAMETER Experiment Name: At_100uM_ABA_Mutants_cDNA_P Parameter: Treatment Value: 100uM ABA vs. No Treatment
  misc_feature: MA Experiment ID: 20000070 Result: Down-regulated in Transcription
  misc_feature: MA Experiment 20000070 PARAMETER Experiment Name: At_100uM_ABA_Mutants_cDNA_P Parameter: Plant Line Value: CS24
  misc_feature: MA Experiment 20000070 PARAMETER Experiment Name: At_100uM_ABA_Mutants_cDNA_P Parameter: Timepoint (hr) Value: 6
  misc_feature: MA Experiment 20000070 PARAMETER Experiment Name: At_100uM_ABA_Mutants_cDNA_P Parameter: Tissue Value: Aerial
  misc_feature: MA Experiment 20000070 PARAMETER Experiment Name: At_100uM_ABA_Mutants_cDNA_P Parameter: Treatment Value: 100uM ABA vs. No Treatment
  misc_feature: MA Experiment ID: 20000071 Result: Down-regulated in Transcription
  misc_feature: MA Experiment 20000071 PARAMETER Experiment Name: At_100uM_ABA_Mutants_cDNA_P Parameter: Plant Line Value: CS8104
  misc_feature: MA Experiment 20000071 PARAMETER Experiment Name: At_100uM_ABA_Mutants_cDNA_P Parameter: Timepoint (hr) Value: 6
  misc_feature: MA Experiment 20000071 PARAMETER Experiment Name: At_100uM_ABA_Mutants_cDNA_P Parameter: Tissue Value: Aerial
  misc_feature: MA Experiment 20000071 PARAMETER Experiment Name: At_100uM_ABA_Mutants_cDNA_P Parameter: Treatment Value: 100uM ABA vs. No Treatment
  misc_feature: MA Experiment ID: 20000086 Result: Down-regulated in Transcription
  misc_feature: MA Experiment 20000086 PARAMETER Experiment Name: At_100uM_ABA_Mutants_cDNA_P Parameter: Plant Line Value: CS22
  misc_feature: MA Experiment 20000086 PARAMETER Experiment Name: At_100uM_ABA_Mutants_cDNA_P Parameter: Timepoint (hr) Value: 6
  misc_feature: MA Experiment 20000086 PARAMETER Experiment Name: At_100uM_ABA_Mutants_cDNA_P Parameter: Tissue Value: Aerial
  misc_feature: MA Experiment 20000086 PARAMETER Experiment Name: At_100uM_ABA_Mutants_cDNA_P Parameter: Treatment Value: 100uM ABA vs. No Treatment
  misc_feature: MA Experiment ID: 20000117 Result: Down-regulated in Transcription
  misc_feature: MA Experiment 20000117 PARAMETER Experiment Name: At_100uM_ABA_Mutants_cDNA_P Parameter: Plant Line Value: Columbia
  misc_feature: MA Experiment 20000117 PARAMETER Experiment Name: At_100uM_ABA_Mutants_cDNA_P Parameter: Timepoint (hr) Value: 6
  misc_feature: MA Experiment 20000117 PARAMETER Experiment Name: At_100uM_ABA_Mutants_cDNA_P Parameter: Tissue Value: Aerial
  misc_feature: MA Experiment 20000117 PARAMETER Experiment Name: At_100uM_ABA_Mutants_cDNA_P Parameter: Treatment Value: 100uM ABA vs. No Treatment
  misc_feature: MA Experiment ID: 20000180 Result: Up-regulated in Transcription
  misc_feature: MA Experiment 20000180 PARAMETER Experiment Name: At_Germinating_Seeds_P Parameter: Age (hr) Value: 24 vs. 0
  misc_feature: MA Experiment 20000180 PARAMETER Experiment Name: At_Germinating_Seeds_P Parameter: Tissue Value: Germinating Seeds
  misc_feature: MA Experiment ID: 20000185 Result: Down-regulated in Transcription
  misc_feature: MA Experiment 20000185 PARAMETER Experiment Name: At_Roots__P Parameter: Age (day) Value: 7 vs. 21
  misc_feature: MA Experiment 20000185 PARAMETER Experiment Name: At_Roots__P Parameter: Organism Value: A. thaliana
  misc_feature: MA Experiment 20000185 PARAMETER Experiment Name: At_Roots__P Parameter: Tissue Value: Roots vs. Whole Plant
  misc_feature: MA Experiment ID: 20000437 Result: Down-regulated in Transcription
  misc_feature: MA Experiment 20000437 PARAMETER Experiment Name: At_Drought_P Parameter: Age (day) Value: 8
  misc_feature: MA Experiment 20000437 PARAMETER Experiment Name: At_Drought_P Parameter: Organism Value: A. thaliana
  misc_feature: MA Experiment 20000437 PARAMETER Experiment Name: At_Drought_P Parameter: Plant Line Value: WS
  misc_feature: MA Experiment 20000437 PARAMETER Experiment Name: At_Drought_P Parameter: Timepoint (hr) Value: 24
  misc_feature: MA Experiment 20000437 PARAMETER Experiment Name: At_Drought_P Parameter: Tissue Value: Whole Plant
  misc_feature: MA Experiment 20000437 PARAMETER Experiment Name: At_Drought_P Parameter: Treatment Value: Drought vs. No Drought
  misc_feature: MA Experiment ID: 20000439 Result: Down-regulated in Transcription
  misc_feature: MA Experiment 20000439 PARAMETER Experiment Name: At_Roots__P Parameter: Age (day) Value: 14 vs. 21
  misc_feature: MA Experiment 20000439 PARAMETER Experiment Name: At_Roots__P Parameter: Organism Value: A. thaliana
  misc_feature: MA Experiment 20000439 PARAMETER Experiment Name: At_Roots__P Parameter: Tissue Value: Roots vs. Whole Plant
  misc_feature: MA Experiment ID: 20000794 Result: Down-regulated in Transcription
  misc_feature: MA Experiment 20000794 PARAMETER Experiment Name: At_Petals_P Parameter: Age (day) Value: 23-25 days
  misc_feature: MA Experiment 20000794 PARAMETER Experiment Name: At_Petals_P Parameter: Plant Line Value: WS
  misc_feature: MA Experiment 20000794 PARAMETER Experiment Name: At_Petals_P Parameter: Tissue Value: Petals vs. Whole plant
  misc_feature: MA Experiment ID: 20001560 Result: Up-regulated in Transcription
  misc_feature: MA Experiment 20001560 PARAMETER Experiment Name: At_Drought_Soil_Dry_P Parameter: Age (day) Value: 28
  misc_feature: MA Experiment 20001560 PARAMETER Experiment Name: At_Drought_Soil_Dry_P Parameter: Organism Value: A. thaliana
  misc_feature: MA Experiment 20001560 PARAMETER Experiment Name: At_Drought_Soil_Dry_P Parameter: Plant Line Value: WS
  misc_feature: MA Experiment 20001560 PARAMETER Experiment Name: At_Drought_Soil_Dry_P Parameter: Post Timepoint (hr) Value: None
  misc_feature: MA Experiment 20001560 PARAMETER Experiment Name: At_Drought_Soil_Dry_P Parameter: Post-Treatment Value: None
  misc_feature: MA Experiment 20001560 PARAMETER Experiment Name: At_Drought_Soil_Dry_P Parameter: Timepoint (day) Value: 14
  misc_feature: MA Experiment 20001560 PARAMETER Experiment Name: At_Drought_Soil_Dry_P Parameter: Treatment Value: Drought vs. No Drought
  misc_feature: MA Experiment ID: 20001757 Result: Up-regulated in Transcription
  misc_feature: MA Experiment 20001757 PARAMETER Experiment Name: At_50mM_NH4NO3_L-to-H_P Parameter: Timepoint (hr) Value: 6
  misc_feature: MA Experiment 20001757 PARAMETER Experiment Name: At_50mM_NH4NO3_L-to-H_P Parameter: Tissue Value: Leaf
  misc_feature: MA Experiment 20001757 PARAMETER Experiment Name: At_50mM_NH4NO3_L-to-H_P Parameter: Treatment Value: 50mM NH4NO3 vs 100mM Mannitol
  misc_feature: MA Experiment ID: 20001911 Result: Down-regulated in Transcription
  misc_feature: MA Experiment 20001911 PARAMETER Experiment Name: At_Drought_Reproduction_P Parameter: Age (day) Value: 40
  misc_feature: MA Experiment 20001911 PARAMETER Experiment Name: At_Drought_Reproduction_P Parameter: Organism Value: A. thaliana
  misc_feature: MA Experiment 20001911 PARAMETER Experiment Name: At_Drought_Reproduction_P Parameter: Plant Line Value: WS
  misc_feature: MA Experiment 20001911 PARAMETER Experiment Name: At_Drought_Reproduction_P Parameter: Timepoint (day) Value: 10
  misc_feature: MA Experiment 20001911 PARAMETER Experiment Name: At_Drought_Reproduction_P Parameter: Tissue Value: Flowers
  misc_feature: MA Experiment 20001911 PARAMETER Experiment Name: At_Drought_Reproduction_P Parameter: Treatment Value: Drought vs. No Drought
attatcttttgcttcatcttcttcaaaagccatggctttgtgctctatctgtcctcgcatccctcttcgattcaggccaaaacccatttccccttttctctcaaaacctcaaatttgtctcgcttacagggtttactcttccctgcaatctactactccctctaccagagatgaacttggaactgttagcattgggtttctgggtatgggaatcatgggttctccaatggcacagaacctcatcaaagctgggtgtgatgtgactgtatggaatcgaactaagagcaaatgtgatcctctcgttggattaggagcaaagtacaagtcttctcctgaagaagtgactgcaacttgtgatctcacatttgcaatgcttgctgatcctgaaagtgcaattgatgttgcatgtggaaagaatggagccatatttgggattagttcaggaaaagggtatgttgatgtctcaaccgttgatgtggcctcatcaatactaatcagcaagcaaataaaggataccggagccttgttcttggaggcaccagtttcaggttccaaaaagcctgccgaagatgggcagttaatatttctcactgcaggtgacaagccgctatacgaaaaagctgctcctttcttagacatcatgggaaagtcaaaattctatttgggtgaagttggtaatggagcagcaatgaaacttgtcgtcaacatgatcatgggaagtatgatggcatcattcgcggagggaatacttctaagccagaaagttggactcgatccaaatgtacttgtcgaggttgtctcacagggagctatcaatgcgccaatgtactcactaaagggtccttcaatgatcaagtcagtgtacccgacggcttttccattaaagcatcagcagaaggatatgagactcgcacttggactagcggaatccgtatcgcaatctactccgattgcagccgctgcgaacgagctttacaaggttgcaaaatcttatgggttgagcgatgaagatttctctgcagtaattgaagcactaaaagctgcaaaatcccgagaagcttagctaaagatttgttcaatgtgaaaatgtgtttttttttgctgttgtatgaaaaatttcatctttacaacatgtcaattgataattgttaattttatatgagagcaagttaaaagtg

SEQ ID NO: 100135 - protein, 353 aa, Arabidopsis thaliana; identical to SEQ ID NO: 30208
  peptide (1)..(353): Ceres Seq. ID no. 13604439
  misc_feature (61)..(223): Pfam Name: NAD binding domain of 6-phosphogluconate dehydrogenase Pfam Description: NAD binding domain of 6-phosphogluconate
  misc_feature (132)..(353): Homolog of NCBI NO: 8778467 NR Description: F1L3.35 [Arabidopsis thaliana]
  misc_feature (1)..(132): Homolog of NCBI NO: 8778467 NR Description: F1L3.35 [Arabidopsis thaliana]
  misc_feature (11)..(353): Homolog of NCBI NO: 18394513 NR Description: expressed protein [Arabidopsis thaliana] unknown protein [Arabidopsis thaliana] unknown [Arabidopsis thaliana] >gi|30984568|gb|AAP42747.1|
  misc_feature (44)..(347): Homolog of NCBI NO: 34914300 NR Description: putative gamma hydroxybutyrate dehydrogenase
  misc_feature (62)..(349): Homolog of NCBI NO: 15375068 NR Description: gamma hydroxybutyrate dehydrogenase [Arabidopsis
  misc_feature (62)..(348): Homolog of NCBI NO: 29368238 NR Description: gamma hydroxybutyrate dehydrogenase-like protein
  misc_feature (62)..(349): Homolog of NCBI NO: 18404556 NR Description: gamma hydroxybutyrate dehydrogenase [Arabidopsis
  misc_feature (65)..(346): Homolog of NCBI NO: 39996474 NR Description: 3-hydroxyisobutyrate dehydrogenase family protein
  misc_feature (65)..(346): Homolog of NCBI NO: 23054597 NR Description: hypothetical protein [Geobacter metallireducens]
  misc_feature (64)..(344): Homolog of NCBI NO: 13277568 NR Description: Similar to RIKEN cDNA 3930401K13 gene [Homo

SEQ ID NO: 100136 - protein, 343 aa, Arabidopsis thaliana; identical to SEQ ID NO: 30209
  peptide (1)..(343): Ceres Seq. ID no. 13604440
  misc_feature (51)..(213): Pfam Name: NAD binding domain of 6-phosphogluconate dehydrogenase Pfam Description: NAD binding domain of 6-phosphogluconate
  misc_feature (122)..(343): Homolog of NCBI NO: 8778467 NR Description: F1L3.35 [Arabidopsis thaliana]
  misc_feature (1)..(122): Homolog of NCBI NO: 8778467 NR Description: F1L3.35 [Arabidopsis thaliana]
  misc_feature (1)..(343): Homolog of NCBI NO: 18394513 NR Description: expressed protein [Arabidopsis thaliana] unknown protein [Arabidopsis thaliana] unknown [Arabidopsis thaliana] >gi|30984568|gb|AAP42747.1|
  misc_feature (34)..(337): Homolog of NCBI NO: 34914300 NR Description: putative gamma hydroxybutyrate dehydrogenase
  misc_feature (52)..(339): Homolog of NCBI NO: 15375068 NR Description: gamma hydroxybutyrate dehydrogenase [Arabidopsis
  misc_feature (52)..(338): Homolog of NCBI NO: 29368238 NR Description: gamma hydroxybutyrate dehydrogenase-like protein
  misc_feature (52)..(339): Homolog of NCBI NO: 18404556 NR Description: gamma hydroxybutyrate dehydrogenase [Arabidopsis
  misc_feature (55)..(336): Homolog of NCBI NO: 39996474 NR Description: 3-hydroxyisobutyrate dehydrogenase family protein
  misc_feature (55)..(336): Homolog of NCBI NO: 23054597 NR Description: hypothetical protein [Geobacter metallireducens]
  misc_feature (54)..(334): Homolog of NCBI NO: 13277568 NR Description: Similar to RIKEN cDNA 3930401K13 gene [Homo

SEQ ID NO: 100137 - protein, 285 aa, Arabidopsis thaliana; identical to SEQ ID NO: 30210
  peptide (1)..(285): Ceres Seq. ID no. 13604441
  misc_feature (1)..(155): Pfam Name: NAD binding domain of 6-phosphogluconate dehydrogenase Pfam Description: NAD binding domain of 6-phosphogluconate
  misc_feature (64)..(285): Homolog of NCBI NO: 8778467 NR Description: F1L3.35 [Arabidopsis thaliana]
  misc_feature (1)..(64): Homolog of NCBI NO: 8778467 NR Description: F1L3.35 [Arabidopsis thaliana]
  misc_feature (1)..(285): Homolog of NCBI NO: 18394513 NR Description: expressed protein [Arabidopsis thaliana] unknown protein [Arabidopsis thaliana] unknown [Arabidopsis thaliana] >gi|30984568|gb|AAP42747.1|
  misc_feature (1)..(279): Homolog of NCBI NO: 34914300 NR Description: putative gamma hydroxybutyrate dehydrogenase
  misc_feature (1)..(281): Homolog of NCBI NO: 15375068 NR Description: gamma hydroxybutyrate dehydrogenase [Arabidopsis
  misc_feature (1)..(280): Homolog of NCBI NO: 29368238 NR Description: gamma hydroxybutyrate dehydrogenase-like protein
  misc_feature (1)..(281): Homolog of NCBI NO: 18404556 NR Description: gamma hydroxybutyrate dehydrogenase [Arabidopsis
  misc_feature (1)..(278): Homolog of NCBI NO: 39996474 NR Description: 3-hydroxyisobutyrate dehydrogenase family protein
  misc_feature (1)..(278): Homolog of NCBI NO: 23054597 NR Description: hypothetical protein [Geobacter metallireducens]
  misc_feature (1)..(276): Homolog of NCBI NO: 13277568 NR Description: Similar to RIKEN cDNA 3930401K13 gene [Homo

SEQ ID NO: 100138 - DNA, 1467 bp, Arabidopsis thaliana
  misc_feature (1)..(1467): Ceres Seq. ID no. 13604445
  misc_feature: MA Experiment ID: 108434 Result: Down-regulated in Transcription
  misc_feature: MA Experiment 108434 PARAMETER Experiment Name: At_Root_Tips_cDNA_P Parameter: Tissue Value: Root Tips
  misc_feature: MA Experiment ID: 108462 Result: Up-regulated in Transcription
  misc_feature: MA Experiment 108462 PARAMETER Experiment Name: At_Germinating_Seeds_cDNA_P Parameter: Age (day) Value: 2 vs. 0
  misc_feature: MA Experiment 108462 PARAMETER Experiment Name: At_Germinating_Seeds_cDNA_P Parameter: Tissue Value: Germinating Seeds
  misc_feature: MA Experiment ID: 108463 Result: Up-regulated in Transcription
  misc_feature: MA Experiment 108463 PARAMETER Experiment Name: At_Germinating_Seeds_cDNA_P Parameter: Age (day) Value: 3 vs. 0
  misc_feature: MA Experiment 108463 PARAMETER Experiment Name: At_Germinating_Seeds_cDNA_P Parameter: Tissue Value: Germinating Seeds
  misc_feature: MA Experiment ID: 108573 Result: Up-regulated in Transcription
  misc_feature: MA Experiment 108573 PARAMETER Experiment Name: At_Drought_cDNA_P Parameter: Timepoint (hr) Value: 6
  misc_feature: MA Experiment 108573 PARAMETER Experiment Name: At_Drought_cDNA_P Parameter: Tissue Value: Aerial
  misc_feature: MA Experiment 108573 PARAMETER Experiment Name: At_Drought_cDNA_P Parameter: Treatment Value: Drought vs. No Drought
  misc_feature: MA Experiment ID: 108585 Result: Up-regulated in Transcription
  misc_feature: MA Experiment 108585 PARAMETER Experiment Name: At_5mM_NaNP_cDNA_P Parameter: Timepoint (hr) Value: 6
  misc_feature: MA Experiment 108585 PARAMETER Experiment Name: At_5mM_NaNP_cDNA_P Parameter: Tissue Value: Aerial
  misc_feature: MA Experiment 108585 PARAMETER Experiment Name: At_5mM_NaNP_cDNA_P Parameter: Treatment Value: null
  misc_feature: MA Experiment ID: 20000069 Result: Up-regulated in Transcription
  misc_feature: MA Experiment 20000069 PARAMETER Experiment Name: At_100uM_ABA_Mutants_cDNA_P Parameter: Plant Line Value: CS23
  misc_feature: MA Experiment 20000069 PARAMETER Experiment Name: At_100uM_ABA_Mutants_cDNA_P Parameter: Timepoint (hr) Value: 6
  misc_feature: MA Experiment 20000069 PARAMETER Experiment Name: At_100uM_ABA_Mutants_cDNA_P Parameter: Tissue Value: Aerial
  misc_feature: MA Experiment 20000069 PARAMETER Experiment Name: At_100uM_ABA_Mutants_cDNA_P Parameter: Treatment Value: 100uM ABA vs. No Treatment
  misc_feature: MA Experiment ID: 20000070 Result: Up-regulated in Transcription
  misc_feature: MA Experiment 20000070 PARAMETER Experiment Name: At_100uM_ABA_Mutants_cDNA_P Parameter: Plant Line Value: CS24
  misc_feature: MA Experiment 20000070 PARAMETER Experiment Name: At_100uM_ABA_Mutants_cDNA_P Parameter: Timepoint (hr) Value: 6
  misc_feature: MA Experiment 20000070 PARAMETER Experiment Name: At_100uM_ABA_Mutants_cDNA_P Parameter: Tissue Value: Aerial
  misc_feature: MA Experiment 20000070 PARAMETER Experiment Name: At_100uM_ABA_Mutants_cDNA_P Parameter: Treatment Value: 100uM ABA vs. No Treatment
  misc_feature: MA Experiment ID: 20000436 Result: Up-regulated in Transcription
  misc_feature: MA Experiment 20000436 PARAMETER Experiment Name: At_Drought_P Parameter: Age (day) Value: 7
  misc_feature: MA Experiment 20000436 PARAMETER Experiment Name: At_Drought_P Parameter: Organism Value: A. thaliana
  misc_feature: MA Experiment 20000436 PARAMETER Experiment Name: At_Drought_P Parameter: Plant Line Value: WS
  misc_feature: MA Experiment 20000436 PARAMETER Experiment Name: At_Drought_P Parameter: Timepoint (hr) Value: 12
  misc_feature: MA Experiment 20000436 PARAMETER Experiment Name: At_Drought_P Parameter: Tissue Value: Whole Plant
  misc_feature: MA Experiment 20000436 PARAMETER Experiment Name: At_Drought_P Parameter: Treatment Value: Drought vs. No Drought
  misc_feature: MA Experiment ID: 20000437 Result: Up-regulated in Transcription
  misc_feature: MA Experiment 20000437 PARAMETER Experiment Name: At_Drought_P Parameter: Age (day) Value: 8
  misc_feature: MA Experiment 20000437 PARAMETER Experiment Name: At_Drought_P Parameter: Organism Value: A. thaliana
  misc_feature: MA Experiment 20000437 PARAMETER Experiment Name: At_Drought_P Parameter: Plant Line Value: WS
  misc_feature: MA Experiment 20000437 PARAMETER Experiment Name: At_Drought_P Parameter: Timepoint (hr) Value: 24
  misc_feature: MA Experiment 20000437 PARAMETER Experiment Name: At_Drought_P Parameter: Tissue Value: Whole Plant
  misc_feature: MA Experiment 20000437 PARAMETER Experiment Name: At_Drought_P Parameter: Treatment Value: Drought vs. No Drought
  misc_feature: MA Experiment ID: 20001248 Result: Down-regulated in Transcription
  misc_feature: MA Experiment 20001248 PARAMETER Experiment Name: At_Far-red-induction_P Parameter: Age (day) Value: 7
  misc_feature: MA Experiment 20001248 PARAMETER Experiment Name: At_Far-red-induction_P Parameter: Light Value: Far-red vs. White
  misc_feature: MA Experiment 20001248 PARAMETER Experiment Name: At_Far-red-induction_P Parameter: Organism Value: A. thaliana
  misc_feature: MA Experiment 20001248 PARAMETER Experiment Name: At_Far-red-induction_P Parameter: Plant Line Value: Columbia
  misc_feature: MA Experiment 20001248 PARAMETER Experiment Name: At_Far-red-induction_P Parameter: Timepoint (hr) Value: 4
  misc_feature: MA Experiment 20001248 PARAMETER Experiment Name: At_Far-red-induction_P Parameter: Tissue Value: Whole Plant
  misc_feature: MA Experiment ID: 20001458 Result: Up-regulated in Transcription
  misc_feature: MA Experiment 20001458 PARAMETER Experiment Name: At_50mM_NH4NO3_L-to-H_P Parameter: Age (day) Value: Undefined
  misc_feature: MA Experiment 20001458 PARAMETER Experiment Name: At_50mM_NH4NO3_L-to-H_P Parameter: Organism Value: Undefined
  misc_feature: MA Experiment 20001458 PARAMETER Experiment Name: At_50mM_NH4NO3_L-to-H_P Parameter: Plant Line Value: Undefined
  misc_feature: MA Experiment 20001458 PARAMETER Experiment Name: At_50mM_NH4NO3_L-to-H_P Parameter: Timepoint (hr) Value: 2
  misc_feature: MA Experiment 20001458 PARAMETER Experiment Name: At_50mM_NH4NO3_L-to-H_P Parameter: Tissue Value: Siliques
  misc_feature: MA Experiment 20001458 PARAMETER Experiment Name: At_50mM_NH4NO3_L-to-H_P Parameter: Treatment Value: 50mM NH4NO3 vs. 100mM Manitol
  misc_feature: MA Experiment ID: 20001555 Result: Up-regulated in Transcription
  misc_feature: MA Experiment 20001555 PARAMETER Experiment Name: At_Drought_Soil_Dry_P Parameter: Age (day) Value: 24
  misc_feature: MA Experiment 20001555 PARAMETER Experiment Name: At_Drought_Soil_Dry_P Parameter: Organism Value: A. thaliana
  misc_feature: MA Experiment 20001555 PARAMETER Experiment Name: At_Drought_Soil_Dry_P Parameter: Plant Line Value: WS
  misc_feature: MA Experiment 20001555 PARAMETER Experiment Name: At_Drought_Soil_Dry_P Parameter: Post Timepoint (hr) Value: None
  misc_feature: MA Experiment 20001555 PARAMETER Experiment Name: At_Drought_Soil_Dry_P Parameter: Post-Treatment Value: None
  misc_feature: MA Experiment 20001555 PARAMETER Experiment Name: At_Drought_Soil_Dry_P Parameter: Timepoint (day) Value: 10
  misc_feature: MA Experiment 20001555 PARAMETER Experiment Name: At_Drought_Soil_Dry_P Parameter: Treatment Value: Drought vs. No Drought
  misc_feature: MA Experiment ID: 20001556 Result: Up-regulated in Transcription
  misc_feature: MA Experiment 20001556 PARAMETER Experiment Name: At_Drought_Soil_Dry_P Parameter: Age (day) Value: 26
  misc_feature: MA Experiment 20001556 PARAMETER Experiment Name: At_Drought_Soil_Dry_P Parameter: Organism Value: A. thaliana
  misc_feature: MA Experiment 20001556 PARAMETER Experiment Name: At_Drought_Soil_Dry_P Parameter: Plant Line Value: WS
  misc_feature: MA Experiment 20001556 PARAMETER Experiment Name: At_Drought_Soil_Dry_P Parameter: Post Timepoint (hr) Value: None
  misc_feature: MA Experiment 20001556 PARAMETER Experiment Name: At_Drought_Soil_Dry_P Parameter: Post-Treatment Value: None
  misc_feature: MA Experiment 20001556 PARAMETER Experiment Name: At_Drought_Soil_Dry_P Parameter: Timepoint (day) Value: 12
  misc_feature: MA Experiment 20001556 PARAMETER Experiment Name: At_Drought_Soil_Dry_P Parameter: Treatment Value: Drought vs. No Drought
  misc_feature: MA Experiment ID: 20001557 Result: Up-regulated in Transcription
  misc_feature: MA Experiment 20001557 PARAMETER Experiment Name: At_Drought_Soil_Dry_P Parameter: Age (day) Value: 27
  misc_feature: MA Experiment 20001557 PARAMETER Experiment Name: At_Drought_Soil_Dry_P Parameter: Organism Value: A. thaliana
  misc_feature: MA Experiment 20001557 PARAMETER Experiment Name: At_Drought_Soil_Dry_P Parameter: Plant Line Value: WS
  misc_feature: MA Experiment 20001557 PARAMETER Experiment Name: At_Drought_Soil_Dry_P Parameter: Post Timepoint (hr) Value: 3
  misc_feature: MA Experiment 20001557 PARAMETER Experiment Name: At_Drought_Soil_Dry_P Parameter: Post-Treatment Value: Re-Water vs. No Drought
  misc_feature: MA Experiment 20001557 PARAMETER Experiment Name: At_Drought_Soil_Dry_P Parameter: Timepoint (day) Value: 13
  misc_feature: MA Experiment 20001557 PARAMETER Experiment Name: At_Drought_Soil_Dry_P Parameter: Treatment Value: Drought vs. No Drought
  misc_feature: MA Experiment ID: 20001558 Result: Up-regulated in Transcription
  misc_feature: MA Experiment 20001558 PARAMETER Experiment Name: At_Drought_Soil_Dry_P Parameter: Age (day) Value: 27
  misc_feature: MA Experiment 20001558 PARAMETER Experiment Name: At_Drought_Soil_Dry_P Parameter: Organism Value: A. thaliana
  misc_feature: MA Experiment 20001558 PARAMETER Experiment Name: At_Drought_Soil_Dry_P Parameter: Plant Line Value: WS
  misc_feature: MA Experiment 20001558 PARAMETER Experiment Name: At_Drought_Soil_Dry_P Parameter: Post Timepoint (hr) Value: 6
  misc_feature: MA Experiment 20001558 PARAMETER Experiment Name: At_Drought_Soil_Dry_P Parameter: Post-Treatment Value: Re-Water vs. No Drought
  misc_feature: MA Experiment 20001558 PARAMETER Experiment Name: At_Drought_Soil_Dry_P Parameter: Timepoint (day) Value: 13
  misc_feature: MA Experiment 20001558 PARAMETER Experiment Name: At_Drought_Soil_Dry_P Parameter: Treatment Value: Drought vs. No Drought
  misc_feature: MA Experiment ID: 20001560 Result: Up-regulated in Transcription
  misc_feature: MA Experiment 20001560 PARAMETER Experiment Name: At_Drought_Soil_Dry_P Parameter: Age (day) Value: 28
  misc_feature: MA Experiment 20001560 PARAMETER Experiment Name: At_Drought_Soil_Dry_P Parameter: Organism Value: A. thaliana
  misc_feature: MA Experiment 20001560 PARAMETER Experiment Name: At_Drought_Soil_Dry_P Parameter: Plant Line Value: WS
  misc_feature: MA Experiment 20001560 PARAMETER Experiment Name: At_Drought_Soil_Dry_P Parameter: Post Timepoint (hr) Value: None
  misc_feature: MA Experiment 20001560 PARAMETER Experiment Name: At_Drought_Soil_Dry_P Parameter: Post-Treatment Value: None
  misc_feature: MA Experiment 20001560 PARAMETER Experiment Name: At_Drought_Soil_Dry_P Parameter: Timepoint (day) Value: 14
  misc_feature: MA Experiment 20001560 PARAMETER Experiment Name: At_Drought_Soil_Dry_P Parameter: Treatment Value: Drought vs. No Drought
  misc_feature: MA Experiment ID: 20001904 Result: Up-regulated in Transcription
  misc_feature: MA Experiment 20001904 PARAMETER Experiment Name: At_Drought_Reproduction_P Parameter: Age (day) Value: 37
  misc_feature: MA Experiment 20001904 PARAMETER Experiment Name: At_Drought_Reproduction_P Parameter: Organism Value: A. thaliana
  misc_feature: MA Experiment 20001904 PARAMETER Experiment Name: At_Drought_Reproduction_P Parameter: Plant Line Value: WS
  misc_feature: MA Experiment 20001904 PARAMETER Experiment Name: At_Drought_Reproduction_P Parameter: Timepoint (day) Value: 7
  misc_feature: MA Experiment 20001904 PARAMETER Experiment Name: At_Drought_Reproduction_P Parameter: Tissue Value: Rosettes
  misc_feature: MA Experiment 20001904 PARAMETER Experiment Name: At_Drought_Reproduction_P Parameter: Treatment Value: Drought vs. No Drought
  misc_feature: MA Experiment ID: 20001905 Result: Up-regulated in Transcription
  misc_feature: MA Experiment 20001905 PARAMETER Experiment Name: At_Drought_Reproduction_P Parameter: Age (day) Value: 40
  misc_feature: MA Experiment 20001905 PARAMETER Experiment Name: At_Drought_Reproduction_P Parameter: Organism Value: A. thaliana
  misc_feature: MA Experiment 20001905 PARAMETER Experiment Name: At_Drought_Reproduction_P Parameter: Plant Line Value: WS
  misc_feature: MA Experiment 20001905 PARAMETER Experiment Name: At_Drought_Reproduction_P Parameter: Timepoint (day) Value: 10
  misc_feature: MA Experiment 20001905 PARAMETER Experiment Name: At_Drought_Reproduction_P Parameter: Tissue Value: Rosettes
  misc_feature: MA Experiment 20001905 PARAMETER Experiment Name: At_Drought_Reproduction_P Parameter: Treatment Value: Drought vs. No Drought
  misc_feature: MA Experiment ID: 20001910 Result: Up-regulated in Transcription
  misc_feature: MA Experiment 20001910 PARAMETER Experiment Name: At_Drought_Reproduction_P Parameter: Age (day) Value: 37
  misc_feature: MA Experiment 20001910 PARAMETER Experiment Name: At_Drought_Reproduction_P Parameter: Organism Value: A. thaliana
  misc_feature: MA Experiment 20001910 PARAMETER Experiment Name: At_Drought_Reproduction_P Parameter: Plant Line Value: WS
  misc_feature: MA Experiment 20001910 PARAMETER Experiment Name: At_Drought_Reproduction_P Parameter: Timepoint (day) Value: 7
  misc_feature: MA Experiment 20001910 PARAMETER Experiment Name: At_Drought_Reproduction_P Parameter: Tissue Value: Flowers
  misc_feature: MA Experiment 20001910 PARAMETER Experiment Name: At_Drought_Reproduction_P Parameter: Treatment Value: Drought vs. No Drought
  misc_feature: MA Experiment ID: 20001911 Result: Up-regulated in Transcription
  misc_feature: MA Experiment 20001911 PARAMETER Experiment Name: At_Drought_Reproduction_P Parameter: Age (day) Value: 40
  misc_feature: MA Experiment 20001911 PARAMETER Experiment Name: At_Drought_Reproduction_P Parameter: Organism Value: A. thaliana
  misc_feature: MA Experiment 20001911 PARAMETER Experiment Name: At_Drought_Reproduction_P Parameter: Plant Line Value: WS
  misc_feature: MA Experiment 20001911 PARAMETER Experiment Name: At_Drought_Reproduction_P Parameter: Timepoint (day) Value: 10
  misc_feature: MA Experiment 20001911 PARAMETER Experiment Name: At_Drought_Reproduction_P Parameter: Tissue Value: Flowers
  misc_feature: MA Experiment 20001911 PARAMETER Experiment Name: At_Drought_Reproduction_P Parameter: Treatment Value: Drought vs. No Drought
acgataagtgaaaaaagagagaaagagccagaggagagagagaagcttttggtcgtgttcgtttttctttctttctttcttgcaataataaatagaagcaaatcatactccaaaaaccttcattcaaaccttgctaccactttcttcccctaaaagatttcatctaaattcagtaaactcatctacgagttcttgtttttctttaaattttctaagagagagcctaagctgtttaatatagtcatctaatatttagagagatggtgggagagagaatgtggtggtggtcatcatcgtcgacgaaactccgatcaaaccttgaaagatttctcagaggaatcactccaaaacctccttctttctctttatcacagagctgcaagaatgatttgaacagtttgtggatccatgagaacaaagatgagattgaatatttcaggcttagtgatctttgggactgttttgatgagccaagcgcgtatggacttggatcaaaggtcgacttaaacaatggtgaatccgttatgcagtactatgtcccgtatctatccgccattcaaatctatactaacaaatctacagccatttctaggattcatagtgatgtggttgattgtgagagtgaatgttggagtgatgatagtgagattgagaagttgtctaggtcaatgagcagtggttctagcaaaatatgggattctgtttctgatgattcgggttatgagatcgatggtacttcttcattgatgcgagataagctcggttctattgattttcagtactttgagtccgttaaaccgcacttgcgtgttcctcttaccgctaaggtaaatgaattggctgagaagtatccgggactttcgactctaaggagtgttgatttgtctccagcaagttggttggccattgcttggtatccaatttaccacattccctctcggaagaccgataaagatttatcgacatgtttcttgagttatcatactttatcttcggctttccaaggtaacttgatagagggagacgatgagattaacgaaaccatgaaagaagaaacattgtgttttgatgaaggaccggtgaccaagagtatacctttggctccttttggtttagttagttacaaattgcaaggagatttgtggaggaatcaagaatgtggtgaccaaggacgtatagtttatcttcgcagtgcagctgattcgtggctgaaacagcttaatgttcaagatcaccatgaccatagcttcttctccatgaacatgagcttgtagatccaaaaaaagagagccaagactctgtttttttgctctgtttttagttgttttcttagccaagactctgtttttttgctctgtttttagttgttttaagaatcttaggtatatagcaactcgaaatgtagaggtttcgtttccttctgcttgaacccgtggaaaataaagagaattaggcttgtttttggct

SEQ ID NO: 100139 - protein, 337 aa, Arabidopsis thaliana
  peptide (1)..(337): Ceres Seq. ID no. 13604446
  misc_feature (18)..(331): Pfam Name: Protein of unknown function (DUF789) Pfam Description: Protein of unknown function (DUF789)
  misc_feature (1)..(337): Homolog of NCBI NO: 18394539 NR Description: expressed protein [Arabidopsis thaliana]
  misc_feature (1)..(337): Homolog of NCBI NO: 21593308 NR Description: unknown [Arabidopsis thaliana]
  misc_feature (6)..(336): Homolog of NCBI NO: 15219407 NR Description: expressed protein [Arabidopsis thaliana]
  misc_feature (6)..(336): Homolog of NCBI NO: 27754726 NR Description: unknown protein [Arabidopsis thaliana]
  misc_feature (13)..(337): Homolog of NCBI NO: 9280648 NR Description: F21B7.22 [Arabidopsis thaliana]
  misc_feature (18)..(332): Homolog of NCBI NO: 22328289 NR Description: expressed protein [Arabidopsis thaliana] AT4g03420/F9H3_4 [Arabidopsis thaliana]
  misc_feature (18)..(332): Homolog of NCBI NO: 25373431 NR Description: hypothetical protein AT4g03420 [imported] - thaliana >gi|4206196|gb|AAD11584.1|AAD11584 hypothetical protein thaliana] >gi|7270212|emb|CAB77827.1| hypothetical protein
  misc_feature (13)..(337): Homolog of NCBI NO: 18379117 NR Description: expressed protein [Arabidopsis thaliana]
  misc_feature (13)..(337): Homolog of NCBI NO: 18958013 NR Description: At1g03610/F21B7_13 [Arabidopsis thaliana]
  misc_feature (13)..(331): Homolog of NCBI NO: 37535654 NR Description: unknown protein [Oryza sativa (japonica
MVGERMWWWSSSSTKLRSNLERFLRGITPKPPSFSLSQSCKNDLNSLWIHENKDEIEYFRLSDLWDCFDEPSAYGLGSKVDLNNGESVMQYYVPYLSAIQIYTNKSTAISRIHSDVVDCESECWSDDSEIEKLSRSMSSGSSKIWDSVSDDSGYEIDGTSSLMRDKLGSIDFQYFESVKPHLRVPLTAKVNELAEKYPGLSTLRSVDLSPASWLAIAWYPIYHIPSRKTDKDLSTCFLSYHTLSSAFQGNLIEGDDEINETMKEETLCFDEGPVTKSIPLAPFGLVSYKLQGDLWRNQECGDQGRIVYLRSAADSWLKQLNVQDHHDHSFFSMNMSL

SEQ ID NO: 100140 - protein, 332 aa, Arabidopsis thaliana
  peptide (1)..(332): Ceres Seq. ID no. 13604447
  misc_feature (13)..(326): Pfam Name: Protein of unknown function (DUF789) Pfam Description: Protein of unknown function (DUF789)
  misc_feature (1)..(332): Homolog of NCBI NO: 18394539 NR Description: expressed protein [Arabidopsis thaliana]
  misc_feature (1)..(332): Homolog of NCBI NO: 21593308 NR Description: unknown [Arabidopsis thaliana]
  misc_feature (1)..(331): Homolog of NCBI NO: 15219407 NR Description: expressed protein [Arabidopsis thaliana]
  misc_feature (1)..(331): Homolog of NCBI NO: 27754726 NR Description: unknown protein [Arabidopsis thaliana]
  misc_feature (8)..(332): Homolog of NCBI NO: 9280648 NR Description: F21B7.22 [Arabidopsis thaliana]
  misc_feature (13)..(327): Homolog of NCBI NO: 22328289 NR Description: expressed protein [Arabidopsis thaliana] AT4g03420/F9H3_4 [Arabidopsis thaliana]
  misc_feature (13)..(327): Homolog of NCBI NO: 25373431 NR Description: hypothetical protein AT4g03420 [imported] - thaliana >gi|4206196|gb|AAD11584.1|AAD11584 hypothetical protein thaliana] >gi|7270212|emb|CAB77827.1| hypothetical protein
  misc_feature (8)..(332): Homolog of NCBI NO: 18379117 NR Description: expressed protein [Arabidopsis thaliana]
  misc_feature (8)..(332): Homolog of NCBI NO: 18958013 NR Description: At1g03610/F21B7_13 [Arabidopsis thaliana]
  misc_feature (8)..(326): Homolog of NCBI NO: 37535654 NR Description: unknown protein [Oryza sativa (japonica
MWWWSSSSTKLRSNLERFLRGITPKPPSFSLSQSCKNDLNSLWIHENKDEIEYFRLSDLWDCFDEPSAYGLGSKVDLNNGESVMQYYVPYLSAIQIYTNKSTAISRIHSDVVDCESECWSDDSEIEKLSRSMSSGSSKIWDSVSDDSGYEIDGTSSLMRDKLGSIDFQYFESVKPHLRVPLTAKVNELAEKYPGLSTLRSVDLSPASWLAIAWYPIYHIPSRKTDKDLSTCFLSYHTLSSAFQGNLIEGDDEINETMKEETLCFDEGPVTKSIPLAPFGLVSYKLQGDLWRNQECGDQGRIVYLRSAADSWLKQLNVQDHHDHSFFSMNMSL

SEQ ID NO: 100141 - protein, 249 aa, Arabidopsis thaliana
  peptide (1)..(249): Ceres Seq. ID no. 13604448
  misc_feature (1)..(243): Pfam Name: Protein of unknown function (DUF789) Pfam Description: Protein of unknown function (DUF789)
  misc_feature (1)..(249): Homolog of NCBI NO: 18394539 NR Description: expressed protein [Arabidopsis thaliana]
  misc_feature (1)..(249): Homolog of NCBI NO: 21593308 NR Description: unknown [Arabidopsis thaliana]
  misc_feature (1)..(248): Homolog of NCBI NO: 15219407 NR Description: expressed protein [Arabidopsis thaliana]
  misc_feature (1)..(248): Homolog of NCBI NO: 27754726 NR Description: unknown protein [Arabidopsis thaliana]
  misc_feature (1)..(249): Homolog of NCBI NO: 9280648 NR Description: F21B7.22 [Arabidopsis thaliana]
  misc_feature (1)..(244): Homolog of NCBI NO: 22328289 NR Description: expressed protein [Arabidopsis thaliana] AT4g03420/F9H3_4 [Arabidopsis thaliana]
  misc_feature (1)..(244): Homolog of NCBI NO: 25373431 NR Description: hypothetical protein AT4g03420 [imported] - thaliana >gi|4206196|gb|AAD11584.1|AAD11584 hypothetical protein thaliana] >gi|7270212|emb|CAB77827.1| hypothetical protein
  misc_feature (1)..(249): Homolog of NCBI NO: 18379117 NR Description: expressed protein [Arabidopsis thaliana]
  misc_feature (1)..(249): Homolog of NCBI NO: 18958013 NR Description: At1g03610/F21B7_13 [Arabidopsis thaliana]
  misc_feature (1)..(243): Homolog of NCBI NO: 37535654 NR Description: unknown protein [Oryza sativa (japonica
MQYYVPYLSAIQIYTNKSTAISRIHSDVVDCESECWSDDSEIEKLSRSMSSGSSKIWDSVSDDSGYEIDGTSSLMRDKLGSIDFQYFESVKPHLRVPLTAKVNELAEKYPGLSTLRSVDLSPASWLAIAWYPIYHIPSRKTDKDLSTCFLSYHTLSSAFQGNLIEGDDEINETMKEETLCFDEGPVTKSIPLAPFGLVSYKLQGDLWRNQECGDQGRIVYLRSAADSWLKQLNVQDHHDHSFFSMNMSL

SEQ ID NO: 100142 - DNA, 621 bp, Arabidopsis thaliana
  misc_feature (1)..(621): Ceres Seq. ID no. 13604449
  misc_feature: MA Experiment ID: 108434 Result: Up-regulated in Transcription
  misc_feature: MA Experiment 108434 PARAMETER Experiment Name: At_Root_Tips_cDNA_P Parameter: Tissue Value: Root Tips
  misc_feature: MA Experiment ID: 108462 Result: Down-regulated in Transcription
  misc_feature: MA Experiment 108462 PARAMETER Experiment Name: At_Germinating_Seeds_cDNA_P Parameter: Age (day) Value: 2 vs. 0
  misc_feature: MA Experiment 108462 PARAMETER Experiment Name: At_Germinating_Seeds_cDNA_P Parameter: Tissue Value: Germinating Seeds
  misc_feature: MA Experiment ID: 108463 Result: Down-regulated in Transcription
  misc_feature: MA Experiment 108463 PARAMETER Experiment Name: At_Germinating_Seeds_cDNA_P Parameter: Age (day) Value: 3 vs. 0
  misc_feature: MA Experiment 108463 PARAMETER Experiment Name: At_Germinating_Seeds_cDNA_P Parameter: Tissue Value: Germinating Seeds
  misc_feature: MA Experiment ID: 108464 Result: Down-regulated in Transcription
  misc_feature: MA Experiment 108464 PARAMETER Experiment Name: At_Germinating_Seeds_cDNA_P Parameter: Age (day) Value: 4 vs. 0
  misc_feature: MA Experiment 108464 PARAMETER Experiment Name: At_Germinating_Seeds_cDNA_P Parameter: Tissue Value: Germinating Seeds
  misc_feature: MA Experiment ID: 108573 Result: Down-regulated in Transcription
  misc_feature: MA Experiment 108573 PARAMETER Experiment Name: At_Drought_cDNA_P Parameter: Timepoint (hr) Value: 6
  misc_feature: MA Experiment 108573 PARAMETER Experiment Name: At_Drought_cDNA_P Parameter: Tissue Value: Aerial
  misc_feature: MA Experiment 108573 PARAMETER Experiment Name: At_Drought_cDNA_P Parameter: Treatment Value: Drought vs. No Drought
  misc_feature: MA Experiment ID: 20000227 Result: Up-regulated in Transcription
  misc_feature: MA Experiment 20000227 PARAMETER Experiment Name: At_Root-Tips-vs-Tops_P Parameter: Tissue Value: Root Tips vs. Root Tops
  misc_feature: MA Experiment ID: 20000234 Result: Up-regulated in Transcription
  misc_feature: MA Experiment 20000234 PARAMETER Experiment Name: At_Siliques_P Parameter: Age (day) Value: 21
  misc_feature: MA Experiment 20000234 PARAMETER Experiment Name: At_Siliques_P Parameter: Organism Value: A. thaliana
  misc_feature: MA Experiment 20000234 PARAMETER Experiment Name: At_Siliques_P Parameter: Plant Line Value: WS
  misc_feature: MA Experiment 20000234 PARAMETER Experiment Name: At_Siliques_P Parameter: Tissue Value: Less Than 5mm Siliques vs. Whole Plant
  misc_feature: MA Experiment ID: 20000264 Result: Up-regulated in Transcription
  misc_feature: MA Experiment 20000264 PARAMETER Experiment Name: At_Open_Flower_P Parameter: Age (day) Value: 21
  misc_feature: MA Experiment 20000264 PARAMETER Experiment Name: At_Open_Flower_P Parameter: Plant Line Value: WS
  misc_feature: MA Experiment 20000264 PARAMETER Experiment Name: At_Open_Flower_P Parameter: Tissue Value: Open Flower vs. Whole Plant
  misc_feature: MA Experiment ID: 20001451 Result: Up-regulated in Transcription
  misc_feature: MA Experiment 20001451 PARAMETER Experiment Name: At_Far-red-induction_P Parameter: Age (day) Value: 7
  misc_feature: MA Experiment 20001451 PARAMETER Experiment Name: At_Far-red-induction_P Parameter: Light Value: Far-red vs. White
  misc_feature: MA Experiment 20001451 PARAMETER Experiment Name: At_Far-red-induction_P Parameter: Organism Value: A. thaliana
  misc_feature: MA Experiment 20001451 PARAMETER Experiment Name: At_Far-red-induction_P Parameter: Plant Line Value: Columbia
  misc_feature: MA Experiment 20001451 PARAMETER Experiment Name: At_Far-red-induction_P Parameter: Timepoint (hr) Value: 24
  misc_feature: MA Experiment 20001451 PARAMETER Experiment Name: At_Far-red-induction_P Parameter: Tissue Value: Whole Plant
  misc_feature: MA Experiment ID: 20001558 Result: Up-regulated in Transcription
  misc_feature: MA Experiment 20001558 PARAMETER Experiment Name: At_Drought_Soil_Dry_P Parameter: Age (day) Value: 27
  misc_feature: MA Experiment 20001558 PARAMETER Experiment Name: At_Drought_Soil_Dry_P Parameter: Organism Value: A. thaliana
  misc_feature: MA Experiment 20001558 PARAMETER Experiment Name: At_Drought_Soil_Dry_P Parameter: Plant Line Value: WS
  misc_feature: MA Experiment 20001558 PARAMETER Experiment Name: At_Drought_Soil_Dry_P Parameter: Post Timepoint (hr) Value: 6
  misc_feature: MA Experiment 20001558 PARAMETER Experiment Name: At_Drought_Soil_Dry_P Parameter: Post-Treatment Value: Re-Water vs. No Drought
  misc_feature: MA Experiment 20001558 PARAMETER Experiment Name: At_Drought_Soil_Dry_P Parameter: Timepoint (day) Value: 13
  misc_feature: MA Experiment 20001558 PARAMETER Experiment Name: At_Drought_Soil_Dry_P Parameter: Treatment Value: Drought vs. No Drought
  misc_feature: MA Experiment ID: 20001560 Result: Up-regulated in Transcription
  misc_feature: MA Experiment 20001560 PARAMETER Experiment Name: At_Drought_Soil_Dry_P Parameter: Age (day) Value: 28
  misc_feature: MA Experiment 20001560 PARAMETER Experiment Name: At_Drought_Soil_Dry_P Parameter: Organism Value: A. thaliana
  misc_feature: MA Experiment 20001560 PARAMETER Experiment Name: At_Drought_Soil_Dry_P Parameter: Plant Line Value: WS
  misc_feature: MA Experiment 20001560 PARAMETER Experiment Name: At_Drought_Soil_Dry_P Parameter: Post Timepoint (hr) Value: None
  misc_feature: MA Experiment 20001560 PARAMETER Experiment Name: At_Drought_Soil_Dry_P Parameter: Post-Treatment Value: None
  misc_feature: MA Experiment 20001560 PARAMETER Experiment Name: At_Drought_Soil_Dry_P Parameter: Timepoint (day) Value: 14
  misc_feature: MA Experiment 20001560 PARAMETER Experiment Name: At_Drought_Soil_Dry_P Parameter: Treatment Value: Drought vs. No Drought
  misc_feature: MA Experiment ID: 20001757 Result: Up-regulated in Transcription
  misc_feature: MA Experiment 20001757 PARAMETER Experiment Name: At_50mM_NH4NO3_L-to-H_P Parameter: Timepoint (hr) Value: 6
  misc_feature: MA Experiment 20001757 PARAMETER Experiment Name: At_50mM_NH4NO3_L-to-H_P Parameter: Tissue Value: Leaf
  misc_feature: MA Experiment 20001757 PARAMETER Experiment Name: At_50mM_NH4NO3_L-to-H_P Parameter: Treatment Value: 50mM NH4NO3 vs 100mM Mannitol
ttcttatctcctcacactcttcgaacaaggaagaaccctaatctcaagatgaatagggagaagttgatgaagatggctaataccgtccgcactggcggaaagggtactgtcagaagaaagaagaaggctgtgcacaagaccaatacaactgatgacaagaggcttcaaagcactcttaagagaattggagttaactccattcccgctattgaagaagttaacatctttaaggatgatgttgttattcagttcatcaaccctaaggttcaagcttcaattgctgcaaacacatgggttgttagcggttctcctcagaccaaaaaattgcaagatatccttcctcagatcatcagccaacttggaccagacaacatggacaacctgaagaagctagcagaacagttccagaaacaggcttctggtgaaggtaatgccgcctcagcaaccatacaagaagaggatgatgacgatgtcccagagcttgttggagagacattcgaaactgctgctgaagagaaagcaccagctgctgctgcttcttcttagagagaaaagagcgagaccacatccaaaaaaaaaccgcactttgatttttacatatctttataatatgtttgttcg

SEQ ID NO: 100143 - protein, 181 aa, Arabidopsis thaliana
  peptide (1)..(181): Ceres Seq. ID no. 13604450
  misc_feature (50)..(108): Pfam Name: NAC domain Pfam Description: NAC domain
  misc_feature (17)..(181): Homolog of NCBI NO: 15220876 NR Description: transcription factor -related [Arabidopsis
  misc_feature (17)..(181): Homolog of NCBI NO: 16323127 NR Description: At1g17880/F2H15_10 [Arabidopsis thaliana]
  misc_feature (17)..(180): Homolog of NCBI NO: 15219413 NR Description: transcription factor BTF3 (RNA polymerase B
  misc_feature (17)..(180): Homolog of NCBI NO: 21537065 NR Description: putative transcription factor BTF3 (RNA
  misc_feature (17)..(178): Homolog of NCBI NO: 33945882 NR Description: transcription factor homolog BTF3-like protein
  misc_feature (17)..(173): Homolog of NCBI NO: 37535464 NR Description: putative transcription factor [Oryza sativa
  misc_feature (17)..(181): Homolog of NCBI NO: 24431603 NR Description: Putative transcription factor [Oryza sativa
  misc_feature (17)..(181): Homolog of NCBI NO: 29367567 NR Description: putative transcription factor BTF3 [Oryza sativa
  misc_feature (17)..(172): Homolog of NCBI NO: 27573340 NR Description: putative transcription factor [Oryza sativa
  misc_feature (25)..(178): Homolog of NCBI NO: 25956272 NR Description: unnamed protein product [Lotus japonicus]
FLSPHTLRTRKNPNLKMNREKLMKMANTVRTGGKGTVRRKKKAVHKTNTTDDKRLQSTLKRIGVNSIPAIEEVNIFKDDVVIQFINPKVQASIAANTWVVSGSPQTKKLQDILPQIISQLGPDNMDNLKKLAEQFQKQASGEGNAASATIQEEDDDDVPELVGETFETAAEEKAPAAAASS

SEQ ID NO: 100144 - protein, 165 aa, Arabidopsis thaliana; identical to SEQ ID NO: 25920
  peptide (1)..(165): Ceres Seq. ID no. 13604451
  misc_feature (34)..(92): Pfam Name: NAC domain Pfam Description: NAC domain
  misc_feature (1)..(165): Homolog of NCBI NO: 15220876 NR Description: transcription factor -related [Arabidopsis
  misc_feature (1)..(165): Homolog of NCBI NO: 16323127 NR Description: At1g17880/F2H15_10 [Arabidopsis thaliana]
  misc_feature (1)..(164): Homolog of NCBI NO: 15219413 NR Description: transcription factor BTF3 (RNA polymerase B
  misc_feature (1)..(164): Homolog of NCBI NO: 21537065 NR Description: putative transcription factor BTF3 (RNA
  misc_feature (1)..(162): Homolog of NCBI NO: 33945882 NR Description: transcription factor homolog BTF3-like protein
  misc_feature (1)..(157): Homolog of NCBI NO: 37535464 NR Description: putative transcription factor [Oryza sativa
  misc_feature (1)..(165): Homolog of NCBI NO: 24431603 NR Description: Putative transcription factor [Oryza sativa
  misc_feature (1)..(165): Homolog of NCBI NO: 29367567 NR Description: putative transcription factor BTF3 [Oryza sativa
  misc_feature (1)..(156): Homolog of NCBI NO: 27573340 NR Description: putative transcription factor [Oryza sativa
  misc_feature (9)..(162): Homolog of NCBI NO: 25956272 NR Description: unnamed protein product [Lotus japonicus]

SEQ ID NO: 100145 - protein, 159 aa, Arabidopsis thaliana; identical to SEQ ID NO: 25921
  peptide (1)..(159): Ceres Seq. ID no. 13604452
  misc_feature (28)..(86): Pfam Name: NAC domain Pfam Description: NAC domain
  misc_feature (1)..(159): Homolog of NCBI NO: 15220876 NR Description: transcription factor -related [Arabidopsis
  misc_feature (1)..(159): Homolog of NCBI NO: 16323127 NR Description: At1g17880/F2H15_10 [Arabidopsis thaliana]
  misc_feature (1)..(158): Homolog of NCBI NO: 15219413 NR Description: transcription factor BTF3 (RNA polymerase B
  misc_feature (1)..(158): Homolog of NCBI NO: 21537065 NR Description: putative transcription factor BTF3 (RNA
  misc_feature (1)..(156): Homolog of NCBI NO: 33945882 NR Description: transcription factor homolog BTF3-like protein
  misc_feature (1)..(151): Homolog of NCBI NO: 37535464 NR Description: putative transcription factor [Oryza sativa
  misc_feature (1)..(159): Homolog of NCBI NO: 24431603 NR Description: Putative transcription factor [Oryza sativa
  misc_feature (1)..(159): Homolog of NCBI NO: 29367567 NR Description: putative transcription factor BTF3 [Oryza sativa
  misc_feature (1)..(150): Homolog of NCBI NO: 27573340 NR Description: putative transcription factor [Oryza sativa
  misc_feature (3)..(156): Homolog of NCBI NO: 25956272 NR Description: unnamed protein product [Lotus japonicus]

SEQ ID NO: 100146 - DNA, 1494 bp, Arabidopsis thaliana
  misc_feature (1)..(1494): Ceres Seq. ID no. 13604457
  misc_feature: MA Experiment ID: 108433 Result: Up-regulated in Transcription
  misc_feature: MA Experiment 108433 PARAMETER Experiment Name: At_rhl_Mutant2_cDNA_P Parameter: Age (day) Value: 7
  misc_feature: MA Experiment 108433 PARAMETER Experiment Name: At_rhl_Mutant2_cDNA_P Parameter: Organism Value: A. thaliana
  misc_feature: MA Experiment 108433 PARAMETER Experiment Name: At_rhl_Mutant2_cDNA_P Parameter: Plant Line Value: rhl Mutant vs. wt landsburg
  misc_feature: MA Experiment 108433 PARAMETER Experiment Name: At_rhl_Mutant2_cDNA_P Parameter: Tissue Value: Roots
  misc_feature: MA Experiment ID: 108434 Result: Down-regulated in Transcription
  misc_feature: MA Experiment 108434 PARAMETER Experiment Name: At_Root_Tips_cDNA_P Parameter: Tissue Value: Root Tips
  misc_feature: MA Experiment ID: 108461 Result: Up-regulated in Transcription
  misc_feature: MA Experiment 108461 PARAMETER Experiment Name: At_Germinating_Seeds_cDNA_P Parameter: Age (day) Value: 1 vs. 0
  misc_feature: MA Experiment 108461 PARAMETER Experiment Name: At_Germinating_Seeds_cDNA_P Parameter: Tissue Value: Germinating Seeds
  misc_feature: MA Experiment ID: 108462 Result: Up-regulated in Transcription
  misc_feature: MA Experiment 108462 PARAMETER Experiment Name: At_Germinating_Seeds_cDNA_P Parameter: Age (day) Value: 2 vs. 0
  misc_feature: MA Experiment 108462 PARAMETER Experiment Name: At_Germinating_Seeds_cDNA_P Parameter: Tissue Value: Germinating Seeds
  misc_feature: MA Experiment ID: 108463 Result: Up-regulated in Transcription
  misc_feature: MA Experiment 108463 PARAMETER Experiment Name: At_Germinating_Seeds_cDNA_P Parameter: Age (day) Value: 3 vs. 0
  misc_feature: MA Experiment 108463 PARAMETER Experiment Name: At_Germinating_Seeds_cDNA_P Parameter: Tissue Value: Germinating Seeds
  misc_feature: MA Experiment ID: 108464 Result: Up-regulated in Transcription
  misc_feature: MA Experiment 108464 PARAMETER Experiment Name: At_Germinating_Seeds_cDNA_P Parameter: Age (day) Value: 4 vs. 0
  misc_feature: MA Experiment 108464 PARAMETER Experiment Name: At_Germinating_Seeds_cDNA_P Parameter: Tissue Value: Germinating Seeds
  misc_feature: MA Experiment ID: 108501 Result: Down-regulated in Transcription
  misc_feature: MA Experiment 108501 PARAMETER Experiment Name: At_ap2_floral_buds_cDNA_P Parameter: Plant Line Value: ap2 (Ler.)
  misc_feature: MA Experiment 108501 PARAMETER Experiment Name: At_ap2_floral_buds_cDNA_P Parameter: Tissue Value: Closed Flower
  misc_feature: MA Experiment ID: 108572 Result: Up-regulated in Transcription
  misc_feature: MA Experiment 108572 PARAMETER Experiment Name: At_Drought_cDNA_P Parameter: Timepoint (hr) Value: 1
  misc_feature: MA Experiment 108572 PARAMETER Experiment Name: At_Drought_cDNA_P Parameter: Tissue Value: Aerial
  misc_feature: MA Experiment 108572 PARAMETER Experiment Name: At_Drought_cDNA_P Parameter: Treatment Value: Drought vs. No Drought
  misc_feature: MA Experiment ID: 108576 Result: Down-regulated in Transcription
  misc_feature: MA Experiment 108576 PARAMETER Experiment Name: At_42deg_Heat_cDNA_P Parameter: Temperature (deg C) Value: 42 vs. 22
  misc_feature: MA Experiment 108576 PARAMETER Experiment Name: At_42deg_Heat_cDNA_P Parameter: Timepoint (hr) Value: 1
  misc_feature: MA Experiment 108576 PARAMETER Experiment Name: At_42deg_Heat_cDNA_P Parameter: Tissue Value: Aerial
  misc_feature: MA Experiment ID: 108577 Result: Down-regulated in Transcription
  misc_feature: MA Experiment 108577 PARAMETER Experiment Name: At_42deg_Heat_cDNA_P Parameter: Temperature (deg C) Value: 42 vs. 22
  misc_feature: MA Experiment 108577 PARAMETER Experiment Name: At_42deg_Heat_cDNA_P Parameter: Timepoint (hr) Value: 6
  misc_feature: MA Experiment 108577 PARAMETER Experiment Name: At_42deg_Heat_cDNA_P Parameter: Tissue Value: Aerial
  misc_feature: MA Experiment ID: 108579 Result: Down-regulated in Transcription
  misc_feature: MA Experiment 108579 PARAMETER Experiment Name: At_4deg_Cold_cDNA_P Parameter: Temperature (deg C) Value: 4 vs. 22
  misc_feature: MA Experiment 108579 PARAMETER Experiment Name: At_4deg_Cold_cDNA_P Parameter: Timepoint (hr) Value: 6
  misc_feature: MA Experiment 108579 PARAMETER Experiment Name: At_4deg_Cold_cDNA_P Parameter: Tissue Value: Aerial
  misc_feature: MA Experiment ID: 108585 Result: Up-regulated in Transcription
  misc_feature: MA Experiment 108585 PARAMETER Experiment Name: At_5mM_NaNP_cDNA_P Parameter: Timepoint (hr) Value: 6
  misc_feature: MA Experiment 108585 PARAMETER Experiment Name: At_5mM_NaNP_cDNA_P Parameter: Tissue Value: Aerial
  misc_feature: MA Experiment 108585 PARAMETER Experiment Name: At_5mM_NaNP_cDNA_P Parameter: Treatment Value: null
  misc_feature: MA Experiment ID: 108594 Result: Up-regulated in Transcription
  misc_feature: MA Experiment 108594 PARAMETER Experiment Name: At_Ler-rhl_Root_cDNA_P Parameter: Plant Line Value: null
  misc_feature: MA Experiment ID: 108595 Result: Down-regulated in Transcription
  misc_feature: MA Experiment 108595 PARAMETER Experiment Name: At_Ler-pi_Ovule_cDNA_P Parameter: Plant Line Value: null
  misc_feature: MA Experiment ID: 20000070 Result: Up-regulated in Transcription
  misc_feature: MA Experiment 20000070 PARAMETER Experiment Name: At_100uM_ABA_Mutants_cDNA_P Parameter: Plant Line Value: CS24
  misc_feature: MA Experiment 20000070 PARAMETER Experiment Name: At_100uM_ABA_Mutants_cDNA_P Parameter: Timepoint (hr) Value: 6
  misc_feature: MA Experiment 20000070 PARAMETER Experiment Name: At_100uM_ABA_Mutants_cDNA_P Parameter: Tissue Value: Aerial
  misc_feature: MA Experiment 20000070 PARAMETER Experiment Name: At_100uM_ABA_Mutants_cDNA_P Parameter: Treatment Value: 100uM ABA vs. No Treatment
  misc_feature: MA Experiment ID: 20000111 Result: Down-regulated in Transcription
  misc_feature: MA Experiment 20000111 PARAMETER Experiment Name: At_42deg_Heat_cDNA_P Parameter: Temperature (deg C) Value: 42 vs. 22
  misc_feature: MA Experiment 20000111 PARAMETER Experiment Name: At_42deg_Heat_cDNA_P Parameter: Timepoint (hr) Value: 6
  misc_feature: MA Experiment 20000111 PARAMETER Experiment Name: At_42deg_Heat_cDNA_P Parameter: Tissue Value: Aerial
  misc_feature: MA Experiment ID: 20000112 Result: Down-regulated in Transcription
  misc_feature: MA Experiment 20000112 PARAMETER Experiment Name: At_42deg_Heat_cDNA_P Parameter: Temperature (deg C) Value: 42 vs. 22
  misc_feature: MA Experiment 20000112 PARAMETER Experiment Name: At_42deg_Heat_cDNA_P Parameter: Timepoint (hr) Value: 2
  misc_feature: MA Experiment 20000112 PARAMETER Experiment Name: At_42deg_Heat_cDNA_P Parameter: Tissue Value: Aerial
  misc_feature: MA Experiment ID: 20000113 Result: Down-regulated in Transcription
  misc_feature: MA Experiment 20000113 PARAMETER Experiment Name: At_42deg_Heat_cDNA_P Parameter: Temperature (deg C) Value: 42 vs. 22
  misc_feature: MA Experiment 20000113 PARAMETER Experiment Name: At_42deg_Heat_cDNA_P Parameter: Timepoint (hr) Value: 8
  misc_feature: MA Experiment 20000113 PARAMETER Experiment Name: At_42deg_Heat_cDNA_P Parameter: Tissue Value: Aerial
  misc_feature: MA Experiment ID: 20000306 Result: Up-regulated in Transcription
  misc_feature: MA Experiment 20000306 PARAMETER Experiment Name: At_Germinating_Seeds_Sub_P Parameter: Age (hr) Value: 6 vs. 0
  misc_feature: MA Experiment 20000306 PARAMETER Experiment Name: At_Germinating_Seeds_Sub_P Parameter: Organism Value: A. thaliana
  misc_feature: MA Experiment 20000306 PARAMETER Experiment Name: At_Germinating_Seeds_Sub_P Parameter: Plant Line Value: WS
  misc_feature: MA Experiment 20000306 PARAMETER Experiment Name: At_Germinating_Seeds_Sub_P Parameter: Tissue Value: Germinating Seeds
  misc_feature: MA Experiment ID: 20000307 Result: Up-regulated in Transcription
  misc_feature: MA Experiment 20000307 PARAMETER Experiment Name: At_Germinating_Seeds_Sub_P Parameter: Age (hr) Value: 24 vs. 0
  misc_feature: MA Experiment 20000307 PARAMETER Experiment Name: At_Germinating_Seeds_Sub_P Parameter: Organism Value: A. thaliana
  misc_feature: MA Experiment 20000307 PARAMETER Experiment Name: At_Germinating_Seeds_Sub_P Parameter: Plant Line Value: WS
  misc_feature: MA Experiment 20000307 PARAMETER Experiment Name: At_Germinating_Seeds_Sub_P Parameter: Tissue Value: Germinating Seeds
  misc_feature: MA Experiment ID: 20000314 Result: Down-regulated in Transcription
  misc_feature: MA Experiment 20000314 PARAMETER Experiment Name: At_14day_Shoots-Roots_Sub_P Parameter: Age (day) Value: 14
  misc_feature: MA Experiment 20000314 PARAMETER Experiment Name: At_14day_Shoots-Roots_Sub_P Parameter: Organism Value: A. thaliana
  misc_feature: MA Experiment 20000314 PARAMETER Experiment Name: At_14day_Shoots-Roots_Sub_P Parameter: Plant Line Value: WS
  misc_feature: MA Experiment 20000314 PARAMETER Experiment Name: At_14day_Shoots-Roots_Sub_P Parameter: Tissue Value: Roots vs. Whole Plant
  misc_feature: MA Experiment ID: 20000315 Result: Down-regulated in Transcription
  misc_feature: MA Experiment 20000315 PARAMETER Experiment Name: At_14day_Shoots-Roots_Sub_P Parameter: Age (day) Value: 14
  misc_feature: MA Experiment 20000315 PARAMETER Experiment Name: At_14day_Shoots-Roots_Sub_P Parameter: Organism Value: A. thaliana
  misc_feature: MA Experiment 20000315 PARAMETER Experiment Name: At_14day_Shoots-Roots_Sub_P Parameter: Plant Line Value: WS
  misc_feature: MA Experiment 20000315 PARAMETER Experiment Name: At_14day_Shoots-Roots_Sub_P Parameter: Tissue Value: Shoots vs. Whole Plant
  misc_feature: MA Experiment ID: 20000327 Result: Down-regulated in Transcription
  misc_feature: MA Experiment 20000327 PARAMETER Experiment Name: At_42deg_Heat_Sub_P Parameter: Age (day) Value: 14
  misc_feature: MA Experiment 20000327 PARAMETER Experiment Name: At_42deg_Heat_Sub_P Parameter: Organism Value: A. thaliana
  misc_feature: MA Experiment 20000327 PARAMETER Experiment Name: At_42deg_Heat_Sub_P Parameter: Plant Line Value: WS
  misc_feature: MA Experiment 20000327 PARAMETER Experiment Name: At_42deg_Heat_Sub_P Parameter: Temperature (deg C) Value: 42 vs. 22
  misc_feature: MA Experiment 20000327 PARAMETER Experiment Name: At_42deg_Heat_Sub_P Parameter: Timepoint (hr) Value: 1
  misc_feature: MA Experiment 20000327 PARAMETER Experiment Name: At_42deg_Heat_Sub_P Parameter: Tissue Value: Aerial
  misc_feature: MA Experiment ID: 20000328 Result: Down-regulated in Transcription
  misc_feature: MA Experiment 20000328 PARAMETER Experiment Name: At_42deg_Heat_Sub_P Parameter: Age (day) Value: 14
  misc_feature: MA Experiment 20000328 PARAMETER Experiment Name: At_42deg_Heat_Sub_P Parameter: Organism Value: A. thaliana
  misc_feature: MA Experiment 20000328 PARAMETER Experiment Name: At_42deg_Heat_Sub_P Parameter: Plant Line Value: WS
  misc_feature: MA Experiment 20000328 PARAMETER Experiment Name: At_42deg_Heat_Sub_P Parameter: Temperature (deg C) Value: 42 vs. 22
  misc_feature: MA Experiment 20000328 PARAMETER Experiment Name: At_42deg_Heat_Sub_P Parameter: Timepoint (hr) Value: 6
  misc_feature: MA Experiment 20000328 PARAMETER Experiment Name: At_42deg_Heat_Sub_P Parameter: Tissue Value: Aerial
  misc_feature: MA Experiment ID: 20000329 Result: Down-regulated in Transcription
  misc_feature: MA Experiment 20000329 PARAMETER Experiment Name: At_4deg_Cold_Sub_P Parameter: Age (day) Value: 14
  misc_feature: MA Experiment 20000329 PARAMETER Experiment Name: At_4deg_Cold_Sub_P Parameter: Organism Value: A. thaliana
  misc_feature: MA Experiment 20000329 PARAMETER Experiment Name: At_4deg_Cold_Sub_P Parameter: Plant Line Value: WS
  misc_feature: MA Experiment 20000329 PARAMETER Experiment Name: At_4deg_Cold_Sub_P Parameter: Temperature (deg C) Value: 4 vs. 22
  misc_feature: MA Experiment 20000329 PARAMETER Experiment Name: At_4deg_Cold_Sub_P Parameter: Timepoint (hr) Value: 6
  misc_feature: MA Experiment 20000329 PARAMETER Experiment Name: At_4deg_Cold_Sub_P Parameter: Tissue Value: Aerial
  misc_feature: MA Experiment ID: 20000355 Result: Down-regulated in Transcription
  misc_feature: MA Experiment 20000355 PARAMETER Experiment Name: At_Siliques_Sub_P Parameter: Age (day) Value: 21
  misc_feature: MA Experiment 20000355 PARAMETER Experiment Name: At_Siliques_Sub_P Parameter: Organism Value: A. thaliana
  misc_feature: MA Experiment 20000355 PARAMETER Experiment Name: At_Siliques_Sub_P Parameter: Plant Line Value: WS
  misc_feature: MA Experiment 20000355 PARAMETER Experiment Name: At_Siliques_Sub_P Parameter: Tissue Value: Less Than 5mm Siliques vs. Whole Plant
  misc_feature: MA Experiment ID: 20000440 Result: Down-regulated in Transcription
  misc_feature: MA Experiment 20000440 PARAMETER Experiment Name: At_Closed-Flower__Sub_P Parameter: Tissue Value: Closed Flower vs. Whole Plant
aattgtcaaaaactcacaaggcattatcatgtggacatgcaaccttttttttctatacgcattacagaaatgaaaacaatgattaggatcgcatgcacgtcaagaaaacaacctatagctgtactttgatatactaactcaaatcatgtcttggctcaagcacacaagcttctagctagatacaactgcaaacatatatgatggctttgtctaataagaagacgacgacttgggcaccgctttgaccagtcaatacaccaaatctgtatgtatcatttatataaatattatctttccacagttgttgaagaatcacatagacagcacacacggattccatggagactaaacagagtatccctctcctcatgccctataagatgggacccttcaatctttctcacagggttgttttggcgccattgactagatcgagatcgtatggtaacattcctcagcctaatgccaaattatattacactcagagaacaacacctggtggtcttcttatttccgaatcctgtgtagtctccgagacatcattgggctatccggatttacctggattatggaacagagaccaagtggaggcatggaagcccatcgtggatgcggttcattcgaaaggcggtatcttcttctgccagatttggcatggtggcagagtttttcatcaagaccagccaaatggggaagcacccgtctcctctacagacaagccattgatgtgcaagaacatgtatggaggtcagtttaagcctccacggcggttaaggagcgacgagcttcccgccattgtcaacgactttagaatcgctgcacgaaacgcgatcgaagctggcttcgatggagtggaggttcacggcgcacatggttacctgatcgatcagttcctgaaagacaaagtgaatgacagaagtgaccaatatggtgggtcattagagaaccgctgtagatttgctcttgaagtaatcgaagcagtggtgaacgagatcggttcagatcgtgttggaatcagactctcgccatttgcagattacatggagtcaggagactcgaatccagaagcattagggctctacctggtgcaagctatgaacaagcatggcatggagtcgtctacggtcacatggttgaacctagaatgaaaacccttgaaggaatcttcgaatgcacggaatcgcttacgcccatgcgaaaagccttcaaaggtacgttcatagtagcaggaggatattctagagaagacgggaacaaggcggtggaagagggaagaaccgatcttgtggcttatggacggccgttcttggcgaatccggatctgacgaggagattcgaactcaatgagccgttgaataggtacgatagatcaacgttctacacttcagatcctgtagtgggctatacagactaccctttcctcgagaccacagatacaacaactgcttaaggggtttattcagatgcattattagcaaaacatatttttcaatc

SEQ ID NO: 100147 - protein, 269 aa, Arabidopsis thaliana; identical to SEQ ID NO: 40649
  peptide (1)..(269): Ceres Seq. ID no. 13604458
  misc_feature (8)..(256): Pfam Name: NADH:flavin oxidoreductase / NADH oxidase family Pfam Description: NADH:flavin oxidoreductase / NADH oxidase family
  misc_feature (1)..(256): Homolog of NCBI NO: 25325975 NR Description: hypothetical protein T10F20.3 - Arabidopsis
  misc_feature (1)..(269): Homolog of NCBI NO: 22329640 NR Description: 12-oxophytodienoate reductase, putative
  misc_feature (2)..(258): Homolog of NCBI NO: 15223140 NR Description: 12-oxophytodienoate reductase (OPR2) [Arabidopsis
  misc_feature (2)..(258): Homolog of NCBI NO: 26450549 NR Description: putative 12-oxophytodienoate reductase OPR2
  misc_feature (2)..(258): Homolog of NCBI NO: 15223138 NR Description: 12-oxophytodienoate reductase (OPR1) [Arabidopsis
  misc_feature (2)..(258): Homolog of NCBI NO: 21593388 NR Description: 12-oxophytodienoate reductase (OPR1) [Arabidopsis
  misc_feature (1)..(258): Homolog of NCBI NO: 14277800 NR Description: Chain A, Crystal Structure Of 12-Oxophytodienoate
  misc_feature (2)..(258): Homolog of NCBI NO: 2765083 NR Description: 12-oxophytodienoate reductase [Arabidopsis
  misc_feature (1)..(258): Homolog of NCBI NO: 4894182 NR Description: 12-oxophytodienoate reductase [Lycopersicon
  misc_feature (8)..(269): Homolog of NCBI NO: 7449901 NR Description: probable 12-oxophytodienoate reductase (EC

SEQ ID NO: 100148 - protein, 259 aa, Arabidopsis thaliana; identical to SEQ ID NO: 40650
  peptide (1)..(259): Ceres Seq. ID no. 13604459
  misc_feature (1)..(246): Pfam Name: NADH:flavin oxidoreductase / NADH oxidase family Pfam Description: NADH:flavin oxidoreductase / NADH oxidase family
  misc_feature (1)..(246): Homolog of NCBI NO: 25325975 NR Description: hypothetical protein T10F20.3 - Arabidopsis
  misc_feature (1)..(259): Homolog of NCBI NO: 22329640 NR Description: 12-oxophytodienoate reductase, putative
  misc_feature (1)..(248): Homolog of NCBI NO: 15223140 NR Description: 12-oxophytodienoate reductase (OPR2) [Arabidopsis
  misc_feature (1)..(248): Homolog of NCBI NO: 26450549 NR Description: putative 12-oxophytodienoate reductase OPR2
  misc_feature (1)..(248): Homolog of NCBI NO: 15223138 NR Description: 12-oxophytodienoate reductase (OPR1) [Arabidopsis
  misc_feature (1)..(248): Homolog of NCBI NO: 21593388 NR Description: 12-oxophytodienoate reductase (OPR1) [Arabidopsis
  misc_feature (1)..(248): Homolog of NCBI NO: 14277800 NR Description: Chain A, Crystal Structure Of 12-Oxophytodienoate
  misc_feature (1)..(248): Homolog of NCBI NO: 2765083 NR Description: 12-oxophytodienoate reductase [Arabidopsis
  misc_feature (1)..(248): Homolog of NCBI NO: 4894182 NR Description: 12-oxophytodienoate reductase [Lycopersicon
  misc_feature (1)..(259): Homolog of NCBI NO: 7449901 NR Description: probable 12-oxophytodienoate reductase (EC

SEQ ID NO: 100149 - protein, 255 aa, Arabidopsis thaliana; identical to SEQ ID NO: 40651
  peptide (1)..(255): Ceres Seq. ID no. 13604460
  misc_feature (1)..(242): Pfam Name: NADH:flavin oxidoreductase / NADH oxidase family Pfam Description: NADH:flavin oxidoreductase / NADH oxidase family
  misc_feature (1)..(242): Homolog of NCBI NO: 25325975 NR Description: hypothetical protein T10F20.3 - Arabidopsis
  misc_feature (1)..(255): Homolog of NCBI NO: 22329640 NR Description: 12-oxophytodienoate reductase, putative
  misc_feature (1)..(244): Homolog of NCBI NO: 15223140 NR Description: 12-oxophytodienoate reductase (OPR2) [Arabidopsis
  misc_feature (1)..(244): Homolog of NCBI NO: 26450549 NR Description: putative 12-oxophytodienoate reductase OPR2
  misc_feature (1)..(244): Homolog of NCBI NO: 15223138 NR Description: 12-oxophytodienoate reductase (OPR1) [Arabidopsis
  misc_feature (1)..(244): Homolog of NCBI NO: 21593388 NR Description: 12-oxophytodienoate reductase (OPR1) [Arabidopsis
  misc_feature (1)..(244): Homolog of NCBI NO: 14277800 NR Description: Chain A, Crystal Structure Of 12-Oxophytodienoate
  misc_feature (1)..(244): Homolog of NCBI NO: 2765083 NR Description: 12-oxophytodienoate reductase [Arabidopsis
  misc_feature (1)..(244): Homolog of NCBI NO: 4894182 NR Description: 12-oxophytodienoate reductase [Lycopersicon
  misc_feature (1)..(255): Homolog of NCBI NO: 7449901 NR Description: probable 12-oxophytodienoate reductase (EC

SEQ ID NO: 100150 - DNA, 1073 bp, Arabidopsis thaliana
  misc_feature (1)..(1073): Ceres Seq. ID no. 13604467
  misc_feature: MA Experiment ID: 108473 Result: Down-regulated in Transcription
  misc_feature: MA Experiment 108473 PARAMETER Experiment Name: At_Drought_Flowers_cDNA_P Parameter: Timepoint (hr) Value: 7 d
  misc_feature: MA Experiment 108473 PARAMETER Experiment Name: At_Drought_Flowers_cDNA_P Parameter: Tissue Value: Flower
  misc_feature: MA Experiment 108473 PARAMETER Experiment Name: At_Drought_Flowers_cDNA_P Parameter: Treatment Value: Drought vs. No Drought
  misc_feature: MA Experiment ID: 108501 Result: Down-regulated in Transcription
  misc_feature: MA Experiment 108501 PARAMETER Experiment Name: At_ap2_floral_buds_cDNA_P Parameter: Plant Line Value: ap2 (Ler.)
  misc_feature: MA Experiment 108501 PARAMETER Experiment Name: At_ap2_floral_buds_cDNA_P Parameter: Tissue Value: Closed Flower
  misc_feature: MA Experiment ID: 20000265 Result: Up-regulated in Transcription
  misc_feature: MA Experiment 20000265 PARAMETER Experiment Name: At_Open_Flower_P Parameter: Age (day) Value: 21
  misc_feature: MA Experiment 20000265 PARAMETER Experiment Name: At_Open_Flower_P Parameter: Plant Line Value: WS
  misc_feature: MA Experiment 20000265 PARAMETER Experiment Name: At_Open_Flower_P Parameter: Tissue Value: Closed Flower vs. Whole Plant
  misc_feature: MA Experiment ID: 20001910 Result: Down-regulated in Transcription
  misc_feature: MA Experiment 20001910 PARAMETER Experiment Name: At_Drought_Reproduction_P Parameter: Age (day) Value: 37
  misc_feature: MA Experiment 20001910 PARAMETER Experiment Name: At_Drought_Reproduction_P Parameter: Organism Value: A. thaliana
  misc_feature: MA Experiment 20001910 PARAMETER Experiment Name: At_Drought_Reproduction_P Parameter: Plant Line Value: WS
  misc_feature: MA Experiment 20001910 PARAMETER Experiment Name: At_Drought_Reproduction_P Parameter: Timepoint (day) Value: 7
  misc_feature: MA Experiment 20001910 PARAMETER Experiment Name: At_Drought_Reproduction_P Parameter: Tissue Value: Flowers
  misc_feature: MA Experiment 20001910 PARAMETER Experiment Name: At_Drought_Reproduction_P Parameter: Treatment Value: Drought vs. No Drought
acgaaacataattatcaaattcaaacaacaacaaaaaaacactctctccctctccgtatctatttaaaatccgatcaggttaatcgagtttatcatttggagaaagcaaatttccaaaaatgtttcgagttagcaatttcatggttggtctagcaaacacattggtgatgttagtgggcgcttcggccattggttattcgatttacatgttcgttcaccaaggcgtcactgattgtgaatctgccattcggataccacttctcacgaccggactcatcctcttcttggtgtctttgctcggagtgattggatcttgtttcaaggagaatttggcaatggtttcctacttgatcatattgtttgggggcattgttgcattgatgattttctccatatttctcttctttgtgaccaacaaaggagccggtcgtgtggtgtccggtcgagggtataaagagtaccggacggtggatttctcgacgtggcttaatgggttcgttggtgggaagagatgggttgggataaggtcttgtttggctgaggctaacgtttgtgatgatttgagtgatggtcgtgttagtcagatcgctgatgcgttttatcacaagaacttgtctcccatccagtcaggttgttgtaagccaccatcggattgcaacttcgagttcagaaacgcgacgttctggataccgccgagcaaaaacgaaacggcagttgcggaaaacggggactgtggtacgtggagcaacgtgcaaacagagttatgtttcaactgcaacgcatgcaaagcgggtgtgttagcgaacataagagagaagtggaggaatcttcttgttttcaacatttgtctcctcattctcctcataaccgtctattcctgcggttgctgtgctcgtcgtaacaatcggacggctaggaaaagtgattctgtctgatcaacaactcaatttcagtttcttgtgtttttctgttttcttagtttgtttggttttttaagttaattatcttttgttttctttggacaatgtcatgttctgtttctcaacaattatcatgaatttatcacatttcac

SEQ ID NO: 100151 - protein, 271 aa, Arabidopsis thaliana
  peptide (1)..(271): Ceres Seq. ID no. 13604468
  misc_feature (4)..(248): Pfam Name: Tetraspanin family Pfam Description: Tetraspanin family
  misc_feature (1)..(271): Homolog of NCBI NO: 18394621 NR Description: senescence-associated protein family [Arabidopsis >gi|6714308|gb|AAF26004.1|AC013354_23 F15H18.1 [Arabidopsis
  misc_feature (1)..(271): Homolog of NCBI NO: 21593310 NR Description: unknown [Arabidopsis thaliana]
  misc_feature (1)..(262): Homolog of NCBI NO: 3551954 NR Description: senescence-associated protein 5 [Hemerocallis
  misc_feature (1)..(267): Homolog of NCBI NO: 15237197 NR Description: senescence-associated protein family [Arabidopsis
  misc_feature (1)..(263): Homolog of NCBI NO: 20197174 NR Description: hypothetical protein [Arabidopsis thaliana]
  misc_feature (2)..(263): Homolog of NCBI NO: 29367553 NR Description: senescence-associated protein-like protein [Oryza
  misc_feature (1)..(266): Homolog of NCBI NO: 15234743 NR Description: senescence-associated protein family [Arabidopsis
  misc_feature (1)..(263): Homolog of NCBI NO: 15234374 NR Description: senescence-associated protein, putative
  misc_feature (1)..(266): Homolog of NCBI NO: 21537169 NR Description: senescence-associated protein-like protein
  misc_feature (5)..(271): Homolog of NCBI NO: 15238641 NR Description: senescence-associated protein family [Arabidopsis
MFRVSNFMVGLANTLVMLVGASAIGYSIYMFVHQGVTDCESAIRIPLLTTGLILFLVSLLGVIGSCFKENLAMVSYLIILFGGIVALMIFSIFLFFVTNKGAGRVVSGRGYKEYRTVDFSTWLNGFVGGKRWVGIRSCLAEANVCDDLSDGRVSQIADAFYHKNLSPIQSGCCKPPSDCNFEFRNATFWIPPSKNETAVAENGDCGTWSNVQTELCFNCNACKAGVLANIREKWRNLLVFNICLLILLITVYSCGCCARRNNRTARKSDSV

SEQ ID NO: 100152 - protein, 264 aa, Arabidopsis thaliana
  peptide (1)..(264): Ceres Seq. ID no. 13604469
  misc_feature (1)..(241): Pfam Name: Tetraspanin family Pfam Description: Tetraspanin family
  misc_feature (1)..(264): Homolog of NCBI NO: 18394621 NR Description: senescence-associated protein family [Arabidopsis >gi|6714308|gb|AAF26004.1|AC013354_23 F15H18.1 [Arabidopsis
  misc_feature (1)..(264): Homolog of NCBI NO: 21593310 NR Description: unknown [Arabidopsis thaliana]
  misc_feature (1)..(255): Homolog of NCBI NO: 3551954 NR Description: senescence-associated protein 5 [Hemerocallis
  misc_feature (1)..(260): Homolog of NCBI NO: 15237197 NR Description: senescence-associated protein family [Arabidopsis
  misc_feature (1)..(256): Homolog of NCBI NO: 20197174 NR Description: hypothetical protein [Arabidopsis thaliana]
  misc_feature (1)..(256): Homolog of NCBI NO: 29367553 NR Description: senescence-associated protein-like protein [Oryza
  misc_feature (1)..(259): Homolog of NCBI NO: 15234743 NR Description: senescence-associated protein family [Arabidopsis
  misc_feature (1)..(256): Homolog of NCBI NO: 15234374 NR Description: senescence-associated protein, putative
  misc_feature (1)..(259): Homolog of NCBI NO: 21537169 NR Description: senescence-associated protein-like protein
  misc_feature (1)..(264): Homolog of NCBI NO: 15238641 NR Description: senescence-associated protein family [Arabidopsis
MVGLANTLVMLVGASAIGYSIYMFVHQGVTDCESAIRIPLLTTGLILFLVSLLGVIGSCFKENLAMVSYLIILFGGIVALMIFSIFLFFVTNKGAGRVVSGRGYKEYRTVDFSTWLNGFVGGKRWVGIRSCLAEANVCDDLSDGRVSQIADAFYHKNLSPIQSGCCKPPSDCNFEFRNATFWIPPSKNETAVAENGDCGTWSNVQTELCFNCNACKAGVLANIREKWRNLLVFNICLLILLITVYSCGCCARRNNRTARKSDSV

SEQ ID NO: 100153 - protein, 255 aa, Arabidopsis thaliana
  peptide (1)..(255): Ceres Seq. ID no. 13604470
  misc_feature (1)..(232): Pfam Name: Tetraspanin family Pfam Description: Tetraspanin family
  misc_feature (1)..(255): Homolog of NCBI NO: 18394621 NR Description: senescence-associated protein family [Arabidopsis >gi|6714308|gb|AAF26004.1|AC013354_23 F15H18.1 [Arabidopsis
  misc_feature (1)..(255): Homolog of NCBI NO: 21593310 NR Description: unknown [Arabidopsis thaliana]
  misc_feature (1)..(246): Homolog of NCBI NO: 3551954 NR Description: senescence-associated protein 5 [Hemerocallis
  misc_feature (1)..(251): Homolog of NCBI NO: 15237197 NR Description: senescence-associated protein family [Arabidopsis
  misc_feature (1)..(247): Homolog of NCBI NO: 20197174 NR Description: hypothetical protein [Arabidopsis thaliana]
  misc_feature (1)..(247): Homolog of NCBI NO: 29367553 NR Description: senescence-associated protein-like protein [Oryza
  misc_feature (1)..(250): Homolog of NCBI NO: 15234743 NR Description: senescence-associated protein family [Arabidopsis
  misc_feature (1)..(247): Homolog of NCBI NO: 15234374 NR Description: senescence-associated protein, putative
  misc_feature (1)..(250): Homolog of NCBI NO: 21537169 NR Description: senescence-associated protein-like protein
  misc_feature (1)..(255): Homolog of NCBI NO: 15238641 NR Description: senescence-associated protein family [Arabidopsis
MLVGASAIGYSIYMFVHQGVTDCESAIRIPLLTTGLILFLVSLLGVIGSCFKENLAMVSYLIILFGGIVALMIFSIFLFFVTNKGAGRVVSGRGYKEYRTVDFSTWLNGFVGGKRWVGIRSCLAEANVCDDLSDGRVSQIADAFYHKNLSPIQSGCCKPPSDCNFEFRNATFWIPPSKNETAVAENGDCGTWSNVQTELCFNCNACKAGVLANIREKWRNLLVFNICLLILLITVYSCGCCARRNNRTARKSDSV

SEQ ID NO: 100154 - DNA, 847 bp, Arabidopsis thaliana
  misc_feature (1)..(847): Ceres Seq. ID no. 13604471
  misc_feature: MA Experiment ID: 108434 Result: Up-regulated in Transcription
  misc_feature: MA Experiment 108434 PARAMETER Experiment Name: At_Root_Tips_cDNA_P Parameter: Tissue Value: Root Tips
  misc_feature: MA Experiment ID: 108462 Result: Down-regulated in Transcription
  misc_feature: MA Experiment 108462 PARAMETER Experiment Name: At_Germinating_Seeds_cDNA_P Parameter: Age (day) Value: 2 vs. 0
  misc_feature: MA Experiment 108462 PARAMETER Experiment Name: At_Germinating_Seeds_cDNA_P Parameter: Tissue Value: Germinating Seeds
  misc_feature: MA Experiment ID: 108463 Result: Down-regulated in Transcription
  misc_feature: MA Experiment 108463 PARAMETER Experiment Name: At_Germinating_Seeds_cDNA_P Parameter: Age (day) Value: 3 vs. 0
  misc_feature: MA Experiment 108463 PARAMETER Experiment Name: At_Germinating_Seeds_cDNA_P Parameter: Tissue Value: Germinating Seeds
  misc_feature: MA Experiment ID: 108488 Result: Up-regulated in Transcription
  misc_feature: MA Experiment ID: 108561 Result: Down-regulated in Transcription
  misc_feature: MA Experiment 108561 PARAMETER Experiment Name: At_100uM_ABA_cDNA_P Parameter: Timepoint (hr) Value: 6
  misc_feature: MA Experiment 108561 PARAMETER Experiment Name: At_100uM_ABA_cDNA_P Parameter: Tissue Value: Aerial
  misc_feature: MA Experiment 108561 PARAMETER Experiment Name: At_100uM_ABA_cDNA_P Parameter: Treatment Value: 100uM ABA vs. No Treatment
  misc_feature: MA Experiment ID: 108573 Result: Down-regulated in Transcription
  misc_feature: MA Experiment 108573 PARAMETER Experiment Name: At_Drought_cDNA_P Parameter: Timepoint (hr) Value: 6
  misc_feature: MA Experiment 108573 PARAMETER Experiment Name: At_Drought_cDNA_P Parameter: Tissue Value: Aerial
  misc_feature: MA Experiment 108573 PARAMETER Experiment Name: At_Drought_cDNA_P Parameter: Treatment Value: Drought vs. No Drought
  misc_feature: MA Experiment ID: 108595 Result: Down-regulated in Transcription
  misc_feature: MA Experiment 108595 PARAMETER Experiment Name: At_Ler-pi_Ovule_cDNA_P Parameter: Plant Line Value: null
  misc_feature: MA Experiment ID: 20000112 Result: Down-regulated in Transcription
  misc_feature: MA Experiment 20000112 PARAMETER Experiment Name: At_42deg_Heat_cDNA_P Parameter: Temperature (deg C) Value: 42 vs. 22
  misc_feature: MA Experiment 20000112 PARAMETER Experiment Name: At_42deg_Heat_cDNA_P Parameter: Timepoint (hr) Value: 2
  misc_feature: MA Experiment 20000112 PARAMETER Experiment Name: At_42deg_Heat_cDNA_P Parameter: Tissue Value: Aerial
  misc_feature: MA Experiment ID: 20000224 Result: Up-regulated in Transcription
  misc_feature: MA Experiment ID: 20000355 Result: Up-regulated in Transcription
  misc_feature: MA Experiment 20000355 PARAMETER Experiment Name: At_Siliques_Sub_P Parameter: Age (day) Value: 21
  misc_feature: MA Experiment 20000355 PARAMETER Experiment Name: At_Siliques_Sub_P Parameter: Organism Value: A. thaliana
  misc_feature: MA Experiment 20000355 PARAMETER Experiment Name: At_Siliques_Sub_P Parameter: Plant Line Value: WS
  misc_feature: MA Experiment 20000355 PARAMETER Experiment Name: At_Siliques_Sub_P Parameter: Tissue Value: Less Than 5mm Siliques vs. Whole Plant
  misc_feature: MA Experiment ID: 20001807 Result: Up-regulated in Transcription
  misc_feature: MA Experiment 20001807 PARAMETER Experiment Name: At_50mM_NH4NO3_L-to-H_Sub_P Parameter: Timepoint (hr) Value: 6
  misc_feature: MA Experiment 20001807 PARAMETER Experiment Name: At_50mM_NH4NO3_L-to-H_Sub_P Parameter: Tissue Value: Leaf
  misc_feature: MA Experiment 20001807 PARAMETER Experiment Name: At_50mM_NH4NO3_L-to-H_Sub_P Parameter: Treatment Value: 50mM NH4NO3 vs 100mM Mannitol
gatagattttacaccaccgaagccgaaaaaatgccggcggcgaagaggactcccaaggttaaccgtaaccctgacctaatcaggggagttggaaaatattcgaggtctcagatgtaccacaagagaggtttgtgggctatcaaggccaagaacggtggcgttttccctcgtcacgatgctcagccaaaggtcgacgctccggttgagaagcctgccaagttttatccggcggaagacgtcaagaagccgcttgttaacagacgcaagcctaagcctaccaagctaaaagccagcatcactccaggaactgtgttgatcattcttgctggtagattcaagggtaagagagttgtcttcctcaagcaactttcttctggtttgcttcttgtaacaggaccattcaagattaatggtgttccattgagacgtgttaaccaagcctatgtgattggaacctccacaaagattgacatttctggagtcaacactgagaaattcgatgacaagtattttggaaaggttgctgagaagaagaagaagaaaacagaaggcgaattcttcgaagctgagaaagaggagaagaaggagatcccacaggagaagaaggaagaccagaaaaccgttgatgctgctctgatcaaatccattgaagctgtcccagagctcaaggtttaccttggagccaggttctcattgagtcaaggaatgaaaccacatgagcttgttttctagatttcgtattgtttctcaaattttaagaatatctgtttccctgagtattttcatctttaatcgtccttggatcttaaagactattttctctgattttatatatcaaattttcgag

SEQ ID NO: 100155 - protein, 243 aa, Arabidopsis thaliana; identical to SEQ ID NO: 25771
  peptide (1)..(243): Ceres Seq. ID no. 13604472
  misc_feature (136)..(243): Pfam Name: Ribosomal protein L6e Pfam Description: Ribosomal protein L6e
  misc_feature (11)..(243): Homolog of NCBI NO: 15221798 NR Description: 60S ribosomal protein L6 (RPL6A) [Arabidopsis
  misc_feature (11)..(243): Homolog of NCBI NO: 21593910 NR Description: 60S ribosomal protein L6, putative [Arabidopsis
  misc_feature (11)..(243): Homolog of NCBI NO: 15221126 NR Description: 60S ribosomal protein L6 (RPL6C) [Arabidopsis
  misc_feature (11)..(243): Homolog of NCBI NO: 15221127 NR Description: 60S ribosomal protein L6 (RPL6B) [Arabidopsis
  misc_feature (11)..(243): Homolog of NCBI NO: 464621 NR Description: 60S RIBOSOMAL PROTEIN L6 (YL16-LIKE)
  misc_feature (11)..(243): Homolog of NCBI NO: 7208784 NR Description: 60S ribosomal protein L6 [Cicer arietinum]
  misc_feature (26)..(243): Homolog of NCBI NO: 38344818 NR Description: OSJNBb0022F23.11 [Oryza sativa (japonica
  misc_feature (59)..(243): Homolog of NCBI NO: 6012952 NR Description: 60S ribosomal protein L6 (YL 16 like) [Cyanophora
  misc_feature (68)..(243): Homolog of NCBI NO: 16758864 NR Description: ribosomal protein L6 [Rattus norvegicus]
  misc_feature (5)..(48): Homolog of NCBI NO: 16758864 NR Description: ribosomal protein L6 [Rattus norvegicus]

SEQ ID NO: 100156 - protein, 233 aa, Arabidopsis thaliana; identical to SEQ ID NO: 25772
  peptide (1)..(233): Ceres Seq. ID no. 13604473
  misc_feature (126)..(233): Pfam Name: Ribosomal protein L6e Pfam Description: Ribosomal protein L6e
  misc_feature (1)..(233): Homolog of NCBI NO: 15221798 NR Description: 60S ribosomal protein L6 (RPL6A) [Arabidopsis
  misc_feature (1)..(233): Homolog of NCBI NO: 21593910 NR Description: 60S ribosomal protein L6, putative [Arabidopsis
  misc_feature (1)..(233): Homolog of NCBI NO: 15221126 NR Description: 60S ribosomal protein L6 (RPL6C) [Arabidopsis
  misc_feature (1)..(233): Homolog of NCBI NO: 15221127 NR Description: 60S ribosomal protein L6 (RPL6B) [Arabidopsis
  misc_feature (1)..(233): Homolog of NCBI NO: 464621 NR Description: 60S RIBOSOMAL PROTEIN L6 (YL16-LIKE)
  misc_feature (1)..(233): Homolog of NCBI NO: 7208784 NR Description: 60S ribosomal protein L6 [Cicer arietinum]
  misc_feature (16)..(233): Homolog of NCBI NO: 38344818 NR Description: OSJNBb0022F23.11 [Oryza sativa (japonica
  misc_feature (49)..(233): Homolog of NCBI NO: 6012952 NR Description: 60S ribosomal protein L6 (YL 16 like) [Cyanophora
  misc_feature (58)..(233): Homolog of NCBI NO: 16758864 NR Description: ribosomal protein L6 [Rattus norvegicus]
  misc_feature (1)..(38): Homolog of NCBI NO: 16758864 NR Description: ribosomal protein L6 [Rattus norvegicus]

SEQ ID NO: 100157 - protein, 206 aa, Arabidopsis thaliana; identical to SEQ ID NO: 25773
  peptide (1)..(206): Ceres Seq. ID no. 13604474
  misc_feature (99)..(206): Pfam Name: Ribosomal protein L6e Pfam Description: Ribosomal protein L6e
  misc_feature (1)..(206): Homolog of NCBI NO: 15221798 NR Description: 60S ribosomal protein L6 (RPL6A) [Arabidopsis
  misc_feature (1)..(206): Homolog of NCBI NO: 21593910 NR Description: 60S ribosomal protein L6, putative [Arabidopsis
  misc_feature (1)..(206): Homolog of NCBI NO: 15221126 NR Description: 60S ribosomal protein L6 (RPL6C) [Arabidopsis
  misc_feature (1)..(206): Homolog of NCBI NO: 15221127 NR Description: 60S ribosomal protein L6 (RPL6B) [Arabidopsis
  misc_feature (1)..(206): Homolog of NCBI NO: 464621 NR Description: 60S RIBOSOMAL PROTEIN L6 (YL16-LIKE)
  misc_feature (1)..(206): Homolog of NCBI NO: 7208784 NR Description: 60S ribosomal protein L6 [Cicer arietinum]
  misc_feature (1)..(206): Homolog of NCBI NO: 38344818 NR Description: OSJNBb0022F23.11 [Oryza sativa (japonica
  misc_feature (22)..(206): Homolog of NCBI NO: 6012952 NR Description: 60S ribosomal protein L6 (YL 16 like) [Cyanophora
  misc_feature (31)..(206): Homolog of NCBI NO: 16758864 NR Description: ribosomal protein L6 [Rattus norvegicus]
  misc_feature (1)..(11): Homolog of NCBI NO: 16758864 NR Description: ribosomal protein L6 [Rattus norvegicus]

SEQ ID NO: 100158 - DNA, 1887 bp, Arabidopsis thaliana
  misc_feature (1)..(1887): Ceres Seq. ID no. 13604475
  misc_feature: MA Experiment ID: 108595 Result: Down-regulated in Transcription
  misc_feature: MA Experiment 108595 PARAMETER Experiment Name: At_Ler-pi_Ovule_cDNA_P Parameter: Plant Line Value: null
  misc_feature: MA Experiment ID: 20000087 Result: Down-regulated in Transcription
  misc_feature: MA Experiment 20000087 PARAMETER Experiment Name: At_100uM_ABA_Mutants_cDNA_P Parameter: Plant Line Value: WS
  misc_feature: MA Experiment 20000087 PARAMETER Experiment Name: At_100uM_ABA_Mutants_cDNA_P Parameter: Timepoint (hr) Value: 6
  misc_feature: MA Experiment 20000087 PARAMETER Experiment Name: At_100uM_ABA_Mutants_cDNA_P Parameter: Tissue Value: Aerial
  misc_feature: MA Experiment 20000087 PARAMETER Experiment Name: At_100uM_ABA_Mutants_cDNA_P Parameter: Treatment Value: 100uM ABA vs. No Treatment
  misc_feature: MA Experiment ID: 20000224 Result: Up-regulated in Transcription
  misc_feature: MA Experiment ID: 20000265 Result: Up-regulated in Transcription
  misc_feature: MA Experiment 20000265 PARAMETER Experiment Name: At_Open_Flower_P Parameter: Age (day) Value: 21
  misc_feature: MA Experiment 20000265 PARAMETER Experiment Name: At_Open_Flower_P Parameter: Plant Line Value: WS
  misc_feature: MA Experiment 20000265 PARAMETER Experiment Name: At_Open_Flower_P Parameter: Tissue Value: Closed Flower vs. Whole Plant
  misc_feature: MA Experiment ID: 20000794 Result: Up-regulated in Transcription
  misc_feature: MA Experiment 20000794 PARAMETER Experiment Name: At_Petals_P Parameter: Age (day) Value: 23-25 days
  misc_feature: MA Experiment 20000794 PARAMETER Experiment Name: At_Petals_P Parameter: Plant Line Value: WS
  misc_feature: MA Experiment 20000794 PARAMETER Experiment Name: At_Petals_P Parameter: Tissue Value: Petals vs. Whole plant
gaatttgtgtgttccgaccgaaaaatcaggaagaagaagaagaagattgacaaacaaaaaggattcacctttagtgactgagtgagagaaagagattgaaggaaaaaaaaaaaaaagggtgaagctttggagagaggataaccacgtagaggattctaatccgtggttgcaaacgaaggacccagaatttctggaatctcttgcttcgatcgaatcactctcatgtctaacgaagactctcttccgcctttcactttgtttggtttggatgatgtcgaaaattacggtctggtcactgaagcagacaattcgttacctttagatatacacaatcaggtttttcaacttgtggagaagggaaaccaatcattcaaagagtctcgctttgaagaggctattagcagttattcaaaggccaattctattaaacctcttgaccctattgttcttggcaatagaagtgctgcttatataagatttggccaatatctgaagcagagatctgcatcaatttctgaatataaacctctgaatggttttgatatgtcgatgcttggtgaacttgctcttaaggatgctgataagctaatgagtcttcagagcagtttagtgaagtcatatattacaaaggcttgtgccctcatgttgctagaaagatatgaggtagcccgtgacactatcctctcaggtctacagattgatccctttagcggtcctctacgatccaatcttcaggaattggagaaagtgatgcctaattcgatgcgtaaaacccatggaatggctgagcggtctgatgattttgattgcactgtttgcctgaaattgctgtacgaacctgctacaactccatgtgggcatacattctgccgatcatgcctctttcagtcaatggatcgcggcaacaaatgtccactatgtcgaactgtcatttttatgactccaagaacatgcgctgtcagtgtgacactgaataacatcatagagaaaaactttccagaggagtatgctgaaaggaaatcagagcaagacactctggtccacctaggcaatgaaagtatgccccttttcgtcatggatgtgataatcccctgtcagaagttgtctcttcatatatttgaaccacgatatcgactaatggtgagaagaataatggaaggaaatcatcggatgggaatggtagctcttgattcggcgacaggttctccagtggatgttgcttgcgaagttgaaatcacagagtgtgatccactcccggatggacgttttgtcctggagctggaaagccatagaaggtgccgcattgtaaaagcttgggatcaagatggatatcgtgttgcagaggttgaatgggtgaaagatataccaccacaaagcgagcaagggaaagcagatctgcgggaactgacgaccagcgcagcatcatttgctcggtcatggctagatagagcaaaggaagcagctagacaaggagacagaagaagacttgaaatacttctaaatgttgaatctatgataccaacgcctcaagatcccgagcgcttcagtttctggcttgctacactgacagataggagaccttcagaaagattggaactacttcggcttcaggatactggagagagaataaagcgcgggttgatatatctccgatcagtagaaagaggatgcagaatgcaatgaactggcagcatgatggcattgtattgccggttaaactacagagataaacttgggacctgttcataagaaggttgacaaaacatttattcatgattaaaggaatacataagatagagatccttgtaggatcgctgtcatcctttgtcggatccattgttgtagattttgtttgcgactgtattttatttaattaccatattcttc

SEQ ID NO: 100159 - protein, 486 aa, Arabidopsis thaliana; identical to SEQ ID NO: 50442
  peptide (1)..(486): Ceres Seq. ID no. 13604476
  misc_feature (279)..(478): Pfam Name: ATP-dependent protease La (LON) domain Pfam Description: ATP-dependent protease La (LON) domain
  misc_feature (1)..(486): Homolog of NCBI NO: 18394639 NR Description: RING finger protein family [Arabidopsis thaliana] RING finger protein family [Arabidopsis thaliana] RING finger protein family [Arabidopsis thaliana]
  misc_feature (1)..(486): Homolog of NCBI NO: 21554128 NR Description: unknown [Arabidopsis thaliana]
  misc_feature (193)..(471): Homolog of NCBI NO: 38089190 NR Description: similar to hypothetical protein FLJ23749 [Mus
  misc_feature (193)..(471): Homolog of NCBI NO: 40217796 NR Description: hypothetical protein FLJ23749 [Homo sapiens]
  misc_feature (191)..(411): Homolog of NCBI NO: 10439066 NR Description: unnamed protein product [Homo sapiens]
  misc_feature (41)..(83): Homolog of NCBI NO: 10439066 NR Description: unnamed protein product [Homo sapiens]
  misc_feature (200)..(471): Homolog of NCBI NO: 18676903 NR Description: unnamed protein product [Homo sapiens]
  misc_feature (178)..(469): Homolog of NCBI NO: 38348242 NR Description: FLJ45273 protein [Homo sapiens]
  misc_feature (191)..(415): Homolog of NCBI NO: 34933034 NR Description: similar to hypothetical protein FLJ22612 [Rattus
  misc_feature (41)..(83): Homolog of NCBI NO: 34933034 NR Description: similar to hypothetical protein FLJ22612 [Rattus

SEQ ID NO: 100160 - protein, 379 aa, Arabidopsis thaliana; identical to SEQ ID NO: 50443
  peptide (1)..(379): Ceres Seq. ID no. 13604477
  misc_feature (172)..(371): Pfam Name: ATP-dependent protease La (LON) domain Pfam Description: ATP-dependent protease La (LON) domain
  misc_feature (1)..(379): Homolog of NCBI NO: 18394639 NR Description: RING finger protein family [Arabidopsis thaliana] RING finger protein family [Arabidopsis thaliana] RING finger protein family [Arabidopsis thaliana]
  misc_feature (1)..(379): Homolog of NCBI NO: 21554128 NR Description: unknown [Arabidopsis thaliana]
  misc_feature (86)..(364): Homolog of NCBI NO: 38089190 NR Description: similar to hypothetical protein FLJ23749 [Mus
  misc_feature (86)..(364): Homolog of NCBI NO: 40217796 NR Description: hypothetical protein FLJ23749 [Homo sapiens]
  misc_feature (84)..(304): Homolog of NCBI NO: 10439066 NR Description: unnamed protein product [Homo sapiens]
  misc_feature (93)..(364): Homolog of NCBI NO: 18676903 NR Description: unnamed protein product [Homo sapiens]
  misc_feature (71)..(362): Homolog of NCBI NO: 38348242 NR Description: FLJ45273 protein [Homo sapiens]
  misc_feature (84)..(308): Homolog of NCBI NO: 34933034 NR Description: similar to hypothetical protein FLJ22612 [Rattus
  misc_feature (84)..(369): Homolog of NCBI NO: 26449305 NR Description: hypothetical protein [Macaca fascicularis]
  misc_feature (84)..(304): Homolog of NCBI NO: 37622896 NR Description: ring finger protein 127 [Homo sapiens]

SEQ ID NO: 100161 - protein, 377 aa, Arabidopsis thaliana
  peptide (1)..(377): Ceres Seq. ID no. 13604478
  misc_feature (170)..(369): Pfam Name: ATP-dependent protease La (LON) domain Pfam Description: ATP-dependent protease La (LON) domain
  misc_feature (1)..(377): Homolog of NCBI NO: 18394639 NR Description: RING finger protein family [Arabidopsis thaliana] RING finger protein family [Arabidopsis thaliana] RING finger protein family [Arabidopsis thaliana]
  misc_feature (1)..(377): Homolog of NCBI NO: 21554128 NR Description: unknown [Arabidopsis thaliana]
  misc_feature (84)..(362): Homolog of NCBI NO: 38089190 NR Description: similar to hypothetical protein FLJ23749 [Mus
  misc_feature (84)..(362): Homolog of NCBI NO: 40217796 NR Description: hypothetical protein FLJ23749 [Homo sapiens]
  misc_feature (82)..(302): Homolog of NCBI NO: 10439066 NR Description: unnamed protein product [Homo sapiens]
  misc_feature (91)..(362): Homolog of NCBI NO: 18676903 NR Description: unnamed protein product [Homo sapiens]
  misc_feature (69)..(360): Homolog of NCBI NO: 38348242 NR Description: FLJ45273 protein [Homo sapiens]
  misc_feature (82)..(306): Homolog of NCBI NO: 34933034 NR Description: similar to hypothetical protein FLJ22612 [Rattus
  misc_feature (82)..(367): Homolog of NCBI NO: 26449305 NR Description: hypothetical protein [Macaca fascicularis]
  misc_feature (82)..(302): Homolog of NCBI NO: 37622896 NR Description: ring finger protein 127 [Homo sapiens]
MLGELALKDADKLMSLQSSLVKSYITKACALMLLERYEVARDTILSGLQIDPFSGPLRSNLQELEKVMPNSMRKTHGMAERSDDFDCTVCLKLLYEPATTPCGHTFCRSCLFQSMDRGNKCPLCRTVIFMTPRTCAVSVTLNNIIEKNFPEEYAERKSEQDTLVHLGNESMPLFVMDVIIPCQKLSLHIFEPRYRLMVRRIMEGNHRMGMVALDSATGSPVDVACEVEITECDPLPDGRFVLELESHRRCRIVKAWDQDGYRVAEVEWVKDIPPQSEQGKADLRELTTSAASFARSWLDRAKEAARQGDRRRLEILLNVESMIPTPQDPERFSFWLATLTDRRPSERLELLRLQDTGERIKRGLIYLRSVERGCRMQ

SEQ ID NO: 100162 - DNA, 1399 bp, Arabidopsis thaliana
  misc_feature (1)..(1399): Ceres Seq. ID no. 13604479
  misc_feature: MA Experiment ID: 20000173 Result: Up-regulated in Transcription
  misc_feature: MA Experiment 20000173 PARAMETER Experiment Name: At_42deg_Heat_P Parameter: Age (day) Value: 14
  misc_feature: MA Experiment 20000173 PARAMETER Experiment Name: At_42deg_Heat_P Parameter: Organism Value: A. thaliana
  misc_feature: MA Experiment 20000173 PARAMETER Experiment Name: At_42deg_Heat_P Parameter: Plant Line Value: WS
  misc_feature: MA Experiment 20000173 PARAMETER Experiment Name: At_42deg_Heat_P Parameter: Temperature (deg C) Value: 42 vs. 22
  misc_feature: MA Experiment 20000173 PARAMETER Experiment Name: At_42deg_Heat_P Parameter: Timepoint (hr) Value: 6
  misc_feature: MA Experiment 20000173 PARAMETER Experiment Name: At_42deg_Heat_P Parameter: Tissue Value: Aerial
  misc_feature: MA Experiment ID: 20000184 Result: Up-regulated in Transcription
  misc_feature: MA Experiment 20000184 PARAMETER Experiment Name: At_Shoots__P Parameter: Age (day) Value: 7
  misc_feature: MA Experiment 20000184 PARAMETER Experiment Name: At_Shoots__P Parameter: Tissue Value: Shoots vs. Whole Plant
  misc_feature: MA Experiment ID: 20000185 Result: Up-regulated in Transcription
  misc_feature: MA Experiment 20000185 PARAMETER Experiment Name: At_Roots__P Parameter: Age (day) Value: 7 vs. 21
  misc_feature: MA Experiment 20000185 PARAMETER Experiment Name: At_Roots__P Parameter: Organism Value: A. thaliana
  misc_feature: MA Experiment 20000185 PARAMETER Experiment Name: At_Roots__P Parameter: Tissue Value: Roots vs. Whole Plant
  misc_feature: MA Experiment ID: 20000227 Result: Up-regulated in Transcription
  misc_feature: MA Experiment 20000227 PARAMETER Experiment Name: At_Root-Tips-vs-Tops_P Parameter: Tissue Value: Root Tips vs. Root Tops
  misc_feature: MA Experiment ID: 20000264 Result: Up-regulated in Transcription
  misc_feature: MA Experiment 20000264 PARAMETER Experiment Name: At_Open_Flower_P Parameter: Age (day) Value: 21
  misc_feature: MA Experiment 20000264 PARAMETER Experiment Name: At_Open_Flower_P Parameter: Plant Line Value: WS
  misc_feature: MA Experiment 20000264 PARAMETER Experiment Name: At_Open_Flower_P Parameter: Tissue Value: Open Flower vs. Whole Plant
  misc_feature: MA Experiment ID: 20000265 Result: Up-regulated in Transcription
  misc_feature: MA Experiment 20000265 PARAMETER Experiment Name: At_Open_Flower_P Parameter: Age (day) Value: 21
  misc_feature: MA Experiment 20000265 PARAMETER Experiment Name: At_Open_Flower_P Parameter: Plant Line Value: WS
  misc_feature: MA Experiment 20000265 PARAMETER Experiment Name: At_Open_Flower_P Parameter: Tissue Value: Closed Flower vs. Whole Plant
  misc_feature: MA Experiment ID: 20000286 Result: Up-regulated in Transcription
  misc_feature: MA Experiment 20000286 PARAMETER Experiment Name: At_Open_Flower_P Parameter: Age (day) Value: 21
  misc_feature: MA Experiment 20000286 PARAMETER Experiment Name: At_Open_Flower_P Parameter: Plant Line Value: WS
  misc_feature: MA Experiment 20000286 PARAMETER Experiment Name: At_Open_Flower_P Parameter: Tissue Value: Half Open vs. Whole Plant
  misc_feature: MA Experiment ID: 20000439 Result: Up-regulated in Transcription
  misc_feature: MA Experiment 20000439 PARAMETER Experiment Name: At_Roots__P Parameter: Age (day) Value: 14 vs. 21
  misc_feature: MA Experiment 20000439 PARAMETER Experiment Name: At_Roots__P Parameter: Organism Value: A. thaliana
  misc_feature: MA Experiment 20000439 PARAMETER Experiment Name: At_Roots__P Parameter: Tissue Value: Roots vs. Whole Plant
  misc_feature: MA Experiment ID: 20000451 Result: Up-regulated in Transcription
  misc_feature: MA Experiment 20000451 PARAMETER Experiment Name: At_CS6879_Shoots-Roots_P Parameter: Age (day) Value: 14
  misc_feature: MA Experiment 20000451 PARAMETER Experiment Name: At_CS6879_Shoots-Roots_P Parameter: Organism Value: A. thaliana
  misc_feature: MA Experiment 20000451 PARAMETER Experiment Name: At_CS6879_Shoots-Roots_P Parameter: Plant Line Value: CS6879 vs. WS
  misc_feature: MA Experiment 20000451 PARAMETER Experiment Name: At_CS6879_Shoots-Roots_P Parameter: Tissue Value: Roots
  misc_feature: MA Experiment ID: 20001451 Result: Down-regulated in Transcription
  misc_feature: MA Experiment 20001451 PARAMETER Experiment Name: At_Far-red-induction_P Parameter: Age (day) Value: 7
  misc_feature: MA Experiment 20001451 PARAMETER Experiment Name: At_Far-red-induction_P Parameter: Light Value: Far-red vs. White
  misc_feature: MA Experiment 20001451 PARAMETER Experiment Name: At_Far-red-induction_P Parameter: Organism Value: A. thaliana
  misc_feature: MA Experiment 20001451 PARAMETER Experiment Name: At_Far-red-induction_P Parameter: Plant Line Value: Columbia
  misc_feature: MA Experiment 20001451 PARAMETER Experiment Name: At_Far-red-induction_P Parameter: Timepoint (hr) Value: 24
  misc_feature: MA Experiment 20001451 PARAMETER Experiment Name: At_Far-red-induction_P Parameter: Tissue Value: Whole Plant
  misc_feature: MA Experiment ID: 20001757 Result: Up-regulated in Transcription
  misc_feature: MA Experiment 20001757 PARAMETER Experiment Name: At_50mM_NH4NO3_L-to-H_P Parameter: Timepoint (hr) Value: 6
  misc_feature: MA Experiment 20001757 PARAMETER Experiment Name: At_50mM_NH4NO3_L-to-H_P Parameter: Tissue Value: Leaf
  misc_feature: MA Experiment 20001757 PARAMETER Experiment Name: At_50mM_NH4NO3_L-to-H_P Parameter: Treatment Value: 50mM NH4NO3 vs 100mM Mannitol
  misc_feature: MA Experiment ID: 20001911 Result: Down-regulated in Transcription
  misc_feature: MA Experiment 20001911 PARAMETER Experiment Name: At_Drought_Reproduction_P Parameter: Age (day) Value: 40
  misc_feature: MA Experiment 20001911 PARAMETER Experiment Name: At_Drought_Reproduction_P Parameter: Organism Value: A. thaliana
  misc_feature: MA Experiment 20001911 PARAMETER Experiment Name: At_Drought_Reproduction_P Parameter: Plant Line Value: WS
  misc_feature: MA Experiment 20001911 PARAMETER Experiment Name: At_Drought_Reproduction_P Parameter: Timepoint (day) Value: 10
  misc_feature: MA Experiment 20001911 PARAMETER Experiment Name: At_Drought_Reproduction_P Parameter: Tissue Value: Flowers
  misc_feature: MA Experiment 20001911 PARAMETER Experiment Name: At_Drought_Reproduction_P Parameter: Treatment Value: Drought vs. No Drought
gcacgaggtaatcctaactatacaaaacacataacaatatggctccttcaacaaaagttctctctttacttctcttatatgtcgtcgtgtcattagcctccggtgatgagtccatcatcaacgaccatctccaacttccatcggacggcaagtggagaaccgatgaagaagtgaggtccatctacttacaatggtccgcagaacacgggaaaactaacaacaacaacaacggtatcatcaacgaccaagacaaaagattcaatattttcaaagacaacttaagattcatcgatttacacaacgaagacaacaagaacgctacttacaagcttggtctcaccaaatttaccgatctcactaacgatgagtaccgcaagttgtacctcggggcaagaactgagcccgcccgccgcatcgctaaggccaagaatgtcaaccagaaatactcagccgctgtaaacggcaaggaggttccagagacggttgattggagacagaaaggagccgttaaccccatcaaagaccaaggaacttgcggaagttgttgggcgttttcgactactgcagcagtagaaggtataaacaagatcgtaacaggagaactcatatctctatcagaacaagaacttgttgactgcgacaaatcctacaatcaaggttgcaacggcggtttaatggactacgcttttcaattcatcatgaaaaatggtggcttaaacactgagaaagattatccttaccgtggattcggcggaaaatgcaattctttcttgaagaattctagagttgtgagtattgatgggtacgaagatgttcctactaaagacgagactgcgttgaagaaagctatttcataccaaccggttagtgtagctattgaagccggtggaagaatttttcaacattaccaatcgggtatttttaccggaagttgtggtacaaatcttgatcacgcggtggttgctgtcgggtacggatcagagaacggtgttgactactggattgtaaggaactcttggggtccacgttggggtgaggaaggttacattagaatggagagaaacttggcagcctccaaatccggtaagtgtgggattgcggttgaagcctcgtacccggttaagtacagcccaaacccggttcgtggaaatactatcagcagtgtttgaaatcaagacgctcgataaacatttgggattcttataactgaatttaatctcgtattgttattattgtttgtatgtatagtatttcaacaacaatttcaaaaattagttgattcatcataaggatataaaatttataaatccttatgtcgatcaatttcttttttattcaaagaaagattgtttgcttgttttatgtattaagagaaatataataaaatgatatatttctt

SEQ ID NO: 100163 - protein, 376 aa, Arabidopsis thaliana
  peptide (1)..(376): Ceres Seq. ID no. 13604480
  misc_feature (145)..(361): Pfam Name: Papain family cysteine protease Pfam Description: Papain family cysteine protease
  misc_feature (1)..(376): Homolog of NCBI NO: 15234557 NR Description: cysteine proteinase [Arabidopsis thaliana]
  misc_feature (1)..(376): Homolog of NCBI NO: 15290508 NR Description: cysteine proteinase [Arabidopsis thaliana]
  misc_feature (47)..(372): Homolog of NCBI NO: 255032 NR Description: COT44=cysteine proteinase homolog [Brassica
  misc_feature (47)..(372): Homolog of NCBI NO: 118127 NR Description: CYSTEINE PROTEINASE COT44 PRECURSOR
  misc_feature (11)..(367): Homolog of NCBI NO: 7435791 NR Description: cysteine proteinase (EC 3.4.22.-) 3 precursor - bean >gi|2511693|emb|CAB17076.1| cysteine proteinase precursor
  misc_feature (7)..(367): Homolog of NCBI NO: 13897890 NR Description: putative cysteine protease [Ipomoea batatas]
  misc_feature (10)..(367): Homolog of NCBI NO: 18422289 NR Description: cysteine proteinase RD21A [Arabidopsis thaliana]
  misc_feature (8)..(367): Homolog of NCBI NO: 14517542 NR Description: F2G19.31/F2G19.31 [Arabidopsis thaliana]
  misc_feature (8)..(367): Homolog of NCBI NO: 18401614 NR Description: cysteine proteinase RD21A [Arabidopsis thaliana]
  misc_feature (4)..(367): Homolog of NCBI NO: 18141283 NR Description: senescence-associated cysteine protease [Brassica
MAPSTKVLSLLLLYVVVSLASGDESIINDHLQLPSDGKWRTDEEVRSIYLQWSAEHGKTNNNNNGIINDQDKRFNIFKDNLRFIDLHNEDNKNATYKLGLTKFTDLTNDEYRKLYLGARTEPARRIAKAKNVNQKYSAAVNGKEVPETVDWRQKGAVNPIKDQGTCGSCWAFSTTAAVEGINKIVTGELISLSEQELVDCDKSYNQGCNGGLMDYAFQFIMKNGGLNTEKDYPYRGFGGKCNSFLKNSRVVSIDGYEDVPTKDETALKKAISYQPVSVAIEAGGRIFQHYQSGIFTGSCGTNLDHAVVAVGYGSENGVDYWIVRNSWGPRWGEEGYIRMERNLAASKSGKCGIAVEASYPVKYSPNPVRGNTISSV

SEQ ID NO: 100164 - DNA, 1336 bp, Arabidopsis thaliana
  misc_feature (1)..(1336): Ceres Seq. ID no. 13604493
  misc_feature: MA Experiment ID: 20000180 Result: Up-regulated in Transcription
  misc_feature: MA Experiment 20000180 PARAMETER Experiment Name: At_Germinating_Seeds_P Parameter: Age (hr) Value: 24 vs. 0
  misc_feature: MA Experiment 20000180 PARAMETER Experiment Name: At_Germinating_Seeds_P Parameter: Tissue Value: Germinating Seeds
  misc_feature: MA Experiment ID: 20000437 Result: Down-regulated in Transcription
  misc_feature: MA Experiment 20000437 PARAMETER Experiment Name: At_Drought_P Parameter: Age (day) Value: 8
  misc_feature: MA Experiment 20000437 PARAMETER Experiment Name: At_Drought_P Parameter: Organism Value: A. thaliana
  misc_feature: MA Experiment 20000437 PARAMETER Experiment Name: At_Drought_P Parameter: Plant Line Value: WS
  misc_feature: MA Experiment 20000437 PARAMETER Experiment Name: At_Drought_P Parameter: Timepoint (hr) Value: 24
  misc_feature: MA Experiment 20000437 PARAMETER Experiment Name: At_Drought_P Parameter: Tissue Value: Whole Plant
  misc_feature: MA Experiment 20000437 PARAMETER Experiment Name: At_Drought_P Parameter: Treatment Value: Drought vs. No Drought
  misc_feature: MA Experiment ID: 20001557 Result: Up-regulated in Transcription
  misc_feature: MA Experiment 20001557 PARAMETER Experiment Name: At_Drought_Soil_Dry_P Parameter: Age (day) Value: 27
  misc_feature: MA Experiment 20001557 PARAMETER Experiment Name: At_Drought_Soil_Dry_P Parameter: Organism Value: A. thaliana
  misc_feature: MA Experiment 20001557 PARAMETER Experiment Name: At_Drought_Soil_Dry_P Parameter: Plant Line Value: WS
  misc_feature: MA Experiment 20001557 PARAMETER Experiment Name: At_Drought_Soil_Dry_P Parameter: Post Timepoint (hr) Value: 3
  misc_feature: MA Experiment 20001557 PARAMETER Experiment Name: At_Drought_Soil_Dry_P Parameter: Post-Treatment Value: Re-Water vs. No Drought
  misc_feature: MA Experiment 20001557 PARAMETER Experiment Name: At_Drought_Soil_Dry_P Parameter: Timepoint (day) Value: 13
  misc_feature: MA Experiment 20001557 PARAMETER Experiment Name: At_Drought_Soil_Dry_P Parameter: Treatment Value: Drought vs. No Drought
  misc_feature: MA Experiment ID: 20001558 Result: Up-regulated in Transcription
  misc_feature: MA Experiment 20001558 PARAMETER Experiment Name: At_Drought_Soil_Dry_P Parameter: Age (day) Value: 27
  misc_feature: MA Experiment 20001558 PARAMETER Experiment Name: At_Drought_Soil_Dry_P Parameter: Organism Value: A. thaliana
  misc_feature: MA Experiment 20001558 PARAMETER Experiment Name: At_Drought_Soil_Dry_P Parameter: Plant Line Value: WS
  misc_feature: MA Experiment 20001558 PARAMETER Experiment Name: At_Drought_Soil_Dry_P Parameter: Post Timepoint (hr) Value: 6
  misc_feature: MA Experiment 20001558 PARAMETER Experiment Name: At_Drought_Soil_Dry_P Parameter: Post-Treatment Value: Re-Water vs. No Drought
  misc_feature: MA Experiment 20001558 PARAMETER Experiment Name: At_Drought_Soil_Dry_P Parameter: Timepoint (day) Value: 13
  misc_feature: MA Experiment 20001558 PARAMETER Experiment Name: At_Drought_Soil_Dry_P Parameter: Treatment Value: Drought vs. No Drought
agttttgatgataaaagccatggctctatcttctgccggcgtcgtctctcatcttcatcctccgtcgttttcttcgtcgtcaggattatccgtcaacagagttctgtttcggaatcggaacgctagtccttgtggtctatctcttccaattctcaatccgtctcggtctgtacttgtttttgctcgtggcaagaatcgaaaaggattcgtgtcttcgtcttcttcgtctccgaagaaaaacaaaaagaaaagtttggatggagctgataatggaggaggtgaggaggaggaggatccatttgaggcattgtttaatcttttagaagaagatttgaagaatgataactcggatgatgaggagataagtgaggaagagttagaggcattagccgatgagttagctcgagcattgggtgttggtgacgatgttgatgacatcgacttgtttggttcagtcactggtgatgttgatgttgatgttgataatgatgatgatgataatgatgatgatgataatgatgatgatgatgatgacagcgaagaagatgaaagaccgactaagctgaagaattggcagcttaaaagactggcttatgcattgaaagctgggcgtcgtaaaactagtattaaaaatctggcagctgaggtttgtcttgacagggcttatgttcttgaattgcttcgtgacccgcctccaaagctgctaatgctaagtgctacactaccagatgaaaaaccgccagtagcagcacctgagaactcctcacctgatccaagtcctgtggaatcattatcagctgaagatgttgtggtcgaacctaaggaaaaagtaaaagatgaagcagttcatgtgatgcaacagagatggtctgctcagaaaagagtgaagaaagctcacattgaaacgctagagaaagtttacagaagatcaaaacgacccactaatgctgtggttagcagcattgttcaagtgaccaatcttccaaggaagcgagttttgaagtggttcgaagataaaagagcagaagacggagttccagataagcgagctccatatcaagctccggtttgatctaatgttaacgttgagatggcaatgatttgtatacttgattctcagaaactcatcaacattgtcgtcaaggacaagtttttttggtgatacgaggagtgtttatagtagtagattctgtccaatggtgtggctggatatgttggactatgaaattttaggatatcttgtattcagtttttagttatttccttgctgagattgtgtcttgtagaaaaccgtttcaactttgtttggtttatggcggctataaagtttaatttt

SEQ ID NO: 100165 - protein, 356 aa, Arabidopsis thaliana
  peptide (1)..(356): Ceres Seq. ID no. 13604494
  misc_feature (144)..(197): Pfam Name: Nucleoplasmin Pfam Description: Nucleoplasmin
  misc_feature (3)..(356): Homolog of NCBI NO: 30683552 NR Description: expressed protein [Arabidopsis thaliana] putative protein [Arabidopsis thaliana]
  misc_feature (7)..(356): Homolog of NCBI NO: 8953389 NR Description: putative protein [Arabidopsis thaliana]
  misc_feature (106)..(353): Homolog of NCBI NO: 29367497 NR Description: unknown [Oryza sativa (japonica cultivar-group)]
  misc_feature (79)..(277): Homolog of NCBI NO: 29367497 NR Description: unknown [Oryza sativa (japonica cultivar-group)]
  misc_feature (63)..(183): Homolog of NCBI NO: 23481405 NR Description: hypothetical protein [Plasmodium yoelii yoelii]
  misc_feature (75)..(187): Homolog of NCBI NO: 34534595 NR Description: unnamed protein product [Homo sapiens]
  misc_feature (81)..(183): Homolog of NCBI NO: 23481405 NR Description: hypothetical protein [Plasmodium yoelii yoelii]
  misc_feature (65)..(183): Homolog of NCBI NO: 23509612 NR Description: hypothetical protein [Plasmodium falciparum 3D7]
  misc_feature (71)..(183): Homolog of NCBI NO: 1945333 NR Description: ORF YGR160w [Saccharomyces cerevisiae]
  misc_feature (27)..(183): Homolog of NCBI NO: 23613441 NR Description: hypothetical protein [Plasmodium falciparum 3D7]
VLMIKAMALSSAGVVSHLHPPSFSSSSGLSVNRVLFRNRNASPCGLSLPILNPSRSVLVFARGKNRKGFVSSSSSSPKKNKKKSLDGADNGGGEEEEDPFEALFNLLEEDLKNDNSDDEEISEEELEALADELARALGVGDDVDDIDLFGSVTGDVDVDVDNDDDDNDDDDNDDDDDDSEEDERPTKLKNWQLKRLAYALKAGRRKTSIKNLAAEVCLDRAYVLELLRDPPPKLLMLSATLPDEKPPVAAPENSSPDPSPVESLSAEDVVVEPKEKVKDEAVHVMQQRWSAQKRVKKAHIETLEKVYRRSKRPTNAVVSSIVQVTNLPRKRVLKWFEDKRAEDGVPDKRAPYQAPV

SEQ ID NO: 100166 - protein, 354 aa, Arabidopsis thaliana
  peptide (1)..(354): Ceres Seq. ID no. 13604495
  misc_feature (142)..(195): Pfam Name: Nucleoplasmin Pfam Description: Nucleoplasmin
  misc_feature (1)..(354): Homolog of NCBI NO: 30683552 NR Description: expressed protein [Arabidopsis thaliana] putative protein [Arabidopsis thaliana]
  misc_feature (5)..(354): Homolog of NCBI NO: 8953389 NR Description: putative protein [Arabidopsis thaliana]
  misc_feature (104)..(351): Homolog of NCBI NO: 29367497 NR Description: unknown [Oryza sativa (japonica cultivar-group)]
  misc_feature (77)..(275): Homolog of NCBI NO: 29367497 NR Description: unknown [Oryza sativa (japonica cultivar-group)]
  misc_feature (61)..(181): Homolog of NCBI NO: 23481405 NR Description: hypothetical protein [Plasmodium yoelii yoelii]
  misc_feature (73)..(185): Homolog of NCBI NO: 34534595 NR Description: unnamed protein product [Homo sapiens]
  misc_feature (79)..(181): Homolog of NCBI NO: 23481405 NR Description: hypothetical protein [Plasmodium yoelii yoelii]
  misc_feature (63)..(181): Homolog of NCBI NO: 23509612 NR Description: hypothetical protein [Plasmodium falciparum 3D7]
  misc_feature (69)..(181): Homolog of NCBI NO: 1945333 NR Description: ORF YGR160w [Saccharomyces cerevisiae]
  misc_feature (25)..(181): Homolog of NCBI NO: 23613441 NR Description: hypothetical protein [Plasmodium falciparum 3D7]
MIKAMALSSAGVVSHLHPPSFSSSSGLSVNRVLFRNRNASPCGLSLPILNPSRSVLVFARGKNRKGFVSSSSSSPKKNKKKSLDGADNGGGEEEEDPFEALFNLLEEDLKNDNSDDEEISEEELEALADELARALGVGDDVDDIDLFGSVTGDVDVDVDNDDDDNDDDDNDDDDDDSEEDERPTKLKNWQLKRLAYALKAGRRKTSIKNLAAEVCLDRAYVLELLRDPPPKLLMLSATLPDEKPPVAAPENSSPDPSPVESLSAEDVVVEPKEKVKDEAVHVMQQRWSAQKRVKKAHIETLEKVYRRSKRPTNAVVSSIVQVTNLPRKRVLKWFEDKRAEDGVPDKRAPYQAPV

SEQ ID NO: 100167 - protein, 350 aa, Arabidopsis thaliana
  peptide (1)..(350): Ceres Seq. ID no. 13604496
  misc_feature (138)..(191): Pfam Name: Nucleoplasmin Pfam Description: Nucleoplasmin
  misc_feature (1)..(350): Homolog of NCBI NO: 30683552 NR Description: expressed protein [Arabidopsis thaliana] putative protein [Arabidopsis thaliana]
  misc_feature (1)..(350): Homolog of NCBI NO: 8953389 NR Description: putative protein [Arabidopsis thaliana]
  misc_feature (100)..(347): Homolog of NCBI NO: 29367497 NR Description: unknown [Oryza sativa (japonica cultivar-group)]
  misc_feature (73)..(271): Homolog of NCBI NO: 29367497 NR Description: unknown [Oryza sativa (japonica cultivar-group)]
  misc_feature (57)..(177): Homolog of NCBI NO: 23481405 NR Description: hypothetical protein [Plasmodium yoelii yoelii]
  misc_feature (69)..(181): Homolog of NCBI NO: 34534595 NR Description: unnamed protein product [Homo sapiens]
  misc_feature (75)..(177): Homolog of NCBI NO: 23481405 NR Description: hypothetical protein [Plasmodium yoelii yoelii]
  misc_feature (59)..(177): Homolog of NCBI NO: 23509612 NR Description: hypothetical protein [Plasmodium falciparum 3D7]
  misc_feature (65)..(177): Homolog of NCBI NO: 1945333 NR Description: ORF YGR160w [Saccharomyces cerevisiae]
  misc_feature (21)..(177): Homolog of NCBI NO: 23613441 NR Description: hypothetical protein [Plasmodium falciparum 3D7]
MALSSAGVVSHLHPPSFSSSSGLSVNRVLFRNRNASPCGLSLPILNPSRSVLVFARGKNRKGFVSSSSSSPKKNKKKSLDGADNGGGEEEEDPFEALFNLLEEDLKNDNSDDEEISEEELEALADELARALGVGDDVDDIDLFGSVTGDVDVDVDNDDDDNDDDDNDDDDDDSEEDERPTKLKNWQLKRLAYALKAGRRKTSIKNLAAEVCLDRAYVLELLRDPPPKLLMLSATLPDEKPPVAAPENSSPDPSPVESLSAEDVVVEPKEKVKDEAVHVMQQRWSAQKRVKKAHIETLEKVYRRSKRPTNAVVSSIVQVTNLPRKRVLKWFEDKRAEDGVPDKRAPYQAPV

SEQ ID NO: 100168 - DNA, 1944 bp, Arabidopsis thaliana
  misc_feature (1)..(1944): Ceres Seq. ID no. 13604501
  misc_feature: MA Experiment ID: 20000315 Result: Down-regulated in Transcription
  misc_feature: MA Experiment 20000315 PARAMETER Experiment Name: At_14day_Shoots-Roots_Sub_P Parameter: Age (day) Value: 14
  misc_feature: MA Experiment 20000315 PARAMETER Experiment Name: At_14day_Shoots-Roots_Sub_P Parameter: Organism Value: A. thaliana
  misc_feature: MA Experiment 20000315 PARAMETER Experiment Name: At_14day_Shoots-Roots_Sub_P Parameter: Plant Line Value: WS
  misc_feature: MA Experiment 20000315 PARAMETER Experiment Name: At_14day_Shoots-Roots_Sub_P Parameter: Tissue Value: Shoots vs. Whole Plant
  misc_feature: MA Experiment ID: 20000328 Result: Down-regulated in Transcription
  misc_feature: MA Experiment 20000328 PARAMETER Experiment Name: At_42deg_Heat_Sub_P Parameter: Age (day) Value: 14
  misc_feature: MA Experiment 20000328 PARAMETER Experiment Name: At_42deg_Heat_Sub_P Parameter: Organism Value: A. thaliana
  misc_feature: MA Experiment 20000328 PARAMETER Experiment Name: At_42deg_Heat_Sub_P Parameter: Plant Line Value: WS
  misc_feature: MA Experiment 20000328 PARAMETER Experiment Name: At_42deg_Heat_Sub_P Parameter: Temperature (deg C) Value: 42 vs. 22
  misc_feature: MA Experiment 20000328 PARAMETER Experiment Name: At_42deg_Heat_Sub_P Parameter: Timepoint (hr) Value: 6
  misc_feature: MA Experiment 20000328 PARAMETER Experiment Name: At_42deg_Heat_Sub_P Parameter: Tissue Value: Aerial
  misc_feature: MA Experiment ID: 20000355 Result: Down-regulated in Transcription
  misc_feature: MA Experiment 20000355 PARAMETER Experiment Name: At_Siliques_Sub_P Parameter: Age (day) Value: 21
  misc_feature: MA Experiment 20000355 PARAMETER Experiment Name: At_Siliques_Sub_P Parameter: Organism Value: A. thaliana
  misc_feature: MA Experiment 20000355 PARAMETER Experiment Name: At_Siliques_Sub_P Parameter: Plant Line Value: WS
  misc_feature: MA Experiment 20000355 PARAMETER Experiment Name: At_Siliques_Sub_P Parameter: Tissue Value: Less Than 5mm Siliques vs. Whole Plant
  misc_feature: MA Experiment ID: 20000440 Result: Down-regulated in Transcription
  misc_feature: MA Experiment 20000440 PARAMETER Experiment Name: At_Closed-Flower__Sub_P Parameter: Tissue Value: Closed Flower vs. Whole Plant
gaacaaaatttaaagccatcgattgccttgtcttgtctctttgcctgttaattatttgtctgaatcttcctctcctgatgatcactccaagtaacttcaaagaaacgctcagattcgacagttctatatatcaacaaacatcatctcaagctcttacctgatatctctgttttgatggatcaaagtcgggttttgcggtttataggccaagtggaaacctgtagagttgttcttctcatggttctggttgttgccttcgtttcaggccttcagtattttgagctctctccagtactactatctattgtttcacctggaaacagcactatttctgaattcagaaaatccaatgatacgactaaaagtgctgaaaatgaaacgtttcttgcatctcaagaagcatccaccgggcttaaaccgtataacagaactacagaggtattgaagagttctgagcacaagtttctgaatgattctcacaaaatagaagcttctggacaacgtagaagaagcaatgaaactgcaagttctctgcatcctcttcaaccaaagattcctcaaatccgcaagaaatatccccataggagcataacaaagccaccatcaattgtcatatcaataaagcagatgaacaatatgatattgaagcggcataatgatccaaaaaattcacttgcacctctctggggatcaaaagtggaccaagagcttaaaactgcaagagacaagatcaagaaagcggctttggtcaagaaagatgatactctttacgcacctctctaccacaacatatccatcttcaaaaggagctatgagctaatggaacaaactctgaaagtgtatgtctactcggaaggggatagaccaattttccatcagcctgaggcaataatggaagggatttacgcatcagaaggatggtttatgaaactaatggagagtagccatagattcttgacaaaagatcccaccaaagctcatttattctacatacctttcagttcaagaattcttcaacagaaactttacgttcatgactctcacagtcgtaataatcttgttaaatatcttggaaactacattgatctcatcgcttccaactacccttcctggaatagaacttgtggctccgatcatttcttcaccgcttgccatgactgggctccaaccgagactaggggaccgtacataaactgcatcagagcactctgtaacgccgatgttggcatagactttgtggtcggaaaagatgtttctttgccggaaactaaagtctcttctttgcaaaatccaaacggaaaaattggaggtagccgcccttccaagcgaaccatcctcgcttttttcgccgggagcttgcacggttacgttagacccatcttgcttaaccaatggtcatcgagacctgaacaagatatgaagatctttaatcgtatcgatcataaatcatacatccgttacatgaaacgcagcagattctgcgtttgcgctaaaggttacgaggttaatagccctagagtggttgagtcgattttgtacggttgtgttccggtgattatctctgataactttgtgccaccgtttcttgagattctgaattgggaatctttcgcagtgtttgtgccggagaaagagatcccgaatctaaggaagattctgatatcgattccggtgaggagatacgtggagatgcaaaagagggttttgaaggttcaaaaacatttcatgtggcatgatggtgaaccggttcggtatgatatatttcatatgattcttcattcggtttggtataaccgagtttttcaaacgttttagccagattaatcaggtttgacaagggttttggtttggcctttgctacttgccaataattaactacgtctccggaagattgtattttgtagattactgattcatattagccaattggacttgattacaaat

SEQ ID NO: 100169 - protein, 546 aa, Arabidopsis thaliana
  peptide (1)..(546): Ceres Seq. ID no. 13604502
  misc_feature (222)..(510): Pfam Name: Exostosin family Pfam Description: Exostosin family
  misc_feature (1)..(546): Homolog of NCBI NO: 15239118 NR Description: expressed protein [Arabidopsis thaliana]
  misc_feature (1)..(546): Homolog of NCBI NO: 26450497 NR Description: unknown protein [Arabidopsis thaliana]
  misc_feature (66)..(544): Homolog of NCBI NO: 15239502 NR Description: expressed protein [Arabidopsis thaliana]
  misc_feature (146)..(544): Homolog of NCBI NO: 15233924 NR Description: expressed protein [Arabidopsis thaliana]
  misc_feature (142)..(544): Homolog of NCBI NO: 15241150 NR Description: expressed protein [Arabidopsis thaliana]
  misc_feature (21)..(542): Homolog of NCBI NO: 9758523 NR Description: contains similarity to limonene
  misc_feature (35)..(544): Homolog of NCBI NO: 30683790 NR Description: expressed protein [Arabidopsis thaliana] unknown protein [Arabidopsis thaliana]
  misc_feature (163)..(544): Homolog of NCBI NO: 34911614 NR Description: limonene cyclase-like protein [Oryza sativa
  misc_feature (21)..(524): Homolog of NCBI NO: 15239475 NR Description: hypothetical protein [Arabidopsis thaliana]
  misc_feature (131)..(544): Homolog of NCBI NO: 7488129 NR Description: probable limonene cyclase - Arabidopsis thaliana limonene cyclase like protein [Arabidopsis thaliana]
MDQSRVLRFIGQVETCRVVLLMVLVVAFVSGLQYFELSPVLLSIVSPGNSTISEFRKSNDTTKSAENETFLASQEASTGLKPYNRTTEVLKSSEHKFLNDSHKIEASGQRRRSNETASSLHPLQPKIPQIRKKYPHRSITKPPSIVISIKQMNNMILKRHNDPKNSLAPLWGSKVDQELKTARDKIKKAALVKKDDTLYAPLYHNISIFKRSYELMEQTLKVYVYSEGDRPIFHQPEAIMEGIYASEGWFMKLMESSHRFLTKDPTKAHLFYIPFSSRILQQKLYVHDSHSRNNLVKYLGNYIDLIASNYPSWNRTCGSDHFFTACHDWAPTETRGPYINCIRALCNADVGIDFVVGKDVSLPETKVSSLQNPNGKIGGSRPSKRTILAFFAGSLHGYVRPILLNQWSSRPEQDMKIFNRIDHKSYIRYMKRSRFCVCAKGYEVNSPRVVESILYGCVPVIISDNFVPPFLEILNWESFAVFVPEKEIPNLRKILISIPVRRYVEMQKRVLKVQKHFMWHDGEPVRYDIFHMILHSVWYNRVFQTF

SEQ ID NO: 100170 - protein, 525 aa, Arabidopsis thaliana
  peptide (1)..(525): Ceres Seq. ID no. 13604503
  misc_feature (201)..(489): Pfam Name: Exostosin family Pfam Description: Exostosin family
  misc_feature (1)..(525): Homolog of NCBI NO: 15239118 NR Description: expressed protein [Arabidopsis thaliana]
  misc_feature (1)..(525): Homolog of NCBI NO: 26450497 NR Description: unknown protein [Arabidopsis thaliana]
  misc_feature (45)..(523): Homolog of NCBI NO: 15239502 NR Description: expressed protein [Arabidopsis thaliana]
  misc_feature (125)..(523): Homolog of NCBI NO: 15233924 NR Description: expressed protein [Arabidopsis thaliana]
  misc_feature (121)..(523): Homolog of NCBI NO: 15241150 NR Description: expressed protein [Arabidopsis thaliana]
  misc_feature (1)..(521): Homolog of NCBI NO: 9758523 NR Description: contains similarity to limonene
  misc_feature (14)..(523): Homolog of NCBI NO: 30683790 NR Description: expressed protein [Arabidopsis thaliana] unknown protein [Arabidopsis thaliana]
  misc_feature (142)..(523): Homolog of NCBI NO: 34911614 NR Description: limonene cyclase-like protein [Oryza sativa
  misc_feature (1)..(503): Homolog of NCBI NO: 15239475 NR Description: hypothetical protein [Arabidopsis thaliana]
  misc_feature (110)..(523): Homolog of NCBI NO: 7488129 NR Description: probable limonene cyclase - Arabidopsis thaliana limonene cyclase like protein [Arabidopsis thaliana]
MVLVVAFVSGLQYFELSPVLLSIVSPGNSTISEFRKSNDTTKSAENETFLASQEASTGLKPYNRTTEVLKSSEHKFLNDSHKIEASGQRRRSNETASSLHPLQPKIPQIRKKYPHRSITKPPSIVISIKQMNNMILKRHNDPKNSLAPLWGSKVDQELKTARDKIKKAALVKKDDTLYAPLYHNISIFKRSYELMEQTLKVYVYSEGDRPIFHQPEAIMEGIYASEGWFMKLMESSHRFLTKDPTKAHLFYIPFSSRILQQKLYVHDSHSRNNLVKYLGNYIDLIASNYPSWNRTCGSDHFFTACHDWAPTETRGPYINCIRALCNADVGIDFVVGKDVSLPETKVSSLQNPNGKIGGSRPSKRTILAFFAGSLHGYVRPILLNQWSSRPEQDMKIFNRIDHKSYIRYMKRSRFCVCAKGYEVNSPRVVESILYGCVPVIISDNFVPPFLEILNWESFAVFVPEKEIPNLRKILISIPVRRYVEMQKRVLKVQKHFMWHDGEPVRYDIFHMILHSVWYNRVFQTF

SEQ ID NO: 100171 - protein, 395 aa, Arabidopsis thaliana
  peptide (1)..(395): Ceres Seq. ID no. 13604504
  misc_feature (71)..(359): Pfam Name: Exostosin family Pfam Description: Exostosin family
  misc_feature (1)..(395): Homolog of NCBI NO: 15239118 NR Description: expressed protein [Arabidopsis thaliana]
  misc_feature (1)..(395): Homolog of NCBI NO: 26450497 NR Description: unknown protein [Arabidopsis thaliana]
  misc_feature (1)..(393): Homolog of NCBI NO: 15239502 NR Description: expressed protein [Arabidopsis thaliana]
  misc_feature (1)..(393): Homolog of NCBI NO: 15233924 NR Description: expressed protein [Arabidopsis thaliana]
  misc_feature (1)..(393): Homolog of NCBI NO: 15241150 NR Description: expressed protein [Arabidopsis thaliana]
  misc_feature (1)..(391): Homolog of NCBI NO: 9758523 NR Description: contains similarity to limonene
  misc_feature (1)..(393): Homolog of NCBI NO: 30683790 NR Description: expressed protein [Arabidopsis thaliana] unknown protein [Arabidopsis thaliana]
  misc_feature (12)..(393): Homolog of NCBI NO: 34911614 NR Description: limonene cyclase-like protein [Oryza sativa
  misc_feature (1)..(373): Homolog of NCBI NO: 15239475 NR Description: hypothetical protein [Arabidopsis thaliana]
  misc_feature (1)..(393): Homolog of NCBI NO: 7488129 NR Description: probable limonene cyclase - Arabidopsis thaliana limonene cyclase like protein [Arabidopsis thaliana]
MNNMILKRHNDPKNSLAPLWGSKVDQELKTARDKIKKAALVKKDDTLYAPLYHNISIFKRSYELMEQTLKVYVYSEGDRPIFHQPEAIMEGIYASEGWFMKLMESSHRFLTKDPTKAHLFYIPFSSRILQQKLYVHDSHSRNNLVKYLGNYIDLIASNYPSWNRTCGSDHFFTACHDWAPTETRGPYINCIRALCNADVGIDFVVGKDVSLPETKVSSLQNPNGKIGGSRPSKRTILAFFAGSLHGYVRPILLNQWSSRPEQDMKIFNRIDHKSYIRYMKRSRFCVCAKGYEVNSPRVVESILYGCVPVIISDNFVPPFLEILNWESFAVFVPEKEIPNLRKILISIPVRRYVEMQKRVLKVQKHFMWHDGEPVRYDIFHMILHSVWYNRVFQTF

SEQ ID NO: 100172 - DNA, 1644 bp, Arabidopsis thaliana
  misc_feature (1)..(1644): Ceres Seq. ID no. 13604533
  misc_feature: MA Experiment ID: 20000314 Result: Up-regulated in Transcription
  misc_feature: MA Experiment 20000314 PARAMETER Experiment Name: At_14day_Shoots-Roots_Sub_P Parameter: Age (day) Value: 14
  misc_feature: MA Experiment 20000314 PARAMETER Experiment Name: At_14day_Shoots-Roots_Sub_P Parameter: Organism Value: A. thaliana
  misc_feature: MA Experiment 20000314 PARAMETER Experiment Name: At_14day_Shoots-Roots_Sub_P Parameter: Plant Line Value: WS
  misc_feature: MA Experiment 20000314 PARAMETER Experiment Name: At_14day_Shoots-Roots_Sub_P Parameter: Tissue Value: Roots vs. Whole Plant
  misc_feature: MA Experiment ID: 20000315 Result: Up-regulated in Transcription
  misc_feature: MA Experiment 20000315 PARAMETER Experiment Name: At_14day_Shoots-Roots_Sub_P Parameter: Age (day) Value: 14
  misc_feature: MA Experiment 20000315 PARAMETER Experiment Name: At_14day_Shoots-Roots_Sub_P Parameter: Organism Value: A. thaliana
  misc_feature: MA Experiment 20000315 PARAMETER Experiment Name: At_14day_Shoots-Roots_Sub_P Parameter: Plant Line Value: WS
  misc_feature: MA Experiment 20000315 PARAMETER Experiment Name: At_14day_Shoots-Roots_Sub_P Parameter: Tissue Value: Shoots vs. Whole Plant
aaggttcttcgttgacatactattctctgttgtagcaacactaagaagaagcagagaaaatgagaaaccttagcttcatcgtcttatttctattgaccctcttcttcattcatcatttggttgatgcttctttgctagtgaagtctcttcctggttttgaaggtcctcttccttttgagctcgagactggatatgtgagtattggtgaatctggagatgttgagctcttttactactttgtgaaatcagagaggaatccagaaaatgatcctctcatgatttggctcactggtggacctggctgcagctccatctgtggattgctcttcgcaaacggtcctttagcttttaaaggggatgagtataatgggacagtacctcctctagagttgacatctttttcatggacaaaggtggctaacattttatatttggaagctcctgctggctctggatactcttatgcgaaaactcggcgtgcttttgagtcgagcgacaccaaacaaatgcaccaaattgatcaatttcttaggagttggtttgtgaaacacccggagtttatatcgaatcctttttacgttggtggagattcatattccgggaaaattgttccaggagctgtgcaacaaatttcacttggaaatgagaagggcctcacaccactcataaatattcagggttatgttcttggaaaccctgtgacagataaaaacattgaaactaactatagagttccatttgctcatgggatgggacttatttcagatgagctctttgagtcacttgaaagaagttgtggaggcaaattcttcaacgtagacccaagtaatgcaagatgctcaaataatcttcaagcttatgatcattgtatgtcagagatatactcagagcatattttgttacgaaactgcaaagtagattacgtcttggcagacacaccaaacatcagaaccgatagaagaagagtaatgaaggaattttcagtaaacgattcatcatcattgccacctcctagctgctttacttataggtattttctgtctgccttttgggcaaacgatgaaaatgtacgcagagctctaggcgtgaaaaaggtaggaaaatggaaccgatgcaacagccaaaacataccatatacatttgagattttcaatgcagttccttatcacgtaaacaatagtcttaaaggcttccgctctctcatctacagtggtgatcatgattctatggtaccattttcttcaactcaagcatggatcagagctctcaactattccattgttgatgactggagaccttggatgatgagtagcaatcaagtcgcaggctatacaaggacttacgcaaacaagatgacatttgcaaccatcaagggaggaggacacacagcggagtatactccagatcaatgctctcttatgttcagaagatggattgatggagaacctctctaaagattctcactcgcttctctctctttctctctttgttgttgttacagtttaagactaatgttcagtgaattgtaattttgccacatgctattctgtgaaatcttcaatgattttgtgttgttgtagaactctaaagtctaatcagaaaggctctgtttcatagcaagtaacagaccctgtttcatattcc

SEQ ID NO: 100173 - protein, 464 aa, Arabidopsis thaliana
  peptide (1)..(464): Ceres Seq. ID no. 13604534
  misc_feature (31)..(307): Pfam Name: Serine carboxypeptidase Pfam Description: Serine carboxypeptidase
  misc_feature (1)..(464): Homolog of NCBI NO: 15418807 NR Description: sinapoylglucose:choline sinapoyltransferase
  misc_feature (1)..(464): Homolog of NCBI NO: 30682773 NR Description: serine carboxypeptidase -related [Arabidopsis >gi|17380718|gb|AAL36189.1| putative carboxypeptidase thaliana] >gi|20259065|gb|AAM14248.1| putative carboxypeptidase
  misc_feature (1)..(307): Homolog of NCBI NO: 9758992 NR Description: serine carboxypeptidase [Arabidopsis thaliana]
  misc_feature (301)..(464): Homolog of NCBI NO: 9758992 NR Description: serine carboxypeptidase [Arabidopsis thaliana]
  misc_feature (1)..(269): Homolog of NCBI NO: 11357219 NR Description: carboxypeptidase-like protein - Arabidopsis
  misc_feature (322)..(423): Homolog of NCBI NO: 11357219 NR Description: carboxypeptidase-like protein - Arabidopsis
  misc_feature (4)..(284): Homolog of NCBI NO: 15227773 NR Description: serine carboxypeptidase -related [Arabidopsis
  misc_feature (318)..(464): Homolog of NCBI NO: 15227773 NR Description: serine carboxypeptidase -related [Arabidopsis
  misc_feature (4)..(289): Homolog of NCBI NO: 30681900 NR Description: serine carboxypeptidase -related [Arabidopsis
  misc_feature (311)..(464): Homolog of NCBI NO: 30681900 NR Description: serine carboxypeptidase -related [Arabidopsis
MRNLSFIVLFLLTLFFIHHLVDASLLVKSLPGFEGPLPFELETGYVSIGESGDVELFYYFVKSERNPENDPLMIWLTGGPGCSSICGLLFANGPLAFKGDEYNGTVPPLELTSFSWTKVANILYLEAPAGSGYSYAKTRRAFESSDTKQMHQIDQFLRSWFVKHPEFISNPFYVGGDSYSGKIVPGAVQQISLGNEKGLTPLINIQGYVLGNPVTDKNIETNYRVPFAHGMGLISDELFESLERSCGGKFFNVDPSNARCSNNLQAYDHCMSEIYSEHILLRNCKVDYVLADTPNIRTDRRRVMKEFSVNDSSSLPPPSCFTYRYFLSAFWANDENVRRALGVKKVGKWNRCNSQNIPYTFEIFNAVPYHVNNSLKGFRSLIYSGDHDSMVPFSSTQAWIRALNYSIVDDWRPWMMSSNQVAGYTRTYANKMTFATIKGGGHTAEYTPDQCSLMFRRWIDGEPL

SEQ ID NO: 100174 - protein, 392 aa, Arabidopsis thaliana
  peptide (1)..(392): Ceres Seq. ID no. 13604535
  misc_feature (1)..(235): Pfam Name: Serine carboxypeptidase Pfam Description: Serine carboxypeptidase
  misc_feature (1)..(392): Homolog of NCBI NO: 15418807 NR Description: sinapoylglucose:choline sinapoyltransferase
  misc_feature (1)..(392): Homolog of NCBI NO: 30682773 NR Description: serine carboxypeptidase -related [Arabidopsis >gi|17380718|gb|AAL36189.1| putative carboxypeptidase thaliana] >gi|20259065|gb|AAM14248.1| putative carboxypeptidase
  misc_feature (1)..(235): Homolog of NCBI NO: 9758992 NR Description: serine carboxypeptidase [Arabidopsis thaliana]
  misc_feature (229)..(392): Homolog of NCBI NO: 9758992 NR Description: serine carboxypeptidase [Arabidopsis thaliana]
  misc_feature (1)..(197): Homolog of NCBI NO: 11357219 NR Description: carboxypeptidase-like protein - Arabidopsis
  misc_feature (250)..(351): Homolog of NCBI NO: 11357219 NR Description: carboxypeptidase-like protein - Arabidopsis
  misc_feature (1)..(212): Homolog of NCBI NO: 15227773 NR Description: serine carboxypeptidase -related [Arabidopsis
  misc_feature (246)..(392): Homolog of NCBI NO: 15227773 NR Description: serine carboxypeptidase -related [Arabidopsis
  misc_feature (1)..(217): Homolog of NCBI NO: 30681900 NR Description: serine carboxypeptidase -related [Arabidopsis
  misc_feature (239)..(392): Homolog of NCBI NO: 30681900 NR Description: serine carboxypeptidase -related [Arabidopsis
MIWLTGGPGCSSICGLLFANGPLAFKGDEYNGTVPPLELTSFSWTKVANILYLEAPAGSGYSYAKTRRAFESSDTKQMHQIDQFLRSWFVKHPEFISNPFYVGGDSYSGKIVPGAVQQISLGNEKGLTPLINIQGYVLGNPVTDKNIETNYRVPFAHGMGLISDELFESLERSCGGKFFNVDPSNARCSNNLQAYDHCMSEIYSEHILLRNCKVDYVLADTPNIRTDRRRVMKEFSVNDSSSLPPPSCFTYRYFLSAFWANDENVRRALGVKKVGKWNRCNSQNIPYTFEIFNAVPYHVNNSLKGFRSLIYSGDHDSMVPFSSTQAWIRALNYSIVDDWRPWMMSSNQVAGYTRTYANKMTFATIKGGGHTAEYTPDQCSLMFRRWIDGEPL

SEQ ID NO: 100175 - protein, 315 aa, Arabidopsis thaliana
  peptide (1)..(315): Ceres Seq. ID no. 13604536
  misc_feature (1)..(158): Pfam Name: Serine carboxypeptidase Pfam Description: Serine carboxypeptidase
  misc_feature (1)..(315): Homolog of NCBI NO: 15418807 NR Description: sinapoylglucose:choline sinapoyltransferase
  misc_feature (1)..(315): Homolog of NCBI NO: 30682773 NR Description: serine carboxypeptidase -related [Arabidopsis >gi|17380718|gb|AAL36189.1| putative carboxypeptidase thaliana] >gi|20259065|gb|AAM14248.1| putative carboxypeptidase
  misc_feature (1)..(158): Homolog of NCBI NO: 9758992 NR Description: serine carboxypeptidase [Arabidopsis thaliana]
  misc_feature (152)..(315): Homolog of NCBI NO: 9758992 NR Description: serine carboxypeptidase [Arabidopsis thaliana]
  misc_feature (1)..(120): Homolog of NCBI NO: 11357219 NR Description: carboxypeptidase-like protein - Arabidopsis
  misc_feature (173)..(274): Homolog of NCBI NO: 11357219 NR Description: carboxypeptidase-like protein - Arabidopsis
  misc_feature (1)..(135): Homolog of NCBI NO: 15227773 NR Description: serine carboxypeptidase -related [Arabidopsis
  misc_feature (169)..(315): Homolog of NCBI NO: 15227773 NR Description: serine carboxypeptidase -related [Arabidopsis
  misc_feature (1)..(140): Homolog of NCBI NO: 30681900 NR Description: serine carboxypeptidase -related [Arabidopsis
  misc_feature (162)..(315): Homolog of NCBI NO: 30681900 NR Description: serine carboxypeptidase -related [Arabidopsis
MHQIDQFLRSWFVKHPEFISNPFYVGGDSYSGKIVPGAVQQISLGNEKGLTPLINIQGYVLGNPVTDKNIETNYRVPFAHGMGLISDELFESLERSCGGKFFNVDPSNARCSNNLQAYDHCMSEIYSEHILLRNCKVDYVLADTPNIRTDRRRVMKEFSVNDSSSLPPPSCFTYRYFLSAFWANDENVRRALGVKKVGKWNRCNSQNIPYTFEIFNAVPYHVNNSLKGFRSLIYSGDHDSMVPFSSTQAWIRALNYSIVDDWRPWMMSSNQVAGYTRTYANKMTFATIKGGGHTAEYTPDQCSLMFRRWIDGEPL

SEQ ID NO: 100176 - DNA, 3498 bp, Arabidopsis thaliana
  misc_feature (1)..(3498): Ceres Seq. ID no. 13604537
  misc_feature: MA Experiment ID: 20000307 Result: Up-regulated in Transcription
  misc_feature: MA Experiment 20000307 PARAMETER Experiment Name: At_Germinating_Seeds_Sub_P Parameter: Age (hr) Value: 24 vs. 0
  misc_feature: MA Experiment 20000307 PARAMETER Experiment Name: At_Germinating_Seeds_Sub_P Parameter: Organism Value: A. thaliana
  misc_feature: MA Experiment 20000307 PARAMETER Experiment Name: At_Germinating_Seeds_Sub_P Parameter: Plant Line Value: WS
  misc_feature: MA Experiment 20000307 PARAMETER Experiment Name: At_Germinating_Seeds_Sub_P Parameter: Tissue Value: Germinating Seeds
  misc_feature: MA Experiment ID: 20000327 Result: Down-regulated in Transcription
  misc_feature: MA Experiment 20000327 PARAMETER Experiment Name: At_42deg_Heat_Sub_P Parameter: Age (day) Value: 14
  misc_feature: MA Experiment 20000327 PARAMETER Experiment Name: At_42deg_Heat_Sub_P Parameter: Organism Value: A. thaliana
  misc_feature: MA Experiment 20000327 PARAMETER Experiment Name: At_42deg_Heat_Sub_P Parameter: Plant Line Value: WS
  misc_feature: MA Experiment 20000327 PARAMETER Experiment Name: At_42deg_Heat_Sub_P Parameter: Temperature (deg C) Value: 42 vs. 22
  misc_feature: MA Experiment 20000327 PARAMETER Experiment Name: At_42deg_Heat_Sub_P Parameter: Timepoint (hr) Value: 1
  misc_feature: MA Experiment 20000327 PARAMETER Experiment Name: At_42deg_Heat_Sub_P Parameter: Tissue Value: Aerial
  misc_feature: MA Experiment ID: 20000329 Result: Up-regulated in Transcription
  misc_feature: MA Experiment 20000329 PARAMETER Experiment Name: At_4deg_Cold_Sub_P Parameter: Age (day) Value: 14
  misc_feature: MA Experiment 20000329 PARAMETER Experiment Name: At_4deg_Cold_Sub_P Parameter: Organism Value: A. thaliana
  misc_feature: MA Experiment 20000329 PARAMETER Experiment Name: At_4deg_Cold_Sub_P Parameter: Plant Line Value: WS
  misc_feature: MA Experiment 20000329 PARAMETER Experiment Name: At_4deg_Cold_Sub_P Parameter: Temperature (deg C) Value: 4 vs. 22
  misc_feature: MA Experiment 20000329 PARAMETER Experiment Name: At_4deg_Cold_Sub_P Parameter: Timepoint (hr) Value: 6
  misc_feature: MA Experiment 20000329 PARAMETER Experiment Name: At_4deg_Cold_Sub_P Parameter: Tissue Value: Aerial
atgaatactggtggtcggctcatcgctggttctcacaataggaatgagttcgtgttgattaatgcagacgagagtgccagaattagatcagtggaagaactaagtggacaaacatgtcaaatctgtggagatgagattgagctaagtgttgatggagagtcttttgtggcatgtaatgaatgtgctttccctgtctgtagaccttgctatgagtatgagagacgagaaggaaaccaatcttgtcctcagtgcaaaactcgttacaagcgcatcaaaggaagtccaagggttgaaggagatgaggaggatgatggaattgatgatcttgattttgagtttgattatagtaggagtggccttgaatctgaaactttctctcgccgcaactcggagtttgatttggcctctgctccacctggctcacagattcctttgttaacttatggagaggaggacgttgaaatttcttctgatagtcatgctctcattgtttctccatcacctggccatatccatagggttcatcaacctcattttcctgaccccgctgcacatccaagaccaatggtacctcagaaagaccttgcggtctatggatatggaagtgttgcgtggaaggatcgtatggaggagtggaagagaaagcagaacgaaaaatatcaggtggttaaacatgatggagattctagtcttggagacggagatgatgctgatattcctatgatggatgagggaaggcagcctttgtctaggaaagtaccgataaagtcgagcaaaataaatccgtacaggatgctaattgttctgcgtcttgtgattctcggtctctttttccattaccgtattcttcaccccgtcaatgatgcttacgccttgtggctaatatctgtgatatgcgaaatatggtttgcggtttcatgggttcttgatcagttccctaaatggtatcctatagaaagagagacatacttggacaggctctcattgaggtacgaaaaagaagggaaaccatctgaactagctggtgttgatgtttttgtgagtacagtggatccgatgaaagagcctccgcttattacagcaaacactgttctgtctattcttgcggttgattatccggtagacagagttgcctgttatgtttctgatgatggtgctgctatgcttacttttgaagccctttcagaaacagcagagtttgctaggaaatgggttcctttctgtaagaaatacactatcgagccacgagctcccgaatggtatttttgccacaagatggattatttaaagaataaagttcaccctgcatttgttagggaacgccgagccatgaagagagattatgaagaattcaaggttaagatcaatgctttagttgcgactgcacagaaagtgcctgaagaaggttggactatgcaagacggtactccttggcccggtaataacgtgcgagatcaccctggcatgatccaggtattccttggaaataacggtgtccgcgatgtagaaaacaacgagttgcctcggctggtttatgtttctcgtgagaagagacccggatttgaccatcacaagaaggctggagccatgaactccctgatacgagtctctggagttctatcaaatgctccttatcttctaaatgtcgattgtgatcactacatcaataatagcaaagctcttagagaagcaatgtgtttcatgatggatcctcagtcgggaaagaaaatttgttatgttcaattccctcaaagattcgatgggattgataaaagtgacagatactctaatcgtaatgttgtattcttcgatattaatatgaaaggtttggatggattacaagggcctatatacgtgggaaccgggtgtgtttttaggagacaagcactttatggatttgatgcgccaaaaaagaagaagactaagcgtatgacttgcaattgctggcctaagtggtgtttgttttgttgtggtctaagaaagaatcgtaagtcaaagacaacggataagaaaaagaagaacagggaagcctcaaagcagatacacgcgctagaaaatatcgaagagggcaccaaaggcactaatgatgcggcgaaatcaccagaggcggcacaattgaagttggagaagaagtttggacagtctcctgtttttgttgcgtctgctggtatggagaatggtgggcttgctaggaatgcgagtccagcttctctgcttagagaagccatccaagtcattagttgtggatacgaagataaaaccgaatggggaaaagagattgggtggatctacggttctgtcaccgaggatatccttacgggtttcaagatgcattctcatggctggagatcggtttactgtacacctaagataccggcctttaaaggatcagcacctatcaatctttctgaccgtcttcatcaagttcttcggtgggcgctcgggtctgttgagattttcttgagcagacattgtcctatttggtatggttatggaggtggtttgaaatggcttgagagattgtcttacatcaactctgtggtttatccatggacctctattccactccttgtttactgttctctcccagctatctgtcttctcaccggaaaattcatcgtccctgagattagcaactatgcaagtatcctcttcatggcacttttcgggtcgattgctgtaacgggcattctcgagatgcaatggggtaaagtagggatcgatgattggtggagaaacgaacagttttgggtgattggaggtgtttcagctcatctctttgctctcttccaaggtctcctaaaggttttagccggtgttgagacaaacttcacagttacatctaaagcagcagatgatggtgaattctctgagctttacatcttcaaatggacatcactcttgatccctccaaccacactactcatcataaacgtaatcggagtcattgtgggaatatctgatgcgatcagtaacggatatgactcgtggggtcctcttttcggaagattgttctttgccttttgggtcatcctccatctatatcctttccttaaaggtctgcttgggaaacaagacagaatgcctacaatcattcttgtctggtcgatccttctcgcctctatccttacgcttctttgggtacgagtcaatccgtttgtggcgaaaggcggtcctatcctcgagatatgtggcttggactgcctttgattgaactcaagagttgatatgatacgtaacagattttccacagaggtaagtaaagaggaaagtgtcgctcacacatttgtttgtttactgtgttaagatccttgttagattgaacacaaaaagaaaagaaggatttagatatataatgttattcttttggaaggtgttgtaatgtagatatagaagaaggtggtgtcgtctatttattcttgttatttttttttgagtgaaagtgaaacagaaaagagaggtgttatcttattaattctttcattgaaatattttgag

SEQ ID NO: 100177 - protein, 1069 aa, Arabidopsis thaliana
  peptide (1)..(1069): Ceres Seq. ID no. 13604538
  misc_feature (512)..(634): Pfam Name: Glycosyl transferase Pfam Description: Glycosyl transferase
  misc_feature (464)..(1052): Homolog of NCBI NO: 15237873 NR Description: cellulose synthase family [Arabidopsis thaliana]
  misc_feature (507)..(1052): Homolog of NCBI NO: 15217853 NR Description: cellulose synthase family [Arabidopsis thaliana]
  misc_feature (185)..(458): Homolog of NCBI NO: 15217853 NR Description: cellulose synthase family [Arabidopsis thaliana]
  misc_feature (198)..(458): Homolog of NCBI NO: 15237873 NR Description: cellulose synthase family [Arabidopsis thaliana]
  misc_feature (32)..(104): Homolog of NCBI NO: 15217853 NR Description: cellulose synthase family [Arabidopsis thaliana]
  misc_feature (36)..(98): Homolog of NCBI NO: 15237873 NR Description: cellulose synthase family [Arabidopsis thaliana]
  misc_feature (464)..(1052): Homolog of NCBI NO: 15228448 NR Description: cellulose synthase family [Arabidopsis thaliana] putative cellulose synthase catalytic subunit [Arabidopsis
  misc_feature (241)..(458): Homolog of NCBI NO: 15228448 NR Description: cellulose synthase family [Arabidopsis thaliana] putative cellulose synthase catalytic subunit [Arabidopsis
  misc_feature (464)..(1052): Homolog of NCBI NO: 27372782 NR Description: cellulose synthase-like protein D4 [Populus
  misc_feature (228)..(458): Homolog of NCBI NO: 27372782 NR Description: cellulose synthase-like protein D4 [Populus
MNTGGRLIAGSHNRNEFVLINADESARIRSVEELSGQTCQICGDEIELSVDGESFVACNECAFPVCRPCYEYERREGNQSCPQCKTRYKRIKGSPRVEGDEEDDGIDDLDFEFDYSRSGLESETFSRRNSEFDLASAPPGSQIPLLTYGEEDVEISSDSHALIVSPSPGHIHRVHQPHFPDPAAHPRPMVPQKDLAVYGYGSVAWKDRMEEWKRKQNEKYQVVKHDGDSSLGDGDDADIPMMDEGRQPLSRKVPIKSSKINPYRMLIVLRLVILGLFFHYRILHPVNDAYALWLISVICEIWFAVSWVLDQFPKWYPIERETYLDRLSLRYEKEGKPSELAGVDVFVSTVDPMKEPPLITANTVLSILAVDYPVDRVACYVSDDGAAMLTFEALSETAEFARKWVPFCKKYTIEPRAPEWYFCHKMDYLKNKVHPAFVRERRAMKRDYEEFKVKINALVATAQKVPEEGWTMQDGTPWPGNNVRDHPGMIQVFLGNNGVRDVENNELPRLVYVSREKRPGFDHHKKAGAMNSLIRVSGVLSNAPYLLNVDCDHYINNSKALREAMCFMMDPQSGKKICYVQFPQRFDGIDKSDRYSNRNVVFFDINMKGLDGLQGPIYVGTGCVFRRQALYGFDAPKKKKTKRMTCNCWPKWCLFCCGLRKNRKSKTTDKKKKNREASKQIHALENIEEGTKGTNDAAKSPEAAQLKLEKKFGQSPVFVASAGMENGGLARNASPASLLREAIQVISCGYEDKTEWGKEIGWIYGSVTEDILTGFKMHSHGWRSVYCTPKIPAFKGSAPINLSDRLHQVLRWALGSVEIFLSRHCPIWYGYGGGLKWLERLSYINSVVYPWTSIPLLVYCSLPAICLLTGKFIVPEISNYASILFMALFGSIAVTGILEMQWGKVGIDDWWRNEQFWVIGGVSAHLFALFQGLLKVLAGVETNFTVTSKAADDGEFSELYIFKWTSLLIPPTTLLIINVIGVIVGISDAISNGYDSWGPLFGRLFFAFWVILHLYPFLKGLLGKQDRMPTIILVWSILLASILTLLWVRVNPFVAKGGPILEICGLDCL

SEQ ID NO: 100178 - protein, 881 aa, Arabidopsis thaliana
  peptide (1)..(881): Ceres Seq. ID no. 13604539
  misc_feature (324)..(446): Pfam Name: Glycosyl transferase Pfam Description: Glycosyl transferase
  misc_feature (276)..(864): Homolog of NCBI NO: 15237873 NR Description: cellulose synthase family [Arabidopsis thaliana]
  misc_feature (319)..(864): Homolog of NCBI NO: 15217853 NR Description: cellulose synthase family [Arabidopsis thaliana]
  misc_feature (1)..(270): Homolog of NCBI NO: 15217853 NR Description: cellulose synthase family [Arabidopsis thaliana]
  misc_feature (10)..(270): Homolog of NCBI NO: 15237873 NR Description: cellulose synthase family [Arabidopsis thaliana]
  misc_feature (276)..(864): Homolog of NCBI NO: 15228448 NR Description: cellulose synthase family [Arabidopsis thaliana] putative cellulose synthase catalytic subunit [Arabidopsis
  misc_feature (53)..(270): Homolog of NCBI NO: 15228448 NR Description: cellulose synthase family [Arabidopsis thaliana] putative cellulose synthase catalytic subunit [Arabidopsis
  misc_feature (276)..(864): Homolog of NCBI NO: 27372782 NR Description: cellulose synthase-like protein D4 [Populus
  misc_feature (40)..(270): Homolog of NCBI NO: 27372782 NR Description: cellulose synthase-like protein D4 [Populus
  misc_feature (535)..(877): Homolog of NCBI NO: 13925884 NR Description: cellulose synthase D-like protein [Nicotiana
  misc_feature (10)..(270): Homolog of NCBI NO: 13925884 NR Description: cellulose synthase D-like protein [Nicotiana
MVPQKDLAVYGYGSVAWKDRMEEWKRKQNEKYQVVKHDGDSSLGDGDDADIPMMDEGRQPLSRKVPIKSSKINPYRMLIVLRLVILGLFFHYRILHPVNDAYALWLISVICEIWFAVSWVLDQFPKWYPIERETYLDRLSLRYEKEGKPSELAGVDVFVSTVDPMKEPPLITANTVLSILAVDYPVDRVACYVSDDGAAMLTFEALSETAEFARKWVPFCKKYTIEPRAPEWYFCHKMDYLKNKVHPAFVRERRAMKRDYEEFKVKINALVATAQKVPEEGWTMQDGTPWPGNNVRDHPGMIQVFLGNNGVRDVENNELPRLVYVSREKRPGFDHHKKAGAMNSLIRVSGVLSNAPYLLNVDCDHYINNSKALREAMCFMMDPQSGKKICYVQFPQRFDGIDKSDRYSNRNVVFFDINMKGLDGLQGPIYVGTGCVFRRQALYGFDAPKKKKTKRMTCNCWPKWCLFCCGLRKNRKSKTTDKKKKNREASKQIHALENIEEGTKGTNDAAKSPEAAQLKLEKKFGQSPVFVASAGMENGGLARNASPASLLREAIQVISCGYEDKTEWGKEIGWIYGSVTEDILTGFKMHSHGWRSVYCTPKIPAFKGSAPINLSDRLHQVLRWALGSVEIFLSRHCPIWYGYGGGLKWLERLSYINSVVYPWTSIPLLVYCSLPAICLLTGKFIVPEISNYASILFMALFGSIAVTGILEMQWGKVGIDDWWRNEQFWVIGGVSAHLFALFQGLLKVLAGVETNFTVTSKAADDGEFSELYIFKWTSLLIPPTTLLIINVIGVIVGISDAISNGYDSWGPLFGRLFFAFWVILHLYPFLKGLLGKQDRMPTIILVWSILLASILTLLWVRVNPFVAKGGPILEICGLDCL

SEQ ID NO: 100179 - protein, 861 aa, Arabidopsis thaliana
  peptide (1)..(861): Ceres Seq. ID no. 13604540
  misc_feature (304)..(426): Pfam Name: Glycosyl transferase Pfam Description: Glycosyl transferase
  misc_feature (256)..(844): Homolog of NCBI NO: 15237873 NR Description: cellulose synthase family [Arabidopsis thaliana]
  misc_feature (299)..(844): Homolog of NCBI NO: 15217853 NR Description: cellulose synthase family [Arabidopsis thaliana]
  misc_feature (1)..(250): Homolog of NCBI NO: 15217853 NR Description: cellulose synthase family [Arabidopsis thaliana]
  misc_feature (1)..(250): Homolog of NCBI NO: 15237873 NR Description: cellulose synthase family [Arabidopsis thaliana]
  misc_feature (256)..(844): Homolog of NCBI NO: 15228448 NR Description: cellulose synthase family [Arabidopsis thaliana] putative cellulose synthase catalytic subunit [Arabidopsis
  misc_feature (33)..(250): Homolog of NCBI NO: 15228448 NR Description: cellulose synthase family [Arabidopsis thaliana] putative cellulose synthase catalytic subunit [Arabidopsis
  misc_feature (256)..(844): Homolog of NCBI NO: 27372782 NR Description: cellulose synthase-like protein D4 [Populus
  misc_feature (20)..(250): Homolog of NCBI NO: 27372782 NR Description: cellulose synthase-like protein D4 [Populus
  misc_feature (515)..(857): Homolog of NCBI NO: 13925884 NR Description: cellulose synthase D-like protein [Nicotiana
  misc_feature (1)..(250): Homolog of NCBI NO: 13925884 NR Description: cellulose synthase D-like protein [Nicotiana
MEEWKRKQNEKYQVVKHDGDSSLGDGDDADIPMMDEGRQPLSRKVPIKSSKINPYRMLIVLRLVILGLFFHYRILHPVNDAYALWLISVICEIWFAVSWVLDQFPKWYPIERETYLDRLSLRYEKEGKPSELAGVDVFVSTVDPMKEPPLITANTVLSILAVDYPVDRVACYVSDDGAAMLTFEALSETAEFARKWVPFCKKYTIEPRAPEWYFCHKMDYLKNKVHPAFVRERRAMKRDYEEFKVKINALVATAQKVPEEGWTMQDGTPWPGNNVRDHPGMIQVFLGNNGVRDVENNELPRLVYVSREKRPGFDHHKKAGAMNSLIRVSGVLSNAPYLLNVDCDHYINNSKALREAMCFMMDPQSGKKICYVQFPQRFDGIDKSDRYSNRNVVFFDINMKGLDGLQGPIYVGTGCVFRRQALYGFDAPKKKKTKRMTCNCWPKWCLFCCGLRKNRKSKTTDKKKKNREASKQIHALENIEEGTKGTNDAAKSPEAAQLKLEKKFGQSPVFVASAGMENGGLARNASPASLLREAIQVISCGYEDKTEWGKEIGWIYGSVTEDILTGFKMHSHGWRSVYCTPKIPAFKGSAPINLSDRLHQVLRWALGSVEIFLSRHCPIWYGYGGGLKWLERLSYINSVVYPWTSIPLLVYCSLPAICLLTGKFIVPEISNYASILFMALFGSIAVTGILEMQWGKVGIDDWWRNEQFWVIGGVSAHLFALFQGLLKVLAGVETNFTVTSKAADDGEFSELYIFKWTSLLIPPTTLLIINVIGVIVGISDAISNGYDSWGPLFGRLFFAFWVILHLYPFLKGLLGKQDRMPTIILVWSILLASILTLLWVRVNPFVAKGGPILEICGLDCL

SEQ ID NO: 100180 - DNA, 1099 bp, Arabidopsis thaliana
  misc_feature (1)..(1099): Ceres Seq. ID no. 13604547
  misc_feature: MA Experiment ID: 20000436 Result: Up-regulated in Transcription
  misc_feature: MA Experiment 20000436 PARAMETER Experiment Name: At_Drought_P Parameter: Age (day) Value: 7
  misc_feature: MA Experiment 20000436 PARAMETER Experiment Name: At_Drought_P Parameter: Organism Value: A. thaliana
  misc_feature: MA Experiment 20000436 PARAMETER Experiment Name: At_Drought_P Parameter: Plant Line Value: WS
  misc_feature: MA Experiment 20000436 PARAMETER Experiment Name: At_Drought_P Parameter: Timepoint (hr) Value: 12
  misc_feature: MA Experiment 20000436 PARAMETER Experiment Name: At_Drought_P Parameter: Tissue Value: Whole Plant
  misc_feature: MA Experiment 20000436 PARAMETER Experiment Name: At_Drought_P Parameter: Treatment Value: Drought vs. No Drought
  misc_feature: MA Experiment ID: 20000437 Result: Up-regulated in Transcription
  misc_feature: MA Experiment 20000437 PARAMETER Experiment Name: At_Drought_P Parameter: Age (day) Value: 8
  misc_feature: MA Experiment 20000437 PARAMETER Experiment Name: At_Drought_P Parameter: Organism Value: A. thaliana
  misc_feature: MA Experiment 20000437 PARAMETER Experiment Name: At_Drought_P Parameter: Plant Line Value: WS
  misc_feature: MA Experiment 20000437 PARAMETER Experiment Name: At_Drought_P Parameter: Timepoint (hr) Value: 24
  misc_feature: MA Experiment 20000437 PARAMETER Experiment Name: At_Drought_P Parameter: Tissue Value: Whole Plant
  misc_feature: MA Experiment 20000437 PARAMETER Experiment Name: At_Drought_P Parameter: Treatment Value: Drought vs. No Drought
  misc_feature: MA Experiment ID: 20001451 Result: Up-regulated in Transcription
  misc_feature: MA Experiment 20001451 PARAMETER Experiment Name: At_Far-red-induction_P Parameter: Age (day) Value: 7
  misc_feature: MA Experiment 20001451 PARAMETER Experiment Name: At_Far-red-induction_P Parameter: Light Value: Far-red vs. White
  misc_feature: MA Experiment 20001451 PARAMETER Experiment Name: At_Far-red-induction_P Parameter: Organism Value: A. thaliana
  misc_feature: MA Experiment 20001451 PARAMETER Experiment Name: At_Far-red-induction_P Parameter: Plant Line Value: Columbia
  misc_feature: MA Experiment 20001451 PARAMETER Experiment Name: At_Far-red-induction_P Parameter: Timepoint (hr) Value: 24
  misc_feature: MA Experiment 20001451 PARAMETER Experiment Name: At_Far-red-induction_P Parameter: Tissue Value: Whole Plant
  misc_feature: MA Experiment ID: 20001905 Result: Up-regulated in Transcription
  misc_feature: MA Experiment 20001905 PARAMETER Experiment Name: At_Drought_Reproduction_P Parameter: Age (day) Value: 40
  misc_feature: MA Experiment 20001905 PARAMETER Experiment Name: At_Drought_Reproduction_P Parameter: Organism Value: A. thaliana
  misc_feature: MA Experiment 20001905 PARAMETER Experiment Name: At_Drought_Reproduction_P Parameter: Plant Line Value: WS
  misc_feature: MA Experiment 20001905 PARAMETER Experiment Name: At_Drought_Reproduction_P Parameter: Timepoint (day) Value: 10
  misc_feature: MA Experiment 20001905 PARAMETER Experiment Name: At_Drought_Reproduction_P Parameter: Tissue Value: Rosettes
  misc_feature: MA Experiment 20001905 PARAMETER Experiment Name: At_Drought_Reproduction_P Parameter: Treatment Value: Drought vs. No Drought
  misc_feature: MA Experiment ID: 20001906 Result: Up-regulated in Transcription
  misc_feature: MA Experiment 20001906 PARAMETER Experiment Name: At_Drought_Reproduction_P Parameter: Age (day) Value: 35
  misc_feature: MA Experiment 20001906 PARAMETER Experiment Name: At_Drought_Reproduction_P Parameter: Organism Value: A. thaliana
  misc_feature: MA Experiment 20001906 PARAMETER Experiment Name: At_Drought_Reproduction_P Parameter: Plant Line Value: WS
  misc_feature: MA Experiment 20001906 PARAMETER Experiment Name: At_Drought_Reproduction_P Parameter: Timepoint (day) Value: 5
  misc_feature: MA Experiment 20001906 PARAMETER Experiment Name: At_Drought_Reproduction_P Parameter: Tissue Value: Siliques
  misc_feature: MA Experiment 20001906 PARAMETER Experiment Name: At_Drought_Reproduction_P Parameter: Treatment Value: Drought vs. No Drought
  misc_feature: MA Experiment ID: 20001911 Result: Up-regulated in Transcription
  misc_feature: MA Experiment 20001911 PARAMETER Experiment Name: At_Drought_Reproduction_P Parameter: Age (day) Value: 40
  misc_feature: MA Experiment 20001911 PARAMETER Experiment Name: At_Drought_Reproduction_P Parameter: Organism Value: A. thaliana
  misc_feature: MA Experiment 20001911 PARAMETER Experiment Name: At_Drought_Reproduction_P Parameter: Plant Line Value: WS
  misc_feature: MA Experiment 20001911 PARAMETER Experiment Name: At_Drought_Reproduction_P Parameter: Timepoint (day) Value: 10
  misc_feature: MA Experiment 20001911 PARAMETER Experiment Name: At_Drought_Reproduction_P Parameter: Tissue Value: Flowers
  misc_feature: MA Experiment 20001911 PARAMETER Experiment Name: At_Drought_Reproduction_P Parameter: Treatment Value: Drought vs. No Drought
caatagaggcaaggaggagaaagccaatggcacatgccacgtttacgtcggaagggcagaatatggagtcgtttcgactcttgagtggccacaaaatcccagccgttggactcggcacgtggcgatctgggtctcaagccgcccacgccgttgtcactgcaatcgtcgagggtggctataggcacatagatacagcttgggagtatggtgatcagagagaggtcggtcaaggaataaagagggcgatgcacgctggccttgaaaggagggacctctttgtgacctcgaagctttggtgcactgagttatctcctgagagagtgcgtcctgctctgcaaaacacccttaaagagcttcaattagagtaccttgatctctacttgattcactggcctatccggctaagagaaggagccagtaagccaccaaaggcaggggacgttcttgactttgacatggaaggagtttggagagaaatggagaatctttccaaggacagtctcgtcaggaatatcggtgtctgtaactttacagtcactaagctcaataagctgctaggatttgctgaactgatccctgccgtttgccagatggaaatgcatcctggttggagaaacgataggatactcgaattctgcaagaagaatgagatccatgttactgcctattctccattgggatctcaagaaggcgggagagatctgatacacgatcagacggtggataggatagcgaagaagctgaataagacaccgggacagattctagtgaaatggggtttgcagagaggaacaagtgtcatccctaagtcattgaatccagagaggatcaaagagaacatcaaagtgtttgattgggtgatccctgaacaagacttccaagctctcaacagcatcactgaccagaaacgagtgatagacggtgaggatcttttcgtcaacaagaccgaaggtccattccgtagtgtggctgatctatgggaccatgaagactaaaccgaacccgagaatcaaacataactatgtaaggaatgtgtttgttgtaacttgtaagatatcaaatgtacattttctgaaaataaaagaaagcagtctcccgt

SEQ ID NO: 100181 - protein, 330 aa, Arabidopsis thaliana
  peptide (1)..(330): Ceres Seq. ID no. 13604548
  misc_feature (9)..(330): Homolog of NCBI NO: 30679355 NR Description: aldose reductase, putative [Arabidopsis thaliana]
  misc_feature (99)..(330): Homolog of NCBI NO: 30679359 NR Description: aldose reductase, putative [Arabidopsis thaliana]
  misc_feature (9)..(100): Homolog of NCBI NO: 30679359 NR Description: aldose reductase, putative [Arabidopsis thaliana]
  misc_feature (9)..(330): Homolog of NCBI NO: 11250961 NR Description: aldose reductase-like protein - Arabidopsis
  misc_feature (9)..(330): Homolog of NCBI NO: 113595 NR Description: Aldose reductase (AR) (Aldehyde reductase)
  misc_feature (9)..(330): Homolog of NCBI NO: 728592 NR Description: aldose reductase [Hordeum vulgare]
  misc_feature (9)..(330): Homolog of NCBI NO: 543632 NR Description: aldehyde reductase (EC 1.1.1.21), NADPH-dependent
  misc_feature (9)..(330): Homolog of NCBI NO: 2130022 NR Description: aldose reductase homolog - wild oat
  misc_feature (9)..(329): Homolog of NCBI NO: 4539944 NR Description: aldose reductase ALDRXV4 [Xerophyta viscosa]
  misc_feature (24)..(329): Homolog of NCBI NO: 30687247 NR Description: aldo/keto reductase family [Arabidopsis thaliana]
IEARRRKPMAHATFTSEGQNMESFRLLSGHKIPAVGLGTWRSGSQAAHAVVTAIVEGGYRHIDTAWEYGDQREVGQGIKRAMHAGLERRDLFVTSKLWCTELSPERVRPALQNTLKELQLEYLDLYLIHWPIRLREGASKPPKAGDVLDFDMEGVWREMENLSKDSLVRNIGVCNFTVTKLNKLLGFAELIPAVCQMEMHPGWRNDRILEFCKKNEIHVTAYSPLGSQEGGRDLIHDQTVDRIAKKLNKTPGQILVKWGLQRGTSVIPKSLNPERIKENIKVFDWVIPEQDFQALNSITDQKRVIDGEDLFVNKTEGPFRSVADLWDHED

SEQ ID NO: 100182 - protein, 322 aa, Arabidopsis thaliana
  peptide (1)..(322): Ceres Seq. ID no. 13604549
  misc_feature (1)..(322): Homolog of NCBI NO: 30679355 NR Description: aldose reductase, putative [Arabidopsis thaliana]
  misc_feature (91)..(322): Homolog of NCBI NO: 30679359 NR Description: aldose reductase, putative [Arabidopsis thaliana]
  misc_feature (1)..(92): Homolog of NCBI NO: 30679359 NR Description: aldose reductase, putative [Arabidopsis thaliana]
  misc_feature (1)..(322): Homolog of NCBI NO: 11250961 NR Description: aldose reductase-like protein - Arabidopsis
  misc_feature (1)..(322): Homolog of NCBI NO: 113595 NR Description: Aldose reductase (AR) (Aldehyde reductase)
  misc_feature (1)..(322): Homolog of NCBI NO: 728592 NR Description: aldose reductase [Hordeum vulgare]
  misc_feature (1)..(322): Homolog of NCBI NO: 543632 NR Description: aldehyde reductase (EC 1.1.1.21), NADPH-dependent
  misc_feature (1)..(322): Homolog of NCBI NO: 2130022 NR Description: aldose reductase homolog - wild oat
  misc_feature (1)..(321): Homolog of NCBI NO: 4539944 NR Description: aldose reductase ALDRXV4 [Xerophyta viscosa]
  misc_feature (16)..(321): Homolog of NCBI NO: 30687247 NR Description: aldo/keto reductase family [Arabidopsis thaliana]
MAHATFTSEGQNMESFRLLSGHKIPAVGLGTWRSGSQAAHAVVTAIVEGGYRHIDTAWEYGDQREVGQGIKRAMHAGLERRDLFVTSKLWCTELSPERVRPALQNTLKELQLEYLDLYLIHWPIRLREGASKPPKAGDVLDFDMEGVWREMENLSKDSLVRNIGVCNFTVTKLNKLLGFAELIPAVCQMEMHPGWRNDRILEFCKKNEIHVTAYSPLGSQEGGRDLIHDQTVDRIAKKLNKTPGQILVKWGLQRGTSVIPKSLNPERIKENIKVFDWVIPEQDFQALNSITDQKRVIDGEDLFVNKTEGPFRSVADLWDHED

SEQ ID NO: 100183 - protein, 310 aa, Arabidopsis thaliana
  peptide (1)..(310): Ceres Seq. ID no. 13604550
  misc_feature (1)..(310): Homolog of NCBI NO: 30679355 NR Description: aldose reductase, putative [Arabidopsis thaliana]
  misc_feature (79)..(310): Homolog of NCBI NO: 30679359 NR Description: aldose reductase, putative [Arabidopsis thaliana]
  misc_feature (1)..(80): Homolog of NCBI NO: 30679359 NR Description: aldose reductase, putative [Arabidopsis thaliana]
  misc_feature (1)..(310): Homolog of NCBI NO: 11250961 NR Description: aldose reductase-like protein - Arabidopsis
  misc_feature (1)..(310): Homolog of NCBI NO: 113595 NR Description: Aldose reductase (AR) (Aldehyde reductase)
  misc_feature (1)..(310): Homolog of NCBI NO: 728592 NR Description: aldose reductase [Hordeum vulgare]
  misc_feature (1)..(310): Homolog of NCBI NO: 543632 NR Description: aldehyde reductase (EC 1.1.1.21), NADPH-dependent
  misc_feature (1)..(310): Homolog of NCBI NO: 2130022 NR Description: aldose reductase homolog - wild oat
  misc_feature (1)..(309): Homolog of NCBI NO: 4539944 NR Description: aldose reductase ALDRXV4 [Xerophyta viscosa]
  misc_feature (4)..(309): Homolog of NCBI NO: 30687247 NR Description: aldo/keto reductase family [Arabidopsis thaliana]
MESFRLLSGHKIPAVGLGTWRSGSQAAHAVVTAIVEGGYRHIDTAWEYGDQREVGQGIKRAMHAGLERRDLFVTSKLWCTELSPERVRPALQNTLKELQLEYLDLYLIHWPIRLREGASKPPKAGDVLDFDMEGVWREMENLSKDSLVRNIGVCNFTVTKLNKLLGFAELIPAVCQMEMHPGWRNDRILEFCKKNEIHVTAYSPLGSQEGGRDLIHDQTVDRIAKKLNKTPGQILVKWGLQRGTSVIPKSLNPERIKENIKVFDWVIPEQDFQALNSITDQKRVIDGEDLFVNKTEGPFRSVADLWDHED

SEQ ID NO: 100184 - DNA, 910 bp, Arabidopsis thaliana
  misc_feature (1)..(910): Ceres Seq. ID no. 13604551
  misc_feature: MA Experiment ID: 20000182 Result: Up-regulated in Transcription
  misc_feature: MA Experiment 20000182 PARAMETER Experiment Name: At_2mM_SA_P Parameter: Age (day) Value: 14
  misc_feature: MA Experiment 20000182 PARAMETER Experiment Name: At_2mM_SA_P Parameter: Organism Value: A. thaliana
  misc_feature: MA Experiment 20000182 PARAMETER Experiment Name: At_2mM_SA_P Parameter: Plant Line Value: WS
  misc_feature: MA Experiment 20000182 PARAMETER Experiment Name: At_2mM_SA_P Parameter: Timepoint (hr) Value: 6
  misc_feature: MA Experiment 20000182 PARAMETER Experiment Name: At_2mM_SA_P Parameter: Tissue Value: Aerial
  misc_feature: MA Experiment 20000182 PARAMETER Experiment Name: At_2mM_SA_P Parameter: Treatment Value: 2mM SA vs. No Treatment
  misc_feature: MA Experiment ID: 20000527 Result: Down-regulated in Transcription
  misc_feature: MA Experiment 20000527 PARAMETER Experiment Name: At_10percent_PEG_P Parameter: Age (day) Value: 20
  misc_feature: MA Experiment 20000527 PARAMETER Experiment Name: At_10percent_PEG_P Parameter: Organism Value: A. thaliana
  misc_feature: MA Experiment 20000527 PARAMETER Experiment Name: At_10percent_PEG_P Parameter: Plant Line Value: WS
  misc_feature: MA Experiment 20000527 PARAMETER Experiment Name: At_10percent_PEG_P Parameter: Timepoint (day) Value: 20
  misc_feature: MA Experiment 20000527 PARAMETER Experiment Name: At_10percent_PEG_P Parameter: Tissue Value: Whole Plant
  misc_feature: MA Experiment 20000527 PARAMETER Experiment Name: At_10percent_PEG_P Parameter: Treatment Value: 10percent PEG vs. No Treatment
cgaggcctcgtgcgaattcggcacgaggaataattataagtatttactcaaaaaaaaaacaaaaaaagatgaactcttgccaacaaaaggctatggagaagttgcttcacgggcatgggtgcgccaaccagctgctcatcatggaccagaccgagtcagactcgtccatggaaagggaggatttggccaagtccgtcctccattgtttctcagatgcgctctccatcttgatcgatactaatgaccaccaagacgatcaatccaataactcatctcctcaggactcttctcctgtgcttgagagctccaggaaaccacttcacaagaggggaagaaagacatctatggcagagagctcagactaccatagacacgaatcttcaaccccgatctaccacgacggcttcctctggaggaaatacggacaaaagcagatcaaagaatctgagtaccaaaggagttactacaagtgtgcctacaccaaggaccagaactgtgaagcaaagaagcaggttcaaaagatccaacacaatcctccattgtactcaaccacttacttcggccagcacatatgccagcttcatcaagcttatgcaactttccccattgacacatctgacttcgaagagcacgagggatcccacatgatccgattcggtcaccccaacatcagcttctcctcctccacctctaacctccgccaacatcagaatcatcaggatcgcatcaaagatgaatacatgaaaccggtgatagcagaagattggtctccatcccagtggatgtcgtccgaggttgccctcgccgtggaggctttcgagtttaatcctttctggacatctcacgacttatcatcatgacactatatccctcagctctatcatcatacatatatagcttctttaatcct

SEQ ID NO: 100185 - protein, 285 aa, Arabidopsis thaliana
  peptide (1)..(285): Ceres Seq. ID no. 13604552
  misc_feature (1)..(285): Homolog of NCBI NO: 13506735 NR Description: WRKY DNA-binding protein 62 [Arabidopsis thaliana]
  misc_feature (23)..(285): Homolog of NCBI NO: 30679452 NR Description: WRKY family transcription factor [Arabidopsis >gi|29839652|sp|Q9LZV6|WR62_ARATH Probable WRKY transcription
  misc_feature (31)..(285): Homolog of NCBI NO: 11358138 NR Description: hypothetical protein T20L15.170 - Arabidopsis >gi|7329663|emb|CAB82760.1| putative protein [Arabidopsis
  misc_feature (22)..(245): Homolog of NCBI NO: 30688540 NR Description: WRKY family transcription factor [Arabidopsis >gi|29839548|sp|Q8GWF1|WR38_ARATH Probable WRKY transcription
  misc_feature (23)..(245): Homolog of NCBI NO: 9758663 NR Description: contains similarity to DNA-binding [Arabidopsis thaliana] >gi|17064162|gb|AAL35288.1|AF442395_1 WRKY
  misc_feature (23)..(192): Homolog of NCBI NO: 18408541 NR Description: WRKY family transcription factor [Arabidopsis >gi|29839601|sp|Q93WV7|WR67_ARATH Probable WRKY transcription
  misc_feature (89)..(253): Homolog of NCBI NO: 15220174 NR Description: WRKY family transcription factor [Arabidopsis >gi|29839654|sp|Q9M8M6|WR66_ARATH Probable WRKY transcription
  misc_feature (29)..(74): Homolog of NCBI NO: 15220174 NR Description: WRKY family transcription factor [Arabidopsis >gi|29839654|sp|Q9M8M6|WR66_ARATH Probable WRKY transcription
  misc_feature (24)..(192): Homolog of NCBI NO: 15219685 NR Description: WRKY family transcription factor [Arabidopsis >gi|29839608|sp|Q9C557|WR64_ARATH Probable WRKY transcription
  misc_feature (23)..(192): Homolog of NCBI NO: 25404630 NR Description: probable wrky-type DNA binding protein F28G11.3
RPRANSARGIIISIYSKKKQKKMNSCQQKAMEKLLHGHGCANQLLIMDQTESDSSMEREDLAKSVLHCFSDALSILIDTNDHQDDQSNNSSPQDSSPVLESSRKPLHKRGRKTSMAESSDYHRHESSTPIYHDGFLWRKYGQKQIKESEYQRSYYKCAYTKDQNCEAKKQVQKIQHNPPLYSTTYFGQHICQLHQAYATFPIDTSDFEEHEGSHMIRFGHPNISFSSSTSNLRQHQNHQDRIKDEYMKPVIAEDWSPSQWMSSEVALAVEAFEFNPFWTSHDLSS

SEQ ID NO: 100186 - protein, 263 aa, Arabidopsis thaliana
  peptide (1)..(263): Ceres Seq. ID no. 13604553
  misc_feature (1)..(263): Homolog of NCBI NO: 13506735 NR Description: WRKY DNA-binding protein 62 [Arabidopsis thaliana]
  misc_feature (1)..(263): Homolog of NCBI NO: 30679452 NR Description: WRKY family transcription factor [Arabidopsis >gi|29839652|sp|Q9LZV6|WR62_ARATH Probable WRKY transcription
  misc_feature (9)..(263): Homolog of NCBI NO: 11358138 NR Description: hypothetical protein T20L15.170 - Arabidopsis >gi|7329663|emb|CAB82760.1| putative protein [Arabidopsis
  misc_feature (1)..(223): Homolog of NCBI NO: 30688540 NR Description: WRKY family transcription factor [Arabidopsis >gi|29839548|sp|Q8GWF1|WR38_ARATH Probable WRKY transcription
  misc_feature (1)..(223): Homolog of NCBI NO: 9758663 NR Description: contains similarity to DNA-binding [Arabidopsis thaliana] >gi|17064162|gb|AAL35288.1|AF442395_1 WRKY
  misc_feature (1)..(170): Homolog of NCBI NO: 18408541 NR Description: WRKY family transcription factor [Arabidopsis >gi|29839601|sp|Q93WV7|WR67_ARATH Probable WRKY transcription
  misc_feature (67)..(231): Homolog of NCBI NO: 15220174 NR Description: WRKY family transcription factor [Arabidopsis >gi|29839654|sp|Q9M8M6|WR66_ARATH Probable WRKY transcription
  misc_feature (7)..(52): Homolog of NCBI NO: 15220174 NR Description: WRKY family transcription factor [Arabidopsis >gi|29839654|sp|Q9M8M6|WR66_ARATH Probable WRKY transcription
  misc_feature (2)..(170): Homolog of NCBI NO: 15219685 NR Description: WRKY family transcription factor [Arabidopsis >gi|29839608|sp|Q9C557|WR64_ARATH Probable WRKY transcription
  misc_feature (1)..(170): Homolog of NCBI NO: 25404630 NR Description: probable wrky-type DNA binding protein F28G11.3
MNSCQQKAMEKLLHGHGCANQLLIMDQTESDSSMEREDLAKSVLHCFSDALSILIDTNDHQDDQSNNSSPQDSSPVLESSRKPLHKRGRKTSMAESSDYHRHESSTPIYHDGFLWRKYGQKQIKESEYQRSYYKCAYTKDQNCEAKKQVQKIQHNPPLYSTTYFGQHICQLHQAYATFPIDTSDFEEHEGSHMIRFGHPNISFSSSTSNLRQHQNHQDRIKDEYMKPVIAEDWSPSQWMSSEVALAVEAFEFNPFWTSHDLSS

SEQ ID NO: 100187 - protein, 255 aa, Arabidopsis thaliana
  peptide (1)..(255): Ceres Seq. ID no. 13604554
  misc_feature (1)..(255): Homolog of NCBI NO: 13506735 NR Description: WRKY DNA-binding protein 62 [Arabidopsis thaliana]
  misc_feature (1)..(255): Homolog of NCBI NO: 30679452 NR Description: WRKY family transcription factor [Arabidopsis >gi|29839652|sp|Q9LZV6|WR62_ARATH Probable WRKY transcription
  misc_feature (1)..(255): Homolog of NCBI NO: 11358138 NR Description: hypothetical protein T20L15.170 - Arabidopsis >gi|7329663|emb|CAB82760.1| putative protein [Arabidopsis
  misc_feature (1)..(215): Homolog of NCBI NO: 30688540 NR Description: WRKY family transcription factor [Arabidopsis >gi|29839548|sp|Q8GWF1|WR38_ARATH Probable WRKY transcription
  misc_feature (1)..(215): Homolog of NCBI NO: 9758663 NR Description: contains similarity to DNA-binding [Arabidopsis thaliana] >gi|17064162|gb|AAL35288.1|AF442395_1 WRKY
  misc_feature (1)..(162): Homolog of NCBI NO: 18408541 NR Description: WRKY family transcription factor [Arabidopsis >gi|29839601|sp|Q93WV7|WR67_ARATH Probable WRKY transcription
  misc_feature (59)..(223): Homolog of NCBI NO: 15220174 NR Description: WRKY family transcription factor [Arabidopsis >gi|29839654|sp|Q9M8M6|WR66_ARATH Probable WRKY transcription
  misc_feature (1)..(44): Homolog of NCBI NO: 15220174 NR Description: WRKY family transcription factor [Arabidopsis >gi|29839654|sp|Q9M8M6|WR66_ARATH Probable WRKY transcription
  misc_feature (1)..(162): Homolog of NCBI NO: 15219685 NR Description: WRKY family transcription factor [Arabidopsis >gi|29839608|sp|Q9C557|WR64_ARATH Probable WRKY transcription
  misc_feature (1)..(162): Homolog of NCBI NO: 25404630 NR Description: probable wrky-type DNA binding protein F28G11.3
MEKLLHGHGCANQLLIMDQTESDSSMEREDLAKSVLHCFSDALSILIDTNDHQDDQSNNSSPQDSSPVLESSRKPLHKRGRKTSMAESSDYHRHESSTPIYHDGFLWRKYGQKQIKESEYQRSYYKCAYTKDQNCEAKKQVQKIQHNPPLYSTTYFGQHICQLHQAYATFPIDTSDFEEHEGSHMIRFGHPNISFSSSTSNLRQHQNHQDRIKDEYMKPVIAEDWSPSQWMSSEVALAVEAFEFNPFWTSHDLSS

SEQ ID NO: 100188 - DNA, 2060 bp, Arabidopsis thaliana
  misc_feature (1)..(2060): Ceres Seq. ID no. 13604569
  misc_feature: MA Experiment ID: 108461 Result: Down-regulated in Transcription
  misc_feature: MA Experiment 108461 PARAMETER Experiment Name: At_Germinating_Seeds_cDNA_P Parameter: Age (day) Value: 1 vs. 0
  misc_feature: MA Experiment 108461 PARAMETER Experiment Name: At_Germinating_Seeds_cDNA_P Parameter: Tissue Value: Germinating Seeds
  misc_feature: MA Experiment ID: 108463 Result: Down-regulated in Transcription
  misc_feature: MA Experiment 108463 PARAMETER Experiment Name: At_Germinating_Seeds_cDNA_P Parameter: Age (day) Value: 3 vs. 0
  misc_feature: MA Experiment 108463 PARAMETER Experiment Name: At_Germinating_Seeds_cDNA_P Parameter: Tissue Value: Germinating Seeds
  misc_feature: MA Experiment ID: 20000180 Result: Down-regulated in Transcription
  misc_feature: MA Experiment 20000180 PARAMETER Experiment Name: At_Germinating_Seeds_P Parameter: Age (hr) Value: 24 vs. 0
  misc_feature: MA Experiment 20000180 PARAMETER Experiment Name: At_Germinating_Seeds_P Parameter: Tissue Value: Germinating Seeds
atgatccgatcacgaagtgtcttgttaattttcaggaaggtgttgtatcaatcgtcttgtcttaagtgtttattatgtgcaaactctttctctacttcagtttcgtcaagcttgggttttcgagcgacgaacaaagagttaaaccagatgataagatcggggtatatcgccgaagctagagatatttttgagaaactggaagcgaggaacacagtgacatggaatacgatgataagcgggtatgtgaaaaggcgtgaaatgaatcaagcacggaaactgttcgacgtaatgcctaagagagatgttgtgacttggaacacgatgatttcggggtatgtttcatgtggtgggattaggtttcttgaggaagcaaggaagctgtttgatgaaatgccttcaagggattctttttcatggaacactatgattagtggttatgcgaagaatcggaggataggtgaagcgttgttgttatttgagaaaatgcctgagagaaatgcagtgtcatggagtgctatgatcactgggttttgtcagaacggtgaagtggatagcgcggttgtgttgtttcggaaaatgcctgtgaaggattcgtctcctctatgtgcacttgtggctggtcttattaaaaacgagagactttcagaagctgcgtgggttttgggtcagtatgggagtttagtttcaggaagggaagatttggtgtatgcttataacactttgattgttggatatggacagagaggacaagtagaagcagctcgatgtctgtttgatcagattcctgatctctgtggtgatgatcatggtggagagtttagagagaggttctgtaaaaatgttgtgtcatggaattctatgatcaaagcttacttgaaagtgggtgatgtggtctctgcaaggttgctatttgatcagatgaaagaccgcgatacaatttcttggaacacaatgattgatggatacgtacatgtttccaggatggaagatgcttttgctctgttttcggaaatgccgaaccgtgatgcacattcgtggaacatgatggtctcgggttatgctagtgttggcaatgtagagcttgctcgccactactttgaaaaaacacctgagaaacatacagtctcgtggaactcgataatagcagcttatgagaaaaacaaggactacaaagaagctgttgatttgtttatccggatgaacattgaaggagagaagcctgacccacatactttaacttctcttctcagtgcatctaccgggcttgtgaatctgcgtttaggaatgcagatgcaccaaatcgttgtcaagactgtgatccccgatgttccagtccacaatgcccttatcactatgtattcaagatgcggtgaaataatggagtcgaggagaatcttcgatgaaatgaaactcaaaagagaagtaatcacatggaatgcaatgataggaggatatgcatttcatggtaatgcctcagaggccttgaatctgttcgggtcgatgaaaagcaacgggatatatccttctcacataacattcgtctcagttctgaacgcttgtgctcacgcgggacttgttgatgaggctaaagcacagtttgtgtccatgatgagtgtgtacaagatcgagccgcagatggaacattattcttccctggtcaacgttaccagtggacaagggcagtttgaagaggccatgtatatcataacgagtatgccttttgagccagacaaaacggtatggggtgcattattggatgcttgtaggatatataacaatgtagggcttgcacatgttgcagctgaagcaatgtcgagactcgaaccagagagctcaacaccttatgtactgttatataacatgtatgcggatatgggactatgggacgaagcttctcaagtgagaatgaacatggagagtaaaagaatcaagaaggaaagaggatccagttgggttgactcctcaacgtaaaaagcagcctttatttatgtttacttaaacataaaaattgatttgggatcagaattgagatagaaattgataaggtactcttgaaagtt

SEQ ID NO: 100189 - protein, 656 aa, Arabidopsis thaliana
  peptide (1)..(656): Ceres Seq. ID no. 13604570
  misc_feature (313)..(347): Pfam Name: PPR repeat Pfam Description: PPR repeat
  misc_feature (74)..(653): Homolog of NCBI NO: 15235498 NR Description: pentatricopeptide (PPR) repeat-containing protein
  misc_feature (75)..(653): Homolog of NCBI NO: 38344941 NR Description: OSJNBa0084A10.17 [Oryza sativa (japonica
  misc_feature (121)..(653): Homolog of NCBI NO: 15217508 NR Description: pentatricopeptide (PPR) repeat-containing protein thaliana] >gi|25345445|pir||D86227 hypothetical protein
  misc_feature (53)..(652): Homolog of NCBI NO: 8671867 NR Description: Contains similarity to glycerine-rich protein Nicotiana glauca gb|AF151215 and contains multiple PPR PF|01535
  misc_feature (53)..(652): Homolog of NCBI NO: 15220869 NR Description: hypothetical protein [Arabidopsis thaliana]
  misc_feature (75)..(652): Homolog of NCBI NO: 15225445 NR Description: pentatricopeptide (PPR) repeat-containing protein
  misc_feature (44)..(652): Homolog of NCBI NO: 18398422 NR Description: pentatricopeptide (PPR) repeat-containing protein
  misc_feature (44)..(652): Homolog of NCBI NO: 25518386 NR Description: hypothetical protein F5D14.18 - Arabidopsis >gi|8920616|gb|AAF81338.1|AC007767_18 Contains similarity to a protein F19I3.26 gi|7485810 from Arabidopsis thaliana ESTs
  misc_feature (121)..(653): Homolog of NCBI NO: 15223594 NR Description: pentatricopeptide (PPR) repeat-containing protein
  misc_feature (34)..(653): Homolog of NCBI NO: 15227144 NR Description: pentatricopeptide (PPR) repeat-containing protein
MIRSRSVLLIFRKVLYQSSCLKCLLCANSFSTSVSSSLGFRATNKELNQMIRSGYIAEARDIFEKLEARNTVTWNTMISGYVKRREMNQARKLFDVMPKRDVVTWNTMISGYVSCGGIRFLEEARKLFDEMPSRDSFSWNTMISGYAKNRRIGEALLLFEKMPERNAVSWSAMITGFCQNGEVDSAVVLFRKMPVKDSSPLCALVAGLIKNERLSEAAWVLGQYGSLVSGREDLVYAYNTLIVGYGQRGQVEAARCLFDQIPDLCGDDHGGEFRERFCKNVVSWNSMIKAYLKVGDVVSARLLFDQMKDRDTISWNTMIDGYVHVSRMEDAFALFSEMPNRDAHSWNMMVSGYASVGNVELARHYFEKTPEKHTVSWNSIIAAYEKNKDYKEAVDLFIRMNIEGEKPDPHTLTSLLSASTGLVNLRLGMQMHQIVVKTVIPDVPVHNALITMYSRCGEIMESRRIFDEMKLKREVITWNAMIGGYAFHGNASEALNLFGSMKSNGIYPSHITFVSVLNACAHAGLVDEAKAQFVSMMSVYKIEPQMEHYSSLVNVTSGQGQFEEAMYIITSMPFEPDKTVWGALLDACRIYNNVGLAHVAAEAMSRLEPESSTPYVLLYNMYADMGLWDEASQVRMNMESKRIKKERGSSWVDSST

SEQ ID NO: 100190 - protein, 607 aa, Arabidopsis thaliana
  peptide (1)..(607): Ceres Seq. ID no. 13604571
  misc_feature (264)..(298): Pfam Name: PPR repeat Pfam Description: PPR repeat
  misc_feature (25)..(604): Homolog of NCBI NO: 15235498 NR Description: pentatricopeptide (PPR) repeat-containing protein
  misc_feature (26)..(604): Homolog of NCBI NO: 38344941 NR Description: OSJNBa0084A10.17 [Oryza sativa (japonica
  misc_feature (72)..(604): Homolog of NCBI NO: 15217508 NR Description: pentatricopeptide (PPR) repeat-containing protein thaliana] >gi|25345445|pir||D86227 hypothetical protein
  misc_feature (4)..(603): Homolog of NCBI NO: 8671867 NR Description: Contains similarity to glycerine-rich protein Nicotiana glauca gb|AF151215 and contains multiple PPR PF|01535
  misc_feature (4)..(603): Homolog of NCBI NO: 15220869 NR Description: hypothetical protein [Arabidopsis thaliana]
  misc_feature (26)..(603): Homolog of NCBI NO: 15225445 NR Description: pentatricopeptide (PPR) repeat-containing protein
  misc_feature (1)..(603): Homolog of NCBI NO: 18398422 NR Description: pentatricopeptide (PPR) repeat-containing protein
  misc_feature (1)..(603): Homolog of NCBI NO: 25518386 NR Description: hypothetical protein F5D14.18 - Arabidopsis >gi|8920616|gb|AAF81338.1|AC007767_18 Contains similarity to a protein F19I3.26 gi|7485810 from Arabidopsis thaliana ESTs
  misc_feature (72)..(604): Homolog of NCBI NO: 15223594 NR Description: pentatricopeptide (PPR) repeat-containing protein
  misc_feature (1)..(604): Homolog of NCBI NO: 15227144 NR Description: pentatricopeptide (PPR) repeat-containing protein
MIRSGYIAEARDIFEKLEARNTVTWNTMISGYVKRREMNQARKLFDVMPKRDVVTWNTMISGYVSCGGIRFLEEARKLFDEMPSRDSFSWNTMISGYAKNRRIGEALLLFEKMPERNAVSWSAMITGFCQNGEVDSAVVLFRKMPVKDSSPLCALVAGLIKNERLSEAAWVLGQYGSLVSGREDLVYAYNTLIVGYGQRGQVEAARCLFDQIPDLCGDDHGGEFRERFCKNVVSWNSMIKAYLKVGDVVSARLLFDQMKDRDTISWNTMIDGYVHVSRMEDAFALFSEMPNRDAHSWNMMVSGYASVGNVELARHYFEKTPEKHTVSWNSIIAAYEKNKDYKEAVDLFIRMNIEGEKPDPHTLTSLLSASTGLVNLRLGMQMHQIVVKTVIPDVPVHNALITMYSRCGEIMESRRIFDEMKLKREVITWNAMIGGYAFHGNASEALNLFGSMKSNGIYPSHITFVSVLNACAHAGLVDEAKAQFVSMMSVYKIEPQMEHYSSLVNVTSGQGQFEEAMYIITSMPFEPDKTVWGALLDACRIYNNVGLAHVAAEAMSRLEPESSTPYVLLYNMYADMGLWDEASQVRMNMESKRIKKERGSSWVDSST

SEQ ID NO: 100191 - protein, 580 aa, Arabidopsis thaliana
  peptide (1)..(580): Ceres Seq. ID no. 13604572
  misc_feature (237)..(271): Pfam Name: PPR repeat Pfam Description: PPR repeat
  misc_feature (1)..(577): Homolog of NCBI NO: 15235498 NR Description: pentatricopeptide (PPR) repeat-containing protein
  misc_feature (1)..(577): Homolog of NCBI NO: 38344941 NR Description: OSJNBa0084A10.17 [Oryza sativa (japonica
  misc_feature (45)..(577): Homolog of NCBI NO: 15217508 NR Description: pentatricopeptide (PPR) repeat-containing protein thaliana] >gi|25345445|pir||D86227 hypothetical protein
  misc_feature (1)..(576): Homolog of NCBI NO: 8671867 NR Description: Contains similarity to glycerine-rich protein Nicotiana glauca gb|AF151215 and contains multiple PPR PF|01535
  misc_feature (1)..(576): Homolog of NCBI NO: 15220869 NR Description: hypothetical protein [Arabidopsis thaliana]
  misc_feature (1)..(576): Homolog of NCBI NO: 15225445 NR Description: pentatricopeptide (PPR) repeat-containing protein
  misc_feature (1)..(576): Homolog of NCBI NO: 18398422 NR Description: pentatricopeptide (PPR) repeat-containing protein
  misc_feature (1)..(576): Homolog of NCBI NO: 25518386 NR Description: hypothetical protein F5D14.18 - Arabidopsis >gi|8920616|gb|AAF81338.1|AC007767_18 Contains similarity to a protein F19I3.26 gi|7485810 from Arabidopsis thaliana ESTs
  misc_feature (45)..(577): Homolog of NCBI NO: 15223594 NR Description: pentatricopeptide (PPR) repeat-containing protein
  misc_feature (1)..(577): Homolog of NCBI NO: 15227144 NR Description: pentatricopeptide (PPR) repeat-containing protein
MISGYVKRREMNQARKLFDVMPKRDVVTWNTMISGYVSCGGIRFLEEARKLFDEMPSRDSFSWNTMISGYAKNRRIGEALLLFEKMPERNAVSWSAMITGFCQNGEVDSAVVLFRKMPVKDSSPLCALVAGLIKNERLSEAAWVLGQYGSLVSGREDLVYAYNTLIVGYGQRGQVEAARCLFDQIPDLCGDDHGGEFRERFCKNVVSWNSMIKAYLKVGDVVSARLLFDQMKDRDTISWNTMIDGYVHVSRMEDAFALFSEMPNRDAHSWNMMVSGYASVGNVELARHYFEKTPEKHTVSWNSIIAAYEKNKDYKEAVDLFIRMNIEGEKPDPHTLTSLLSASTGLVNLRLGMQMHQIVVKTVIPDVPVHNALITMYSRCGEIMESRRIFDEMKLKREVITWNAMIGGYAFHGNASEALNLFGSMKSNGIYPSHITFVSVLNACAHAGLVDEAKAQFVSMMSVYKIEPQMEHYSSLVNVTSGQGQFEEAMYIITSMPFEPDKTVWGALLDACRIYNNVGLAHVAAEAMSRLEPESSTPYVLLYNMYADMGLWDEASQVRMNMESKRIKKERGSSWVDSST
